United States Patent Application Publication US 2008/0114160 A1 - sequence listing, part 19

SEQ ID NO: 6395 - DNA, 23926 bp, Oryza sativa
ggacaccttccttcttccacaatagtttaagatcttcgaccagtggtcttaggtacacatcgatgtcattaccaggttgcttggggccttgaaaaataatcggcatcattatgtacttcctcttcatgcatagccaaggggggaggttgtagatacacatcgtaacgggccaagtgctatggccgctgctcatctctccaaaaggattcatgccatccgtacttaaaccaaaccgtatgtttcgttcgtcctttccaaagtctttaaattttctgtcgatgttttgccactgcgaaccatcggcggggtgtctcagcatcccgtcctgttgacgctcttcagcgtgccatcgcatcattctagcattccccttgttcctgaacaaacgccttagccgtggtattatagggaaataccacatcaccttagcaggaattctcttctttgttagttgcccgtcaacttctcctggatcatctcgtctaatcttgtatcgtagtgctttgcaaacagggcatgcttctaggttctcgtactcctcaccgcgatataggatacaatcattcggacatgcgtgaatcttctgaacttccagtcctagaggtgcagactatcttcttagcctcgtacattgtctcgggcaatttgtttccctctagaagaatgttcttgacgagtttcaataaatcgccaaatgccttgtcactaacaccattttttgccttccattgcaaaaactccagagtggtatccaactttttgtgcccctgctcgcaacctgggtacaacgacgttctgtggtcctctaacatcttgtccaatttatgggcccccttttcactttcgcagtcctccttggcatcctgcaacatctaaccaagatcatccgcaccgtcgttaccatcagcatccctttcctcctcgcctgtttgatttccttcaaatccagcgtattgagcaaagtccggaatattgtcgtcttccacttcatcttcttccatttcaacaccttgctctccatgggatgtccaacaattatagcttggcatgaaccccgactcaaacaagtggaaatgaatagtcctggatgtagaatactccttctgattcttacacttattgcatagacaacaaataaaacccttttgcctgttagcttcggccactctaaaaaaataatgcacgccgtcaataaactctttggaccgcccgtcagcgtacatccattgccgatccatctacatgacatgaaaaaaaatcgtatacaaataattattcgtacaataatgacagtcatacaataattataaaataattacaaactctttcaacagtcatacaataatgatatatcattattcatacaaaaattatgaaatattacaccaaataattcttatttactatttctaaagttttaaactaatattaatgtgttgtacttcttttaattttcattttagtttgttttctattattcaagattaactttcactatattttccttctcaactattttataaaaccttctttagcaaataaattaaatttctatatattctttcttccccacacaaattttctctctcatcaacttacaacaaaattttggagacaaaaaagtgtgcaaaacatagctccgaatgtaatatgaaaaaaaacattggaggattaagttgctaaccttttaggcacctccaatttgtatataatcaccaaaataaattcactagaaattttggcatgacctcccctctttttttaagaaattttgaagcttgctcgggctggaggaggaagaagacatatatatataggggtgggactttagtcccggttggtgttatgaaccggtgctaaagatcgccgggatctttagtcccggttggtaaagatcccgggggagcctgacaagccctgacagcatttgaaccgggactaaagacggttggtgttaccaaccaggtctaaagatcaaatatgcccgttaccctttttaaccggaactaaagatcatctttagtaccggtttttgttgtaacagggactattgtggaattaggccgaccgacgaaagatggtttctccaccagtgtattttaactgtgggaagttagctgttatggaaagcagtgtgaagattcttgtgtttttgtctaattaagccgtgcttaagcgtgcggcttccaagttgttggagatcggatcgtagagaacatccaagttatctgattcagactatttagattgcgttctgatgagaccatcaaagttccatctatctctatcgatgcttctacatgtttgcataatagctcatctaggagtattgttcaggttggatctttcttttgtaccgtgcaacaacgaaagaaaggagaaggcctagctgcgagcagtacttttataggttaattaaggtaagtgctattagcggcatcgttaccattaatcacataattagattactttttatttgtttgtttgggcctgctcgagtaggactctgatcctgtattgcctgcgtgcaatataaaagcccaacgtggcctgtaatcagtggcggatccagaaaatcgattcgttggtgtcataacgtgtatattggtgtcatagtatgttaattatgtttagatcataatgttataacatatggataaacagttttgctataggttttgccgacaccgcttcagtggcgaatctaggatgaaaatagagggggtgcttctaatatcctatgtacaacccacaatgcaatgaaaacatactaaaacatgcctcagcatgttgtcctgatggctgagttggacccttcaacatatatgccctcctcacttgatctataatctccttaggataatcttcaatttgtttgcgacacgctggatcggcaacaatttcactaggatctaaaacatgcctcggcatgttgttctcatttgttagattccttcgtgggtaaaaattatgcaatgtttgattctccatccttgcaaattaactgtcctatgtgtgcttaaaataaataattgatttactgaaatttactgcagtgatgataaaataaactgaaactgaagagactagtgttagagtagagagcaaatagattgatttacctgtactggttgtggctggttgtggcgttgtgctggccagccgggcagcagatgatgagatcgttgtaggctgcaactgcaagcaactcgtcgactcgtcgtcccgtgatccgtcctgcaggacctccgcggtggcgcgatcgttgctgccgccggcgctgtcgcctgacgcagtgacgcctcgactccttctgtatcgcgcctccttctgcgtggcgctgtgacggcttgctttctcggtcgccaacccaatgggccaggcccagcttgcgagggaggggagggggggggggggtgctgtcgggtgaagctggggctccagccccaacagtacatccgcccctggcccctgcctgtaatgagagttagtttttgcttttggtgaagtcgtctagggtttattcctgtcgaactggaggatggcgatcccatcttgttgatttgccgctgccgccgtgaggtgtggagggagcacacgtccaggatacttctccagggagtgttgcttggagtcaggtttggttccatcttctctaatcgtgtgtattgccacacgggtggagttgcagatcgttgatatgtatcagtgctttaaaactactatctgttattgctgtttgttttgagagacaaaatcaattcactgcgacgctcatatacatactgccggttaatattgttcttactgctttgatctactcatttgtttaagttggaaaaataatcgggactgtctagtgcactgtcgacagatttttggacctccgatcttgtcaatttttttaaccaacagatctatatccaacagctaatattatttgacaaataaaaattaaaaatacataaatgaacaaacacaaataggtttggaagcccattttcaaagggctcaacacaacccgacccaatcaaatagcctagattgagcccgaatacaaaatttacatcaaatgaaagcccaaattaactttgtagtcaatttaaaggcccaaatcaaagaacaacggctcagaaaggatttagagggagaaaaaaaattctttgaaccttcttgatatgaatcttcatcagaataaatcacaaaacttaactcaaatcttctgatattgatctacatttctgtcgaatgagattgaactgtaaaaattaaacaacaagttaaagtcactctgaggacccttctaatgcagcacaccacaactcaaattagataaccaaaatgtagagttgcagacacattactgtaaaaatgtagaaattcagagaacagaccacaagtcaatcagaaatagaggagtcaaacacattattgcagagctaattaattaacaacaaatttagaattaagcccacaagtcaatcagtaattcggaatacagacatattactgcacagcaacaaaaatgtcagaaaatttagaatttaggacacacctcaaatcagaaatcagaaatgttcaattggtgatatattaagtagattgacttcagactgttcacagatcgaaatatttgagtgtttagcttcggattttcatatgaatctccatcaaaaaacttcacaaagcttcatcactccaaaaaaatatcttcttgagttatgggtctacattttatacataaatcttcatctgtcaaaattaatcaccagttaaattcataacaaaaaaaattcttgacttaaaactttacagaaacatcacagaactttacaaaacaaattaatggtaggaatttatgtactcatatgtattagttcagaataagaaaattagatgcaatacctctattaggcaaaacaaacatatagctgcaaataaacagatgttagagtatttagataatcaaatcaaacttcaaaactaaaaattataatataaaactaaattaaaaattgctcctagttgtcataaaccattcacatcatgcacaatgcttcataaattgagaatattcagcagcattctaatttttttcttaaattacagttattttgtacaggaattacataaaacaaacattgtaattttaataatataaagatgtaactgacatcttgtagactaaagactttatataaacatcacatatcatattatcttagaattcaattgttatgtgtattcttaggttgcacaacataatgacatatgacttttgcattgcatattttctggtcatattagaactcatgcaaatatgtactgcatatgtactgtattcagaaccgaacttatatcaaaatttggatttcagagaatttatattacatccaaagtcaacagcaaatatgtcaaaaaaatcagagtatatcagatttaggcatgtatctagaaactgcacaaagtatatctatatatcagagaatttatattacttatgtaccaactgcacaaagttcatggaaaccagatttcagatgaagcatatcagatttcatatactttgcaagtaaagttgcaggtacaagaaaagtcaaaagatcaaattcaggagcaaaagcggatcacgaacaatgcatagggggaaagagttgaagtcaaaattcaagcacttaataaatctgaagttacatttaccactttttgaatcttgttttgaatcttcttctgaatctgaatccagtggcatgttcatttgtttcttgatcttcaaattgcgtctaaaatccagaattcggaccacacctcaaacttttagaatcttcttttggttttttgatttggatgttgatgtacaaagtacttcgactctgctatcaaatggaaacaaaatgaaacattcagtcaaattggtagacggaaaattaacatatgaaaataccagtgcagaaatcaacaatgaaagcgtcttgctcgattttttgtttcagtgttgtttcaggctaatatgcaagataacttatcaaaaattagtatactatgaatcttgcatactaaattgttttagtttcaatctttgcagcataagattactgactaaatcaaatcatcagatactatacttgcaattttcaaattgacaggattaagtttcagaatttggcacaccaatcaagatacattattttcatagctgaccaaaccaaactccatctgaatgaggaacatacaaaataaactaaatctgaatctgaaacttacagatacagtaaaacgttaaaaaagtaagattttaactgaaaaaatcttacaatatcatagataattaataactgaaaaattatacaatctcatagttgagttcgagtttgaatgatttcatatgttgttcattatctacaattatttgcaggaatctcatcaaacaaagggaacttatcaaaatattacaaaaatggtggaagaggacaatcgacagtctggaaaaaattgcacaggtttgcagattacatattttctgcttaattattttgaaaacaagtgaattgagcacacacacacacacacacacacacacacacacacacacacacacagatatatatatatatatatatatcaaaagtgatttctggaatattccatttgaaggtattaaagatgggaattttcaagatagtcaagaaacatagacaaagtacatgtatgagccatctttataaaattacagtatttttatatcaaatttacagttataaaaacctgtaattttagattcaatttcatgtaaatgatacaaaatcaaatattatggtcacaaaaatcaaacctgcagatataacaaagctcccctgtcagtgtagcaaaatattttagtttcaatatggctgcaccatagccgacaacaatcacccgcatcaacaaaacatcttcaaggttcagagttcttaattctagtcaggattaggtgcaaaatggtatacacaaatgaaatggagtaaaagttcatttttttttatgatagtttgatacttgccgatatgattctgagcaactttgttcaggtaggagatgcagcgcttacttaactgattaagactttctccaccaccctaaacatcatctgaaacagtgataaacttttcaaagttatatagtactacagctacaaaatgttatacacttattccattttttatttaacagacctagacaaagttacatttctgggttataattgttccaaagaaaaaatacggtttggaacttaccggcaattcttggtttctgccatcaaagtacaaaccatttttaacttcaaaattagcaaagcctttgaaaacgcctgggcttttattcacagtgtcatcccacgtcaaaccttgcagatatcccatgtgcctttctcttagtgattcagtcaacactaactgaaacaaattattggtgttactcatagaggaacaggcaggacaaaagtaggctagaactcacatttgatacatcacaggctttctctatgatttctgcagtctcagcagcacgcttcaaatcagacgattatacaacaattggcctagcttctcttgccagacgatgagccaccttacaagtttgcatcagatcgattcatttcaaacacattttacaaatccacagcaattgtacccataaactacaggattcaccaaataggagatccaccgattcgcatacaaataagaaaaaacaaacactcaaataactcacctgagatgccagctccaaatcgacgcttcagccaaagaaataacctacaacccaaacaaaattgagattaaaactcaaaatcacaacaaaaaacaatgaaaataggggcaaaagcaacaaaaactcaaaagcttcaaccacacacacggccgaatcagggaagaagcaaatcactgaagaaaaaaggttgacgaacagatccgccgtctcctcgcaaaaatagagattaaaactcaaaatcacaacagcggtgatacgcaaccgttgatgaattctcgacagcgaacaatgaagaagagaacaaatccacataaaaagttaaggaaaagagcaaaaaaaatggatccatataaatcaacaaaataagacgactcatcatatttaactcgtagaaggagatctagattgctgcaaaacacagagaaaaccctataataaaaaaaaataaaaacacaaattagttgaacaaatcgatgcaatcaccaccttacttggcactgaggcacgcaagcacggcacggcggtgatacgcaaacattgatgaaaacttagcggcgaacagtgaagaagagagcaaatccacaaataaagtaggggaaaagagcaaaacgtagcagaatgcaagcacaaatgctaatgaaaagaggaacaagcaaaccacaagagacaagccggcgagacgccggcgagaagccagcaacgagaagattcgccaggctaatagcctcgacggagacgacgagagaaaagaggaaaaagaaagaaatttcgcctcactctctccccgtgtcaaaaggaatcagaaagcaggcgcggatttcaaaattgaacagtaaaggcaggacccactaagcccaatccaatctagataacccaatccagcacacagagcaaacccagactatgcacgaatcacagaacaaaacgaatggaccaaaaaacgacagattgagcagtcaataatctgttgacagagatgtagcaattccgaaaataatctggttggtttattcagttgttggtaccgtgaaagagaggaaaaatccgggcattcactgccgggtgctcatcatctattatctttattctagaataaacaaacctactactccctccgtattttagtgtatacgtcgttgactttttatttgaccattcgtattattcaaaaatgttatgcaaatataaaaatatttatgtcgtgcttaaggaacatttgatgataaatcaagtcacaataaaataaataataattatataatttttttaataaaacgaatggtcaaacgttggttaaaaagtcaatggcgtcatacattaaaatttaaaatacagaaagagtataaaataacacatcataatactatgaatcatagaaaggccacaaacgaaggcaaccttactctaacagctccacagcttaattattagtgataaaaaagcaacatatagataaaacttttatacatgtgttatcaagtgacttaaaagccaatattaaaaaataaaatactttaaaattatcctaaaaccaactttaaaatttaaaatttacaatttgacagtgattccatatagaaaaaacaatgagactgtgaaaagcacgtgtagaattgtcaatacctaacctgtcagcaatcttgtccgagaaacagggatccaagccaaaatcgcagtgggtcagtttgttttttttttaagtgaaacggtggatcagtttgtgacgaggacatcccttccaacgatacaaccacgcctattgcacagcaaggaccaatgactagagctcgagctcatgaacttaattatcaggtaaagtcattcctagctaatcatacaagttcttctcagaattgggtgctactaaatggttgttgtgatctacttgttgttaggaatatgggagaggaaccaaatcgcaagcagcactagcagcgctgatttgatgaagtcaatgctcttcactccggagggcaaacggggcaaatgagtacttgttggaaagatctcgtcgtctactttcagctatgtgtggcctcaccatcaagtttgacccaggctgctcagaatgacgaaaatagttctttacaacagaaacttgggcttgggccttgtatcattacagcccattaggggtccacagaacctagggtttgctcccacctcctctcctggtcattcctccacctatataaactcctagcagccaccattttgcactttgggttttgttttgatgtaagtttagctgcagctacttccttgtactcgcgtgtgtcggctagaccacccggatacttgtattcagaaccccattttggtttgtttaagtttcatcatttgacaagtgtcgtgagctgtttccttgtcaacttgttcttgcttgttcttcgattgcttgcaggttcaaggttgttcttggcacggcaagaacagcaacaacgtggagtcggtgtaccggttgctaaggcgcagcacccctgtggtagttgtagtcggaccgccaacgtcgtatccttccccaaatcgaagtttatcctcctctcatcgaaagatcgggaacccccgttgctgcatcaagtggtatcagagctcaagttgctcggtgagagattttatcacttctttgtttttacctacagcccaaaagaaaaaccactaaaataggtcagacccgaaatcaccaaaacatgttgagcctttgctgttctacttagtctttgcttgctgagttttcgattgcatcgattggttgagttgctggttctagtagtttagtcctttagagtttcgagttctgctcgcgatttcgtcaccgcaaacacttccaccatcacttcatttatcttcatcccgctgccaccatcaccaccatattcaccacgaaatccacctccaaccccaccaaatttcgtccaccacaaccagcagcaccctcatcaccacatcagccacccccaaatgcatttattgctgcctccaccaacagccaacccttttgcaactttttgaagtgaatcagcccttcccaagaaagcatttaagtgctctcacttttgacttgttggctgaatcatgtaactagccaaccaacccatcattacttcttgtttcgatttgttggctgaagcttgtgaaatttcgaaaatgtttgagaaaaggttattttgctaaggcttgttttgacttgttggctgaagctttgagcttgctgtacaaaaaaaaaagaaagaaaacaaaaaaaaagaaagaaaaaaaatcagaagtgaagagaaggaaaaaaaaaggaagggaagagaggaagttgttgttgttgctgttttgtttgtgttattttcgtgctattttgagtggctacgcttgtgactaggctcgcgtctctaaagggttttgcctaggaccagcacaataccatcgttgaatgattattcaacttgctttgattaatgtggttctagctgtaccttgatattacttgcagccacctatagctccacaaatttttatctactatatcacaggatcgtgcttgttgtcggctccggtactactaaccgttgttgctgttcttgctgtttgccaacgccttttacataacaaagtaagaacatgtaagaactcgtttgcacaagtttggtagaagtggagatggacaacacctagctccaatagttgataggacatatttcttgtgaattgtttcttcccattaaccatgacaggaggatcgggggagcaccctcaacattcaccacgtacaaggggcatcatacaacattttgagcgccaagtgagggagcatgctgaaggccttgatgaggatgttagggtcgccaatgatcgccttggtcaattggaggctgctcaaattgacaccaactccaagctttcctcattggagaggtcccttgtggctgtgaatacttctcttgcaggtatcttgaatacgttggagagaatgggccaagatggtcatgatggatcggctaggcgcaaccacaatggccatgatgctaatagcagcatcgcagcaagggaagaactggagtacgctgctgacactgagcatgatgaggaggtacttggtcgtccacaaagacaacagcgccggcagcgccatggcatgggcgctccaccacggcaggaggtacgtgataatgatgattctttaggcaagatcaagtttaccattccttgctttgatgaaaaatatgaccctgatgcatatcttacttgggagttagccattgatcagaaatttgcttgccatgattttcctgagaataaacgtgttagggctgctactagtgagttcactgattttgcatccatttggtggagtgaatttgttcgttccaatccaaataacactccccaaacctgggatgcaatgaaaagagtcatgcgagctagatttgttccttcatatcatgcacgtgatttgctgcacaaattgcaacaacttagacagggaaacaaatctgtagaggagtattatcaagctttgcaaacaggaatgcttcgttgtggattggtagaaaatgatgatgctggtatggctagattcatgggtgggctgaaccgagaaattcaggacattctagcctacaaagaatataattcaattaatcgtttatttcatcttgcttgtaaagctgaaagggaagtacagggacgaagagctagctttaggactaacatttctgcaggtcgtgctagctcttggacatcttccaacgttgctgcaccgtcaactcgagcagcagcaccatcgtcctcaaacaacaagctgcgcccctctacaacaaactctacaccatgcccgagtgaaccaacaagaggggttgctgctacaccttccaagagctcatcatcagtagcttcatcaggaaggacaagagatattcagtgcctacgctgcaagggctatggtcacgtgcgcaaggactgcccaagcactcgtgtaatgatcgtgagagctgatggtgggtactcctccgctagtgatttagatgaagaaacctatgctttgcttgcaactaacaatgcagggaaaggtgacgcgccccaccaagatgaggaacacattggggctgaagctgcagagcactatgagagcctcgtggtgcagcgagtgctaagcgcacaaatggaaagggctgaacagaatcagcgccacaccttgtttcaaaccaagtgtgtgatcaaggaacgctcttgccgcgtgatcatagatagaggaagctgcaataatttggctagtgctgaaatggtggagaaacttgcattgagcacacagccacatccgcagccctactatattcaatggcttaatagcagcggcaaggtaaaggtaacacgattggtaagagtacattttgccattggttcttatcatgattcaatcaactgtgatgttgtgcctatgcaagcatgttctattttcttaggtaggccatggcagtttgataaagattctttacactttggcaaatccaatcaatactcctttgtgcataatggaaaaaaacttgtgttacatcctatgtctcctgaagttattttaaaggatgaacttgctagagctagcaaacaaaaaaatcaggagcatactaggagtgagcatcttattgcggctaatgaacttgagaagcataagaagaaacccaccaactctgttcaaaataataaaaatgagattaagctgaagggatcttgtttcattgcaacaaaatcagatttggatgaagttgacactgacactgttgtttgctatgctttggtttgcaaagaaaccttattccaattgaggatactcctatttctttgcctcctccggtcactaatcttttgcaggagtatgctgatattttcccaaaggaggttccaccggggctgccaccaattcgagggattgagcaccaaattgacctcattcctggggcctctctgccaaaccgtgcgccatataggaccaacccagaggaaacaaaggagattcagcgtcaagtgcaagagttactcgacaaggggtatgtacgtgagtctcttagtccttgttctatccccgtgcttttagttcctaagaaagatggctcatggcgcatgtgtgtggattgtagagcaattaacaacatcacaatcagatatcgtcatcctatccctaggctagatgatatgcttgatgaattgagtggttcacttgtgttctctaaaattgatttgcgtagtggttaccaccagattcgcatgaagttaggagatgaatggaaaacagcttttaaaactaaattcggcctatatgagtggttagtcatgccctttggtctcactaatgcacccagtactttcataagattaatgaatgaagttttacgtgctttcattggcagatttgtggtggtatattttgatgacattctcatatatagcagatcaatagaggatcatcatggtcatttgcgtgctgtttttgatgctctacgagatgaacgtttatttggtaaccttgagaagtgcacattttgcacagatcgagtctcttttcttggctatgttgtgactccgcagggaattgaagtagatcaagccaaggttgaagccatacatagctggccggttccaacaacgatcacccaagtgagaagctttctaggacttgctgggttctaccgccgctttgtgaaggattttagcaccattgcagccccattacatgagcttaccaagagaaatgtcacattcacttgggctgcagcacaaaggaatgcattcgacactttgaaagataagttaacacacgctcctttactccaacttcctgatttcaacaaaacttttgagcttgaatgtgatgctagtgggattggattgggtggtgtgttgttacaagaaggcaaacctatagaatatttcagcgagaaattgagtgggcctagtttgaattattctacttatgataaggaattgtttgctctagtgcgaacattggaaacatggcagcattatttatggcccaaagaatttgttatacactctgatcatgaatctttgaaacacattcgaagtcaagcaaaacttaaccgtaggcatgctaaatgggttgaatttattgaatcttttccatatgtcatcaaacataagaagggaaaagaaaatgtcattgctgatgctttgtctagacgttacgcaatgctatcccaacttgacttcaaaatttttggcttagaaacaataaaagagcaatatgcgcacgatgatgattttaaagatgtgttgttgaattgcaaggagggaaggacttggaacaaattcgttctcaccaatgggtttgtgtttagagctaataagttatgcattccagctagctccgtgcgtatgctattattgcaggaagcgcatggtggagggttgatgggacactttggtgtgaagaagacggaggatatccttgctgatcatttcttttggcctaagatgaggagagacgtggagaggttcgttgctcgctgcacaacatgccaaaaagctaagttacgccttaaccctcatggtttgtatatgcctttgcctgttcctagtgtgccttgggaggatatttctatggactttgttttagggctgcctagaacaaagaaggggagggacagtatctttgttgttgtagatagattttctaagatggcgcatttcataccttgtcataagagtgatgatgctacacatgttgctgatttgttctttcgtgagattgttcgcttgcatggagtgccaaacaccatagtttctgatcgcgatacaaaattccttagtcatttttggagaaccttgtgggctaagttggggactaaacttttattttctactacatgtcatccccaaactgatggacaaactgaggtggtgaatagaacattatctacaatgcttagggctgttttgaaaaagaatattaaaatgtgggaagaatgtttgcctcatgttgagtttgcttataatcgttcacaacattctactactaagaagtgcccttttgagattgtttatggccttctaccccgtgctccaattgatcttttgcccctcccaacttcagagagagtgaactttgatgcaaaatatcacgctgaattgatgttaaaactgcatgagaccactaaggagaacatagagcgcatgaatataaagtataaacttgctgggagcaaaggaaagaaacatgttgcttttgaacctggtgatttggtttggttgcatttgagaaaggataggttccctaatttgagaaaatctaagttgctacctagagctgatggtcctttcaaagtgctacaaaagattaatgacaatacatacaagcttgagctacctgccgattttggggttagccccacgtttaacattgcagatttaaagccatatttgggagaagaagatgagttagagtcgaggacgactcaaatgcaagaaggggaggatgatgaggacatcccttccaacgatacaaccacgcctattgcacagcaaggaccaatgactagagctcgagctcgtgaacttaattatcaggtaaagtcattcctagctaatcatacaagttcttctcagaattgggtgctactaaatggttgttgtgatctacttgttgttaggaatatgggagaggaaccaaatcgcaagcagcactagcagcgctgatttgatgaagtcaatgctcttcactccggagggcaaacggggcaaatgagtacttgttggaaagatctcgtcgtctactttcagctatgtgtggcctcaccatcaagtttgacccaggctgctcagaatgacgaaaatagttctttacatcagaaacttgggcttgggccttgtatcattacagcccattaggggtccacaaaacctagggtttgctcccacctcctctcctggtcattcctccacctatataaactcctagcagccaccattttgcactttgggttttgttttgatgtaagtttagctgcagctacttccttgtactcgcgtgtgtcggctagaccacccggatacttgtattcagaaccccattttggtttgtttaagtttcatcatttgacaagtgccgtgagctgtttccttgtcaacttgttcttgcttgttcttcgattgcttgcaggttcaaggttgttcttggcacggcaagaacagcaacaacgtggagtcggtgtaccggttgctaaggcgcagcacccctgtggcagttgtagtcggaccgccaacgtcgtatccttccccaaatcaaagtttatcctcctctcatcgaacgatcaggaacccccgttgctgcatcagtttgtcgagcaggcataatagaagcagtttgtatgtgttctacttcttactctctccattctcgagaacttgcatatcgaactccattatagtctgacaaatttacttgattgtaatggaaaatgaactagtataatcagttcaaatcccgtagagaatggaaaagttcacatgtttgaagcaagtcaaatttactccgaaatttcaacgaaattccaataatccaaaatacactggtattaactactcataccctccaaaagcccaaatttgtggttaagtacaatttctaaatttctatattcaatatatctaaagaatatcactataaatgtccaaaaaaaaatattagcatcatatctacataaataaatactagggcgaaagggcctgtagcccagtggttacaacagcctcactgcctcagtagcacttgaggtcctgggttcgactccccatgggagcgaattttttaggatttaacaacgttgtgctttcagtggtaggcggcgtacccatggacagcgaggcgcctgtggtgacttcgtcaatctctccaggatttgccggcccagtcttcgaagatactcatagaggtagggtttacgtgcgtgtgttcataggggtgagtgcgcgtgcgttgtgagtgtttgtattgtactgtgcaattcttaaaaaaaatactaggataagtattctctagtttctactctctactgacagccaataaattaatttccctcaatccggtatgttggtcacagataggaaaagtatcaaagcttagtgaactagtagtagctggattcagatctctgatagtctgacaaacgacaactaattaaaattactacttttttctataatggaaatgattttaatctccgacctctaccataagacacataagatgatggggcagaccttcaactttctataaataagttcaacctaaaaatactttccaaaatcaataaattctagcacgtcactccgtaagtactacaccatctaaaataaaacaaaagactcttagctatggatgccaagagttacttcgcaaaaaaaaaaaaacaattactactaagatttggcagccaagccgtgtgacctcacctgcggacacaacacagaaaaagccaatcaatcaacggctacttgtatgtaatctccacgcattccaatggcggctgcctcccacaattcggtggtcactcgtcagtcgtgtcgtctgctcacgctcgccaagaaagattggccatggagaagccggcggcgagcgtggaggagccgctgcttgttggcgctggcgagaagaagggcgagagcgcggccgcggcggagctgaagcggctgctccggctggcggggccgctggtggcgagcggcgtgctgcggaacgtggtgcagatggtgtccgtcatgttcgtcggccacctcggcgagctccccctcgccggcgcctccctcgccacctccctcgccaacgtcaccggcttcagcctgctcgtaagcatcggtcgaacaccttgcgcgcacgcaaagaactgcttgatccctgtcgatttattggtcggatttgtgaatgctttcttggttggtcgatttcgatcgtcagttcggcatggcgagcgcgctggacacgctgtgcgggcaggcgtacggcgcgcgccagcaccacctcctcggcgtctacaagcagcgcgccatgctggtgctcgccgtggccgccgtgcccatcgcgctcgtctgggccagcgccggcgagatcctcctcctgttcggccaggacccggccatcgccgccgaggccggcgcgtacgcgcggtggctgatcccgtcgctcgtcccgttcgtgccgctggtgtgccacatccggttcctgcaggcgcagagcgccgtgctgccggtgatggcgagctgcggcgtcacggcggcgagccacgtggccgtgtgctgggcgctggtgcgcaaggccggcatgggcagcaggggcgccgcgctggcgaacgccgtctcctatggcgtcaacctcaccataatgtctctctatgtcaggctgtcgcgctcctgcgagaagacatggactggcttctccatggaggccttcagggagctccgccagtatgcggagctcgccatccccgcggcaatgatggtctggtaaggacaacatcatgtacttcattagaaattttgtagtccttgagaaagcaacgggaggtaccatgattttacgctagaaattttggtacctcaagatgcttagtatctagatgtactaaattttacactagaaaatgtggtacgacacattttcaaggatggtaaaatttgcagagatcgaaaactgcttacattgtctaaaattatatttatagcttgactaatgttggattaatttcttgattacgcagtttggagtggtggtcatttgaatttcttgtgatgctctctggtcttctgcccaatcctaaacttgaaacctcagtgttgtcgatatggtaatcaatcacaagattatgtctctgatacaaatttaataaattaacatgaatgaaacgaagtatgtttactaaattgtttgctggattctgcagtctcaacactggtgctctgctggtcatggttccaattggtctcagcacagctataaggtcttgagattctgcaataaaatgttcagatatgatactctgctattttgatccttttttctgcttagagtctggctgatttctttcttttctactgcctagcacgcgtgtttggaacgaactaggtgccggcaatccccaggcagcgaagctggcaactcgagtggtcatatgtatggccatgaccgaaggctcggtggttgcgtttacgatgattctgttgcgcaattcctggggtcacatgtacagtgatgaggctgaagttgtcacctacattgctcgtatgatacctgttctagccatatcattcttcattgatgggatgcacagcgctctttcaggtaaaaacctcctgcatggatgatgtcagtgacactgccacattataagcatgtaaatgaagttacctgatgcataagtcaggaacagaatgatcagaagatcattgtctgaatatttttcaggagtgctcactggatgtggcaagcagaagatcggcgcacgggtaaatcttggcgcattttacttggcaggcattcctatggccgtctttcttgcatttgtgctacatctgaatggaatggtactgctatttgtctgaatattccctttcgttttttaaaaaatagctgcagattcacatctagcacttcgcacatgtttcagtataaacaacatggatgtatctctgaaagactgaaaattttgtgctttcattagggcctttggcttggcatcgtttgcgggagcctcagcaagcttatcttgctcttttggatcacaatgagtataaactgggagaaggaagtaagttatctgaggatgcctaccattttatatcagggtagctaccaattttcctttcattgtaaaatgtgtcatatgctcatgtttgcaatttcatttcagtcaaccagggcgaaagaattggtgttcagttcatctcttcctgtagcatgaagaaaaacaatgcatcagaatttcatgatatggtgcaattgttattgtgaaagcaacacagaaccaaatgttatgaagctcgcctttcatctttaagcacccagtttattaacatttgtaacatgaatttttgttcttgtgataacacctatttaatattttttttcttgttcagattgtactctgtaaactaaggatatatcttatatgcatcgattaattgaaaatctaagaagcatattataggaaattaaacggttctaccagttctacataaaacggtgtgtgagctataatcactctgatcttatcttagtcgtctgttcaaaggtactagtaggtctctactagcctccaagatataccccctcattctctaaatgtttaatgccgttgacttttttaaacgtgtttgaccgttcgtcttattcaaaaacttttgtgaaatatgtaaaactatatgtatacataaaagtatatttaacaataaatcaaatgataggaaaagaattaataattacttaaattttttaaataagatgaatggtcaaactttttaaaaaagtcaacggcgtcaaacattttgggatggatggagtactaacgtttggttgcaatgtctgtgtacacgaaaattttcattgcatggactaactctgcagaaatttgcaaacaatgacgaagcattttggaaccttcgctaactttttctgaagaaatattgaaaatccataggacattctatgaaatttcgaatcatgctgaaaccttcataggagccatgagtgtaaaatattatcagagcacaaaggttgtgataagtccttgtttgtcagatttatcaacctggtgcttcatctcttctgatcgtattacactgactgattgagaagtggtcagatttgtttgaaaatttgaaacaaaaacagtggacgcaaagtgacttttgaaacattgcgtgccggatcatgtacagtacttccatgataagacggtgtatcagaaggcatgaaactacttctgtacctattacagatctgcaatgtagctgtgcattttccagttcagattttgtacaactccctctgaaaaatatagcgtgaatgttattttgaaaaagtattgagcaaacaatcaatttctgcagaacaaacattgtatgaaagccatttgaaatatgaatatgttgatgtaacttacacacactaaatatatttgtagtttaagtaattgatggtcaaatgatcttataaagttgaccttttcagaacactagcatgcactattaattggctcaacattttctttaaagcataatggtaatctttatttaacttagcctattacatcaaggtgagaatatttctgatctctgcataactaaaacacacaccgatattaattggtcaatataaaagaacactgtctgggacgacgctctacaagtgccgagcaaggccacctgagcttctcacacctccatggatgccacaggattctacaaaatgcaaattccacaaaacattctaccaagcatagcagcatacatacaaaaaacattttttaaagtgcaattacgtagcatcgatttaacttgttgtgtgctcaagtcaatgcacacatcaaaagacgcgctgtttacaggtcatacttcttgggagttgggaaattaacatgagcatttggacacatctgtcttggctatttctgcagctgtgatgatccataagcacaaataatagtcgaatacctcttcttgcaaacatttccctgcaaataaaaataaccttccatgaccaccagtaaaaaactattctcactagttattcggcacagttaaaactcaactgtaaaatcatcggtgttgcacaaagtgtaggaatccctcactcacacaaagtgaagtccaaactgtcttaaacttgctgcaccgtgtttatccaaaactctacctgttgtctgtttccttgaccatcgtcatgcctgacgtcctcttatatacacggtaataattgaagacatatgagtgttgctgacaaatacatggattgatgatactatcaccatcgaaaaggttcaagcgtattacttttcttcacccatcccgcaggtaacgaagaccacgaaactgaacccatgcaatcttcgctgcaaaataaaaaatacaatctccttatttaagtctcggaggtatggaaactataaatatgataatctcatttagaaaacaagaaaatgaaatattccaacttttggttgaaaaaagagtattatatatgagagcaattttatggtccttgaggaggtactatgaggtaccactttttctattgtaaaattggtacctcttgatacttaggtactatatgaggtaaaaaaaatagtgtaaaatttggtacctaatgatacctcctcaaggaccgtaaaattactctatatataaagcatgcacggatggggtccactatatatctcggtgacaatgagttgatggtgatgtggtttaaagtgttacatatgatcctttcacctgactttgaccatcggacaattacaattagacaataatttttttatgtaaatatgtaggagagtgtgtatatattgatataataaataatttatggagttacatatgtacaatgaagttgctttagatagttccagcatcgaagtgcattcaaactacttgctatagtgaacggcaaagctcttgccttatccctcaaaaatgatattctggtgaccggtattaacatccgaagaattcactaggtatgtgtgaataatgaaagattctcaggccccagagtcaactagctctgatgtacccatacgtcagaaccgcttactcttatgcccaccagtgatgggctgaagagctcgtcacggatggcctcacctttatgggtccattgcagcccgtaacagataggcatccggtcacggcttgtcataggtggtcacctatgcgggctgaatctgacacccgttaaagtgatacctctatcggatgctagttccagcccgtcaaaggtaaacacgtacctgtgatgggccataaagatatagcccgtcagagatggccttcactcatctcaaacgggctctagccctaactcgtttgaggtgagttgcggcctatttatacccccaacctaccaaccactttccatcccaacccagtatactgttcatttttcgggtaggagagcaagggg

SEQ ID NO: 6396 - DNA, 24300 bp, Oryza sativa
cgctgcaggccgccgacgcgcgccgccggcgctgcggcgcggccgatgaccacgccggagttgtgcaggtactgatcgattctgctgggagcgcgccacagctcggcgtcgcggacgggagcaagctcatcgacctcgcctccgtcgacgtgcgcctcccggcgcttgtgtacgtgtgccgcgagaagcgccgcggccgcgcacaccaccggaaggccggcgccatgaacgcgctgctgcgcgcatccgccgtgctctcgaacgcgcccttcatcctcaacctcgactgcgaccactatgtcaacaactcgcaggccctccgcgccggcatttgcttcatgatcgaacgccgcggcggcggcgccgaagacgccggcgatgtcgcgttcgtccagttcccgcagcggttcgacggcgtcgatcccggcgaccgctacgccaaccacaaccgcgtcttcttcgactgtaccgagcttggcctcgacggcctccagggccccatctacgtcggcaccggctgcttgttccgccgcgtcgcgctctacggcgtcgacccaccgcgctggagatcgcccggcggcggtgtcgccgcggaccctgccaagttcggcgagtcggcgccgttcctagcctccgttcgggcggagcagagtcacagtcgcgacgacggcgacgccattgccgaggcgagtgcgctcgtgtcgtgcgcgtacgaggacgggacggcgtggggcagggacgtcggctgggtgtacggcaccgtgacggaggacgtggccacgggcttctgcatgcaccggcgagggtggcgctccgcctactacgccgccgcgcccgacgcgttccgcggcacggcgccgatcaacctcgccgaccgcctccaccaggtgctccgctgggcggcgggctccctcgagatcttcttctcccgcaacaacgcactcctcgccggcggccgccgccgcctccacccgctgcagcgcgccgcctacctcaacacgacggtgtacccgttcacgtcgctcttcctcatggcctactgcctcttcccggcgatcccgctcatcgccggcggcggcggctggaacgccgcgccgacaccgacgtacgtcgcgttcctggcggcgctgatggtgacgctcgcggcggtggccgtgctggagacgaggtggtcggggatcgcgctgggtgagtggtggcggaacgagcagttctggatggtgtccgcgacgagcgcgtacctcgccgcggtggcgcaggtggcgctcaaggtcgcgacggggaaggaaatatcgttcaagctgacctcgaagcatctcgcgtcgtcggcgacgccggtcgccggtaaggataggcagtacgcggagctgtacgccgtgaggtggacggcgctgatggcgccgacggcggcggctctggcagtgaacgtggcgtcgatggcggcggcgggtggtggtggccggtggtggtggtgggacgctccgtcggcggcggcggcggcggcggcggcactcccggtggcgttcaacgtgtgggtggtggtgcatctctacccgttcgcgctcgggctgatgggtcgccggagcaaggcggtgcgccccattctgttcctgttcgccgtcgtcgcctacctcgccgtccgcttcctttgtctcttgttacaattccatacggcttaaaggcattcttaatttcgaccctacaattacagaattactacttttcactcactaggaattaagctggaattcacgaagctaaatggtatagatatttggggtgttacacttttaacccatgttgctcattgtttcttttctctatggtgttacaagatgttacgagcaagtttaatagtatagcaaactactagcttcaatttatttataatcaatttaatagctcattcatataatagttacatactacattattaatatatggtcccacatgtcatacacgcacagtgttttagagtccgtgctacagctgtctacaaatctgtagcccgctcctcttccctctccttatttatcttcttaaaatacctgctcttaactagcctatgtcgtcgagccttgaaaaagagaaattattttctgaaggctctttaccacacgatatgcaccaatgtttactacctactttgtgaataagggtgggccctacgtcagtgggtattagttattgttgtagccataatggtgaaataacaaaagtaggtagtaagctggaccccacaatcactagtcatgagagaaagatgagagaaatcatttgtttattccttatgactaggtagtaagcatattacctgatattagctacttactactcccataatgtatacaacctggtagtaggagtagtattttatttcttactatccactttagatgcacattgtgaatgccccaaggtttggacttatagctatgtgctccaatcgtatttccatctatatatgtcatttcgcgaatcgcgaggatcgatgatccaacggtgttcaagctaggtgcagctgtaactaagagtcctctagaaaaataagtgtgcatgagcttcgacattagttgctggctgcatgttagcgcgaaccaccactaacagagagttttgtgtactagtgcaaagcttatagtaagaggatggtgtataagttttgttgttagaaactactactctttcgtatgttttatgaaaaaaatacccgtacgttgtaacgggtaaaggctattttagttttattattgttgttattgttattatacagtttagatagggtgaaaattaccgtggaaatttgtttggatattacttttagaaaattatgatgcaattaggagtcggatatggattctaataactcaagtggacgtcctcccgtttattagatgtcaactagatggttacgaaaaattttcaaaaaaattgacaagatagatcaatatgtaatatatcactccacaaacatttaagttcaaattcaacttctacaagttgtaacaaaaataacaaatttaattgtaaatatacatatagtaatttgagttttgtttgttatttttgttacaatttgtagaagttgaattttaacttgcatgtttgtggattgatatattatatattgatctatcttgttcatatttttttaaattttttcataaccatttagatgatatgcaataaatagctggacgtccactcgagttgttaaaacagtttcccggtaggtgtctccctttcatctcaagttatcatgcgagttttttaaaagtatttcttatacgactccttctgtatttttaaaagaatcccaagttagcgtgagagttttttttaaaagagatttcttatacgactccttatgtatttttaaaagcgaaaaaaattaaaaacggactcaaacacgtatctatattttcaaaagcgaacgaactttgaaaccgactcaaatacaattgacctaccaaagtattggtaaaaacatcttcaatttttataatagtagagataagtcgctttggcttttttacaatcaaacttgtttaagtttaacaagtttagagatagaaaaacgtaatattatttttaataaaaataaacatgttatcaaaatatatatttggttttacatataataactaatctggtgttatatatagatgctataaattttctataacattttttcctaatcaataaaaaaatcatcaacatcatcaacaaattaatgtactgactttctcaaaagaaattaatcgttagttcgttacgtggcggtaaactttttgatcaagcaaacgtagtgttttttctacttcaaatcattttctgagagaaatattttagctgctagttccaggacgacgatgccaaatgtgtcacagattactcctaattaatgcttgtagcttatgtgatatccacatctttcgtgccaactgccagccaagggatgactataatcttggagatggtaattaagagcatatacaaatcacgacgaaacattacgcaccacgagtacacgatgtaccttagagctgcaagatcttcatccataattagttgctacggttgatgagctgacgtgcaccaaagcctcaaaagtcatgggccacatgcaccaaaatgaatttcctctccttaatttcctgtgaaaataataacttagttcaaaagcgaaagttccatggtaactaatttgttttcgatataaccctgtgataactataatttaaatttaaatagatacaatctcctataatttaaatttaaatagatacaataatctcctcgctcttttttatcgaacatctcctcattcgttaccgaatgtcaaattgcaaaacaccttttctaagcacaaacggaatgctatagtttttttattcgattacataaaaatcccaaatatgtatattatatccacacacccacaaagataaatccctagtcaccaaagtacactgttatagatcacttgcaaattattctaacatagtcatgcaaataaattagtgtccatacaccagaatatgttcactaggaaattgtgaacctccatataaactataaaagatttataataaagtagaaccatcttatcccaactaaaaatttagttagactttaccagtatagacattgagataaactaaatagagtttcatttttttcaaaagattgaaggaatcgttatgatcctctagatgttgaatgcaatttctatttctctccctctctcaaagtttctcaacctgaatagacaatccgctgttttgcttcaccaaaccgttctccaaacgaccaaacccatttagtaaaaaaaaagaaaaagccatcccccattgagttactgacaggtggggcccactctccacaatcccacctgtgggccccactgtccagccactgtagtgaccaactcttcctcatcctcccttccatgggaagccaaagaagaggagagaaggagagagagagagagagagacgccggccgtacgccctcctcctctaaatctcctccgattcgcacctcgcctcggcgagatcggatgccgctgaggaggaggaggaggcgctactaatcctctccgcccgccgcgccgaggggatcttggatcgacgaggagggggaggggagcagatgcgggcgagccggccggtggtgcacccggtggaggcgccgccgccggcagctttggcggtggcggcggcggcggtggcggtggaggccggggttggagcaggaggtggagcggcggcgcatggcggggagaacgcgcagccacgaggggtgcggatgaaggacccccccggggcgcccgggacgcccggcggcctcggcctccgcctcgtgcaggccttcttcgccgccgccgcgctcgccgtcatggcctccaccgacgacttcccctccgtctccgccttctggtgcgcccgctcgagcttccttggattctgtttacccccctttgtctggtccccctctcctaccaaatctttgcccttttaggattgaaattggtgtgtgttgttagtttggtctttggaaccgaaatggtagtactactaatttagcatgttcttggctaggcggatccctcgaatcacgcggctcaattagtccaacaaatttagtcgcctactttgcacttaatttgttctgttcagttacatcctggtcttatatatatattacggagtacttacgaaacatgagaacaaaacatgtttatatgaagaaatggaacttaagaataccgtttgtaagttctaccacaacccactgcttaggtcaaactacctcagctgaatgcacacaaagatatgttggttctgatttttttttgtttatcttgcctatcgatcaactttaagcgagccccttgttggccgagcaaattaacatttactcttgtaatagcattgtagaatagctttttcttagagcatcaattctaatgtgtaaggtgcattcatgttattctgctgcgcatttgggtggcatataatcgagatatatgtggtgactgtccaactttacgtcaactaaactacaaccatgcatgttagaggttagtggttcaagacaacaattttcgccttcagtgggcactcaggcactgattggaggcagcggagatgataagaggttcaggcctgagacttgccgttaatcccgttatgctttagttagagggaaaatgacaactacatgagaacagggataatctaaacaatcgccaactattggataatccaactgatatggctctttaaatttgtcactagcgaccaaagtttgactccttgtcgatgcatgttatgcccaaagttagactctttgtcaccccatgctaggtgcctatgttgtggattttctgtggtattcccttgtggtttttgttcctggcatgacaatcaacgatttttgttgactctctattgatgatattggaattaattctagaagaaaccattattgttgcttgattacttatgatttatgttgagaagtgttatttttccaggaaaaaagggacaaagtgttgatatctttctatgggattaaatgttgtatgcctttttttacttaatttggcaacctgaaagaggaactcaaaattgtgcatgttatttcgcatttatttttgcctcctttccaattcagtcaagccattttccttgatgcattaactttaacttcatcttgtttgctggttgcatttcgctatttaaattgcgaactctgtttagcatctttgctatcataattcataatgtactgatcataatgaactaatataaaaccattacatgcttctgaagggagcatgttgaaactgttttttaacatcaggggtcatgtttagtcttaatagtatgttcatttatcttcattgtgacatacttcggtaccataaagatccaaagctttcttcagtaagtcactaaatttactaatgtggttctatttttggtccagttaccttgttgcagcagccatcttgcaatgcttgtggagcctttcactagccgttgttgatatttatgcacttcttgtgaagcgttctttgcggaatccacaggctgtgtgtatatttaccatcggagatggggttagtgttttatctttctataaataaggggccatttttgctaagattccttttttactttttgcataaatagaatacctattgaacaacgttattgatttttgtagatcacagggacactaaccctaggtgcagcatgtgcatcagcaggcatcaccgtgctcattggcaatgacctgaacatatgcgcaaacaatcactgtgcaagtttcgaaactgcaaccgcgatggctttcatcagctggtttgcacttgcaccgtcctgcgtcttgaacttctggtcgatggcctccagatgaggacacagcttgtatttagacataattttgggctgtttgtcagccagatcactcggtgcaacagccaggagaaaacgtagtgcagctaattatactacgaccaagttgatgaatgcctgtgtaatgaaatttggtgtcgaattgtttgtacaaaataggggatagtttgttctgcaagagggtggttgtgaagctctgcaatttttttttttttgaaaacggcatgtttcttgtaagaagctttttgtgatctgaaaacacagagctcaacgtgccgatttgttatgtcattttattattctgatgtgatcttcattcccgagaaatatgcagttcacattttgcatcattagtgtcaggatagtagctcttccgagaactaggtaaccatgtgaatttaacgcaacatgaaccagtgcgttttatcagaagtatgttgaatttcaagctgttgacatgtgcttacttacaaaggttttttggatgttgcagtgcagaccgacacccaacattatcaaatttgtaagaacaggtgctcatttgaagcagtagttatttacaggttacaagccaatcgtgtggtaaaagttactccaatgtctaagaacagaagaatttttctgttcttctaaactgcacctctagtgtacaaaacacaaccatctgtacaggctgcaagacctgtagtcctgcagctcttgcgatacttgtgttaatagatgaattttcagccttctccaagccaatctatagcatcaaaatataggtactcaaattcttccgcaaagttcatgccacctagcactatacttgagacatcagtaattggaatacagtacatggagatgccactcaattatccaggcaaaccccacagctgcgtgcacaaaactgttgtttgccagttgtagcatcagcattctagctctatgtactgctgaattgcacaggttaacaaggctgcagtactgcaccagactgtttaaaatgttgcagatgcagcatcagcaaaactggtatatgaagatgattgttcagttcctctgggcttaaggcacacgaaatgatctgccggtccatacaatcaatccttcactgattttgctatattgggttgctaaatgttgtgcttcccatgtcaggttgtttcttcatagccaagacaatcttgcgagttatgatagaatcccttcgaacatacaaaacagtgttcactgtcactggcattcaactagctagagaaacaataccacttccccttttagtttcatcagctatgaattgtcatacacctgcattataaggaaaagatgttcataaatctgctgaacagtgctagtcttagaaattcctcaatatgactgataagtataagcaactttcatcacaaaggactcagtagggctaacactatgaacatatttttgaattatagatttatcaaagcgtacacctagcttcgtattgccctactatatagtagtaacatgtttttcttatccaaagagtttagaaatttccgaatattttatgcgcagaaaaagatcaacttaagaaaacatatacaaaaaacaactgcagaaatttggcaagttaaaaaaaatatcagttgaacacagtaaaaaatctaattagcagtcattgtcttgcaaattacattaaacaaatcataagcataccttacagactgctgatgaagaagtgcaagtcaatcgtgagacactagttgatcaaaaaagtcacaaaattgccttcatggcataaattactgaaacaaacacaaaacaaatcatagtgagttcaatgagctcatcaatcatataacaaactcaaaatacttggttgaactaggaactgaaacatttgggacagatagaaaaatactacagtacataagatataaatgagataaaattgaaaaagtgatcaattaatggcataacaatttatgggtcaaaattcaacataatggaaacaaaatgtcaaaatccgtgtccttaataagtaggtgttgtcaattacagattcaatctggtgcaaaacaaaacttatgttatatagcaccatggcgacaagccctagcagaccaattaaattacgaaaacattagattagcaaattccatgaacaatacaatatgttaaagatactagcaaagtaaaggcattgtaatgtataatcagacgcttgaaacaatctgtatttcacctctatttgataaaggtcccatcaaattaacattatgaaggaaataggaaaagtaacttacagactagtaaaacaacaattgctaggataagtaactgaataggacgtccatattgaacttgatactgagacctctgaagtagccgacggaatgcaccaaggcaaccataaagtttcttattgcagttatcctcatcatcagaggtgctcaagcaacttttgcttctttgaaacaacccatcaaacccctaaaataataagccaacattggcttagaacattgctatgtacgtaattaatagtatacaaataatgcgttggaaaagaaaaatgcaattcagattttttttcccacacctggcacgagcgagaatttgtcagaggaagagtttccacaacatcctgttggtcagctccagccaacttcttggctccattctttgtcttcattcttgtctttgattggaaggcattcattaatacagaagagctagggctcttaaccaaaggtaccttgggcagatcatcaaatgattgttcatcgatgccattggcctcatcaggaattgtaatagtccatgatccaatatcagcataggcacttgccgttctcctatgacctggagctgtctcctccttagttgacactaaacctgactctgctgagcccgaagaatcattcgaactatcaattgaaacaccctttttcacccttcttgcattgctaccaacctcaatgtcaccagcagatgtaattgtaaccacctcatcacgtttttgataagttcctgctgaaaggaaatgagctaactcttcacgttcaccctcatccaagcgaacccagctaagagggccacgcccttcagtagtattggattctttcaagaacttctccacctctaggatacgatgcccaatggctgaaacaaagtcatcatgccgagctctagtatctttgccagctaacacaacactataatttgatttaatagcccgctgcaactcatcaagctgacaaaagaaaacaaaaccacaatcagcactaaaattcagacctcatattttcataggtcatctcaaatcaatggtttgttactggtactaggtgttcccctttagcagaaaatttcacaagtaaaatgacacctttatttgcaagaaagaaaagacccgattgtccgttttctacttatgcataagtaccaaaagcaagctttcaagtacgacagggatgccatggcataccgaattggtgtcaagcccatatctgaagtctaaacaaatcaacgcatagtccatcttgtcaacgaaaagcaagccatcgttatgaacaaatgctctaatagaagaaccaaaaaggtagaaagcaacgaagcacatgcatcaaagtcaaagctttagtacttttttcaagaataactggaaccttaagcttagaagacggacaaactatactttggtttattctcacatcctaattcctaaaccaaactacttcgaatctttccaattcttccgcgcaatccccctcatcccaagcaatccaagaaacctaaaacgagtcaaaccaaaatcccatcgtttcaccagccacctagtattaaatcggatgtagcccagctcaaacctgccacttggcggtgccgagcgccgtgtgcagctcgcggcggagatccccagcgggtcgcccccatccaccaccaccacgttccgccggcgtcttcaccgcgccgccacctacttttttcctctcctgcaaccaccttctgtacaccgactccatcctacacgagcaaaaaacccaaaccctcaaaactccaaaaagaacaccagaatcagaaaccggaggcgcaccgaaggaaaggcaagaagaggaaggaggcggcgcaccggtcggcggactcctgcacctcctcggcggccggaagaaggggtccttctcccagcggtcgaacgacgtggccatctcgctggggactcggggggagatagattcgtgggaaggcgaaatcgaatcgaaaatgcgtcggccggtggcggtggtggtggaaaagaggaggaagaaggcaaaaggcagcgaagcaacagcggaattattcgccttttttttctctctctctctcgttttttttttttttttgggtgggaggtttcggcggcagttgattttggtggatgatattaataaatgaagtaataataatgcggtccgagtccgagtggtgggcgaggggcgcacgcgtgggcgaggaggggccttgttgcgtggaagcgtcgtcgtgccgcgttgggtgtgttaacttgctacgtgtaccaaatcggaagtaccgaatttctactttctgatgaatcgggtctcatcggcagcacttgggaagtgggagtgtgggactcctggcaatggaaatacaggtgtataattttgtgcctaaaacgaccaatgaatcaaaataactgttctatccgtttcagattataagtcattttgactttggttaaagtcaaactctttcaaatttaactaagtttgtatataaatataatataataataatatttacaagaccaaattaggtaactacatctataattaaatatattttcataatatattagtcttaggttaaaaatattactccctccatttcatattataagactttctagcattgtccacattcatatagatgttaataaatatatatatagtagtctgtacatccacattcatatagatgttaataaatatatatatatagtagtctgtatatatatttattaacatctatatgaatatagacaatgctagaaagtcttataatacgaaacgggggaagtgctactttttctaaaaacttgatcaaatttaaaacagttttactttaatcaaaattaaaacgacttatagtctgaacagagggaatagtatttatttgcatatttgacggcgtcagcttatacatccatggtttgaaactaaggatacaaatatttatttcagcaaacatgcattttaggaatttaggtcttccaacgtggaacctcatcgtccttccgatattatcactggcacatttctctttgtcataggattttatgctaattaatgagacaaagtgagacttaagatccatgatgtaatcaagaggtaataatttatgaaatagatagtaatgatgctcgaagagtcgtagagccttcgagatgggattaacgtggtagagttaatttacacgttacatcttcgtaaataagtgtactcgattaaagagggtataaaattgcagagacatgatgtatgagtgagtgactataatacttatggtgccatcggttgtcctaatgttaattacaagtcatacggtttattagtaaaaaattataagtaaaatctttataatgtgttcttagctattttaaagtactagaaagcaaaactatgagaaaaaaacttacaatcaatttcaaaattaaattaattgaaattttgatggtggctataagctgtagggatgggagccttataatttgggttatagacccaaacataattttgtaccagactattttcattatttagtctctaggatagcagaagcaggtgtaatctgtcaaattatttgatcttacgtttttagttaatttacaaattatatcttcaaacaatgattgcattgagtcaaaaacctcaagcatgtataagggcactgtagacatgtaaaaagagctgctagtctttacagtattggttcatattcatttgattggggagaatgatatttttagatggaattttcatcaaaatggtcaattcttgatgctttctatgtttttagctttaattaataatggttatgttgagaagaataaattcatatggaaacttaatatgccacttaagattaagattttatgtgttacctacttaaaggggttgttttgacaaaggacaatttggctaagaggaactggcatggtagtatgaaatgttgctttcgcataaaaaatgagactattcaacatttatttttgagtgtcatgcaaaatttctttggagagctttatagttttattctggtttatatactccacataatatatctcatatttttgagaattggcttgtgggagtggataaaaaaactagtaacttattcttgttggagaatccgttatttgttgggtcatatggttgtgtagaaatgatatggtttttggcaagtcaccttctatatcttatatgcaagttcttttcatggcaacatattagcttcggtcatgggctcaactattaaagtgtgatgatgatatcaagctagtaaaagttgcatatcgtaatcttgagtcaacggttatgcagcttttcgccaactttggttggagattcacaaatataattcaataatcatatgttcttcttttaggttggagttttaaatttttgtgtgtgctcctattttgaaaggagtgtgtttttagaactttgtgtgtgctcctgttttgtgaggagtgtgtttttatgtctttgttttgttagtttgagtttggttgaactagtgtaataattggctgtaactctttgagcaaacgccaagatttaattctattatctaaaaaaaagcatattgggttgtaggaaacggccgggatggccggtgcagtcaataatattagagaatttggatcaatgtgtaaaatcccttatatcttagtatagaggaagtatgttattagcgcttctgtttacatggttttctgtctatctataagagttgttgcttcgggacagtcggaaaagaatcatctacgagaacttaagtcaaaacgaaaagagcagataaatagtcacggctgcttatgttatggtttaatttctcaccttctactttatggtaacctaattcttatctcataggtactcctactaattaataatacggttttgctagctagctgtccacagttttggaggctagaaacattcgattttatagccgttcgatctagcgccatgattcgtgcgagattttttttctattggatccaaacctgatgaccaatagatgtgctacccgttggcgtgtatagctgcacgttgcctttttccagaaatttcttggaggcgaggtggcctaggcggaggcggagaccccgccagatgcagctctcggcgatttttttcgccgccggccggtgggtttcttgctgcccgcttcctcaccgatttttccccttcagctgctcgtgttcctcgcggtcgcagcgatcttctctgcctcatgctctctactcaaaatttcatgtgatttttccactttttggtgcattcatgtgatgttttgtgttcagatcctgcatcatgtttgccctataaatcgtttgtatgtttggttggtgttcttctcctagatttctaggggaatcgattcgttgattttcgcacacatgtattgttgttcatcttgaggatggaggcgtcaatgtttttccatttagttacataaattccatcgttgatgtttttccatttagttacataaaaatgtttaattatattccagttaaatagagcttataagttagttatagtctagttacagtccagttacaacctagttacacactagttatagtccagttacaccctagttacacactagttacagtccagttataacctagttacagagtagttatagctcagttacagttacatttagttacagtgtgcctagttattcagggtttcttaatgggcccacacgttctaaacggattggtttcgtgctttcagttggttcagacccgtttcctgtggtccgttgattacatatcttgaggtgaaaaaaattgaaagttttgaccttaaaaactgtcgacagcccaatagctaatcccttaataatataaaaataatatgtgtagaaaaaacgatgtgggagtatatcccaccactcctaggttttagggcagatatgtggacaaaaatcttaattttcaaaaagataccagcttttaaattaacaacagaacacatttaccatgaggctgcaaaacctaactcctaactcatgataacttcctcactttggcaagccgcaatcctacggtaccactaacagaatgtaggaagtagggtatcttttctgattttgagagagtggatataacatgcatctgctttttacttgtcctgtcttgtcttttttttttttttagttttgggttgttatatgctgctttaccattactttgccgtagtgaaggatgacaacactttcatgatcaaaagcacagggcatggtggaggttgagagacggggatgtgattttcttttataatgggcatataaaaactcgatttttgcttcgtagtaaggtacgtacgaccacttattataaagttctgagctcaaaatctaagtgctacagaatagaacaaaggtgaacgaaaaaacgatacaatgacactgatcaaaaggaaaataagcaattcaatgttgaaaggtcaagtctctattgctaaatctccataaaaaaattgatgaaaatctgtatggtgaatgattctaaattctaacatgcagcgcatataccctccgtattctcttcacccctttaaagttgtccctagaatcaaagcaagtgataggatgtaatggagatcaagaagaaatatagtgccaattggatctcttgtagggcgtggtggaagttaccaaatggattgatagatttggatgtgtaactcaacctgcaccatcaccagtggtatgcttgctagcacaccgctcactgaaccttttcattcatcatcaatctgttggtgctatatgacgacacaatagcagaggatatcgactagtggggtcatcgtggtcatgaaattcacagtggtaactgaaagaaaaatattatgatttacctatgaatgactgtacatatgatttataccactaaactatattagtacataaaacacactctgagctttttaaatgagacaaattaccccattgatcaagatgaatttggtcctacatgtgcaaatccatggtttctacactaatgtgggactctacactaaacagaaggtacagaaaagtcaaagcttggaggggagaacattgagaagtgaggggatggagaacaaagcataggcatctaggaagtaaggggaagctagacagaaagaggatacgttcccagaaagaaacagatgaagaaaaaagaggtaggtctgataggtgggcctccctactttatgtgcaagccaccaccatatatgatggcacataaaaccacaaattttgtttctacttaactggtggaacaatttattctgtttcaacaacttagggtgtggtctatattatatttgtggtttgagggaataaattagatgaacataaatatagttttggaagtaaatcagacattttcctatttcaaaaataaacaatacatatatacatatactggagtggcatatatcaatatgatattttataaaggcaaatattgtaagtagcaaattttttttgtcgagaacatttcaatgtcatatatctaactaggatattactagaaaacacgcgtggcttttctacgcgcgagtgaatatataacatgaaaaatgggtttccattgaacattgagtccaatactcaatattcacggtagtaaacatcatattacaaataatctgaatatatgcataaaagaaaggtacaagagagaattatcacactgaaatggattctaaaactccctccatacaaaaaactgaattatgtagcctttagatagattcatacattgctaaagaccagtttaactaatgtcgttatattatcattttgaagcttgagaaacatatctcagattcatcccaatagttgataatatgaatgcaagcctcctccggtcctcctatcaccctggatcattacaaatgcgcacggaaatgtgttaacagttctctgaactaatagcgaaataaacaggtgttctgtaaacaaataaaagcagaaaatatacatatataccatctacatgatagtgcttcctagctcatctctgaagatatttgcaagtgcaaccagttagtattaagataatacaagattgctgctacccagccatgacaaccattgacagagtactttcgacgatcagcaaaggctgcaattttgtctggctattcagagaaccccaagttcccgactcagtgcagtgctgtcatcattcatcaagctagtgaaatactcatctccttccattctcattattacatggaaaaaaaacaagaagtttgacatgatcagtaagcaattacaacaaataaaaacctgatatttgacatgataagtatgcaacaacaaataaaaactctctttttctacttgttagcacaattcatagtcctgctgtcagatatatttggatggatatgctatatattttcatgaactacaaatcacattcaccagccaacaacaatctgattacttccaactgcttattcagttttagttgttcatacaatgaagaaaaaaattattggcttccaaaagtgaaacttagcaaatattcagatagtctgtccaagccagcaaatgaactcctgagaacacggaaaatgaagtatttgtttcacatatcatctaaccaacactaatctgcataccccagaagcaagaaccagtaacaaaaaccactcagctagactaagtgtatgtttttaactaattccacagacacttctctacaaggatgcaattttctattttaaaccacatgacactttcttgattcctcctacctaaaattaactatattgtgactccctaaaatgtaatatacgaaaacttgtaaaactctctcttctatgctcaattttttcccttaatctttgaccattacccaaactaataaacaacacaatctgttaattaagatgtgcattcctaccagcaaatttcatgcaagatccacggtaaggaagatcctactgaacaaatgcaatacgtagcaattaaagagcttaaatctccccaagatccatggtatcttgcccctgcatcaaaatccacatggcaggtagaggtagtatgcctgtgatggcgaggtggatttgcagtccaaatccggtggtgtcattcaaagtggtacagcaataaacgacgctgcggccggccgtgggcgtcgcggccgggcgacggcgaggacgaggccgtgcggcggctccgtgcgatgtggaggccgagacggcgtggtggggctgtgcggcggacacgaatcccctcggcttgccaccatcgagctcctcccccaatccagcaaccaggaggaggggacggcggcgggccggatttgagccgcagccgctcgaggagccccgtcgccatgctgccccgagcttgagaggggagaggcattgtcttcgtcggatctcgtcgctgccggcgtgctgctccccaagtccctgcgcgccgtcaccgagctcctcgcccccatcaagcgacgatgaggaggagatggagggtcgccggcgcgtgcgaggagagggcctcgccctgctctcactggggacgtcatgggagaggcggcaacgaggacgagaggagaggtgggggtagggggagaggcggccactaagcggaggaggtggcggctgcgagcctgtgacgacgagaggatgcgaagcggcggcggcggcgaggcccgtggagagagggcagagtgcgaactattttctttttttttttctttcctctcttttattaggtggggattggggagaggcggggccgcgaaagggggagcaagcgggcaaagccgccgaaggaagggacgtcacgtggcacgatttcaggagaggcaacctgaattctcgctgcgccacgtggaccaatcaaagaccagggtttggacccgaaaatcggtattagagatcgctagtccaagatataaacctaggatattattaatatatcatgcaaaacaaggtattgtacagtaaatgattaattcatgggggcactcttataaaaaatttcatcgggtacgaacattctccctcggaatatgtctgaatttatagtaacgtgttatatgatatatcaaagcggtagccgtacagaaatgcttctcgagcggcggagctcaaggtgggaatcgtcgtgtactgtacgaacattttaattaaaaacaaaattgagtatatcgaaggctgagttgtgaattcgtgacttgtgaaaaaatccaccacgagtgcaggacaaccatctcacgcaagttgtcaatatgaatttatatatggcgcaccacgcgtcatatgcagatcgtgaaaaagaagagaagcaagattaaggccaaagataaatataggaaaaagtatgaattctccccccccaaactattacagtcgtctgaattaccccctgaaccacaaaaccggacattcttcacacccaactatacaaactggacgaattacccccctcgacccaatccgcggtggttttggtttacgtggagctgagttagcattctattcattaaaaaaataatgggacctacatgtcatactcttcctctctctcacgggcgggaggcggtggacacggagctgcggcggcggcagccggcgggtgacgctgaggcggcggcggtgggggatgagggtgacgcggaggcggcggcggtagcgcggcctcgccggagtcggacgtcgctgcggcggaagaggagaggtcacgcaatgaggaggcgaggcatgtcgcgtcgcagcggtggagcgcggtatgggcctcggcgaggagctgcttcagtgcttgagcaccaggggcagcgtagggggaccgaggacggcgatggccgggggcagactagttggggccgacggtgccgcgtgcgcacgaggaggcacacggcggcgtcgctttcttcccgcgctcgcacgagggggcaccggcggcggcgacagcgcacgagggagaaggctgggccagcgagcatgttcgcgcgggacaggcggcggacgggggtggaggccgcgcggatctggaaagatgatgcgggaccccgacggcccccgcgcgccgccgtccgccgcacgccccacgcgccgctgtcatccgcggctccacgccgccgtgcgcacttgcgtcgcccccacttgccaccatcgtccgcggcccgcgtcgccgtgcgcacttgcgacgcccccacttgctgccgtccgccgcgcgcccccacgcgccgccgtcgtccgcggctccggcgctgcccgcactcgccaccgtccgccgcccgcccctgagcgccgccgtcgtccgcccaccgctccatacttgcgcggttgttgcgcccgcatgcaccagtgagagagaacggagagagaaattaggaagaggtgaagtggaggcttgacaggtggaccccaccaatttttttttttaaaaaaatgctgattggactgtcacgtgtatgccacataggataaatccgctctgatttgggtcaaagagttaattcgtccggtattaaaagttcgaggtgaagaatatccggttttgtggttagggggtaattcggacgaccatgatagatcaaggggtaattcgtactttttccttaaatatattccagcagtataatgcgtcgacatccattatctgattccatacatgtggttcgcgttgataaatttctttggctctaaccagcacggatgtcgttgtcactgtggtggtgcggccggtgtagaagcttactggctttgcagtaaatccaacagagattcatttgtttcctattcaaaaggaaaaacaagaagaggagaagagaaattcagtgcgtgtctcgagttttcaactttttaacctgagtttttcccgggaaatattaacctccggattaaaaatttcatgatttttgaacttgttaatcccgggaaaatgatatactgtgagttgatttctttttttttttaatgatcatatccccgagctggccgccacgccgatattttttttttacggcaggcaattatattgcctggcttttaaacaaagccaaaagagcagaacagaacagagtcttatacatgacagaaaaaaggaaacgaaactatggcggccaaaagggttgaaaatacctaatcacaggaactttactaacaaaagactattgtcttgcaaaaaagattaagacaaatttttgctataggactgcatagatttataacacttgttttaggacactctagtttctgactgtgtaatacgacaatttagtttctgactgtcatatgataatatagttccaacggttatttaattatatatatgtgatatgtccttttctagtagagagattaaactttacaaaagatatttttagctttttgtcaccttgcataattcaaatttgaacaaattttagctgattttaaacttgtcaaaaaattaagttatccaaaaatacaaaaaacaaaatatttcaataaatattttttaaatccaggcaatattaatattccttttttgaaaagatttaatgtatttgaattccataatttaggacaaattttaaatttacaacatatattaaaatttggcaaaaatatgtaccaatttaaagtttggaaggtggcccaatggtaaaattgtttttttgacgagttttatttctccattggaacattatatattaacataatgtttgaagtttctttgaataaaaaccacgcaactagagtgtcctacgcaaaggtacaaactatcataataatgtcctaaagcaaatgctagaaattggtagagtctttagaaaattttggcaaaagttgaaggaattagactattgagatttctgaatgagtttcaactaaattggaaagaaatcaagaatagtgctcgactggtagaatgaaagtttttttattcgttttggtttatcagaaagagaagggtaattttttgtccctcattgtataaaaaaatttcgttgattttggcaattctgcacgtcccttaaattttttttgtataattaataacttttactggtggaatttttatatggatgtggaggtctctcaattatgattatggtcataactcataaggtaggggaatataaacttataaaaaaaatgcaacattgaactcacaataacattgtgaaatggcacgtatgagataaataaaaaaaaatgtttaggtgcatcgttgaggtgccttcaattctctcgtgttgttgtgttgaggagtttgtgctatatataccttctgttattttatttactctattcttttttataaaaaatgagagtacttctattgacttctgcagttctgctctgtcaaaactttaattatctataatataatatatctaaccttgcccattcaattaaaaatatataaaaaaaagaagcggagcttgcaaattcatcgcaaattccacaaagaaatgaagtatataaaaaagttcaagatcaccttggttagtggcccattgggctctttgctccaaccttcaaatatttctgatgtgcatctttcatggcagagttggccgactagcctttgatcgtgcggatatctggagcagacatggcggatatctgaagcagatatgcttcccgacaaacaaattaaattggcaaaattggttatatagcatcgaaagatcacgtttttggttttatagcaccgaaagttaccggttaactttaatagcacccaaagttcaccatgttcccatttttaacacttccgtcaattctcgatcgttttccgtccgttttgatccagccacacacacgatatgacgtttctacccctcacaagtacaagtataatgcatgttaatgaggggtagaaatgtcatatcatgtgtgtggctggatcaataaccatcaagacggacggaaaaattgacggaagtgctaaaaagggaatatggtgaactttggatgctattaaagtgaaccggtaactttcggtgctataaaaccaaaaacgtgaactttcgatgctatataaccaattttgccaattaaattacgcaacctgactgtgtaaccattgacaattaatattctactggctagttgaacgataaataacatctggtgatattaaaatagcccaactgcgagaacaaaatatttcagttgatcttgactttgttcgtacttcgtagggtgaataatgaatgcgtaaacgtgtttgacatgcagccattctccatctaagcatttttgggcgacatgcagaccagagtgcagaagaatactccctccgtccctattgtgatattttgcttacactatttgactgttcatcttattcaaagaattttagaattattatttattttatttgtgacttattttattatccaaagtactttaagtataactttttattttttatatttgcacaattttttaataagacgagtggtcaaacagtgcaagcaaaatatcaaaatcccttagagcaaggttaatagtacaaccaactgctagctccaaatcatttatagccaatttatacaatagttgcttactatattattaatatctggcctcacatgtcatacacacattatgtcttggagtccgtgctacaggggggtacaaaatta

SEQ ID NO: 6397 - DNA, 89740 bp, Oryza sativa
gactctagaggatccccctcgccgccgttgaagtacgcctccgggttcctcggctcgacgccgtgcttccggcagaagggcacccacagtgccgcgaaccgggccgcctccacgaccgccccgcgtgtcacctccgcgccggcgtcgtcggagacgtagcacgtcaccttgccggcggggtagcccgcggcgaggatggacagcacggtgttcgccgtggcgagcggcggctccttgtcggggtcggcggtggtgacgaacacgtccatcgccgggagcagcgtgtcgtcgttcagcgccgtgacgtcgacggcgcgccggacgggcatcgtcttgggcagctggtcgagcacccacatgaacgcgaaccagagctcgccggcgatggacgccgtccaaaatgtcgccgccttgctcatgccgatgccgccggcgtcggtggagctgatggcgcgagcagcgtaggtgattctccacttgaagaagagcacgaagatggcgatgcgaacaaagatggtgagcctacaagtgcattgtcaatagatgtgattacggtgagttcgtactccaagttcggaactgatcatttcttctgcatgaaaacgatgtacttcctccgtttcacaatgtaaaactttttatcattgtccatattcatttaaatgttaatgaatctagacatatgtatgtgtgtagatttattaacatctatatatgtgtgggcaatgctagaaagacttacattgtaaaacggagggagtagctaattagactatgattaattaaatattagtttatttttttaaaaataatagattaaaattatttgttaaatagacaatcgtattgaaaacttttataaaagaagcacaatttaacaattcaaaaattcgaaaagagtttgctcaagaaaaagagagtaggagttgggaaatagaagtatgaaacatagccttagggcatcctcaatgctttatatttaatagagcaacaagatgaaacccacgtttctatattctttagtttataatgcatattacaatgtatatggtctcttcataactataagatgggcccactaagaaaaaaaaaccttcatccactcagaattgaagtgtacatgcatgctacaaagccttatttttttttaattcttatggtctagctttaagcttaaggttacccttagcactattctcttcttagctcatctcccaatgtataaaagtataacaaaaattactactttatttgataagattagttttcatgtacactgtggttgcccttagtccgtcagtgacccgctcattgatctgaaatgcaaggatccaacatttgtcaaaactcccagaattggagttgccatcaatttttaatagcagtgcactttgcctccctgagacattttaacttgcatgacattataattagaaaaaaaaagcaaagaatacagtgggtcccacatgttagtaacataggggatccattcttctttttttttctctgtcaagcatgtctagaaacactttgcgtgcaacaagaacacatcatcgaggtgagggaatcaacagcaacaagttgtttaggcttaactctgtcattcggtcggtgagcggcgggggaaaggagggcacctgcactgtggtagagagagaggggtggccggtggcagcgaattagatgatggtgtcgggcaggcgtatagcgcgatggtgactcgattgaatccagtgagggcaaaatgtcgtggaagtagattgtggccgcatgaatccaacagggaagacagtgattgtggaggtgctcttgttggtgcaaaacgcgacggtaagaagcaaacagttgtacatgagaggaagctcaagttcatggtgaaccactacattgatcaccgccattatggagggtaacggacacaagctaggaggaacaagttgtgacacagtaggttttacgagaaaactcactacagagagatcgacgagggtggagcatgggatggcatcaatggcggcaacaatagttttcaacgtttgtggccgcgggaggacgaggatggttgcagaagaagaagaagaagcctgcgtattgactaatattcgtctttagaatgaaagtagctatgaagcccaatctactctcgattcaagagagggcatagtcgtatgggtagggtgtttgtggggagctgccttggatatgaggaattcctcaaatctaaaaaaaaaatagaacaaaggcaatgtccgtgacgaagatctttcttttctatcaatagatagaaatgagtattcgttataggggataggatctatctgctctctctctctctctattttctttgatgcaatttagagagaaagagcagtacgaactagaaaaaaaaagataatcgggagatgattaaaaaatagatacatagacatctaaatctaaagtaaagggatgtatatagtattcctatatatatcatctatctatgaaaaaagtaaacagagttcgtttttgggttccccgaagccccaaatggattggatcgtttctgcttctgccaacgaaatgaaggcctcgccccttccgaatgcttcttcgatcctgaagttctcgcgaagagaataagatgcagctccctctccctctgtctttttccgctttgctaatattcccctctaacgtgggccgagccaggcttaggcgggcgcgggaggaagaaataaagtcgaagagtgtcttctcctttgtcctttttcagtgcaacataggaaagcaccctctttttgtaatccctgcagcttcccaaaggcttttttttattgaacgcatggtgtagctaggacctctccaatcatgtttgagcctatgttcacccggggcccaaaaaggagaattccggaatgcctgccaacgttcagataaagtgcatatcccttaccactaaaggaaaggctcgacgaagggggtgggggtgggtgggagattttccggctcgatgaaggggacttttagagatattgagatgttgatttgtttttcatcgaaaaggaagaaggccaaggggatagctgccttccttcagactttgcctgccgacgttctaataaagaattccggctcggcccaggaaagcattggcaacaacataaataaaggggtccatgtagttgctgcgcccgcccactgagtagcaggttcggcatctactgcaaaagagagattgagtctgaggaagaggggggttttcttggggctcgagagattgaatagatagggcctcacaaattgttaattcgccgctggggaattcacataaaagggaatgatttattctcaactaaaaaagtgctctctgaaccgaacatgaaagctgtaagtaagtgaggaggaggcgacggctgcaatgtctttgaggatgaggtcctcctagtacacccgctctctctggccccttcctcctctcgtcctctagtgcctcatccacccactccctctccagaagcacacctctagtattggcgcgtcccaagagttccatcactactaccactaacgttttggcctcgccgaccaccctcatcaaatcctcagcatgcgtgaacgagagacaaagagaggggggagaaagaggtggtgacaagtgggccttaataacggtgaggctggtccatggatgactcaggatagtcaacatgccaacaagcagctaaataatgcattaaaaaactttccatataaaagttcttagaaaataaaaaatcatttaaaaaatatttaattaattatatgctaatgacttttttccatttcattgatcagctcaaccaaaaagcttgagcaaacgggcctatgaatttttattaatgaaacacaatcgtgatgaagacactcatataaactagatgattcccccacgctgctgcgggaattggtataaaacttttgtttgcaaatttcatgataagaaatttagaaggcattgggtatatataaaaatgctagctataacttaagtcaaaatagaaatacacaagattataatttataaaaaaaacttgacatatagaaaaacaaagatgatattatgatagtatatatgttgatagcgtgaataatcgattattgaactgtcttgtcttgtgatcgaaacagacatgccctatataggcatagttcatttttctttaatataatttagagacaaccataaatgtatatgctagtctatatatgatatatgttcattaattaagaatatatgtacacaaaattaaaaagaatatgatttggtaccataccgtttagcttcatgcatggcatttggtagtctattgtttgcttggttaattgagggttgcatggttgtgcataatggggagaaataaatgtacgggatgagtcatgtatcactaagagaaatttgagccaaccaaaataaatccaatggtcaatagtagagtgactttgggatgatttgttatacgttaagtttggatctaatggacatagatatataattaaggtgatgtggaagcaccacatgagaggaaaattgtaataataacactaagagatcaattctataggttatatagatacatatataataacccttataaacatatacatacacacgacacatatctaactctacgagcaccttcaaagattggatcaatatatatgttaatagtgtcgaaatcaccacaaacgccacatcacacaaaatcatactcaaaacagccaacgacgaacataatttctctagttttttaaaggacttctttttagacgaggccaaagttcatgaaccgaaaacaaccactttaattatttgttggttttcgtagcactttgctaagatataattaagttgtataaatatgtataagtttttggttcaccataaacatgatgatctgaaacacaacattcgtgtgtcgtaggtgcactactacaaatttaaggcacctacaacttgatggtacactcatatatgtatatataccctcacctgtataacttgatggtagttgtcgagatgcgagtcgtccggacgagcggcgccctctcgtcgccggcggccagcttcgtctcggactccggcgacgccgccgcggcataggcatccttcttggccgggcatgtcgccgccggcaagctctcagtggccaagcctgctgacggcggcatgtgctctctctagcttcaaatatattcctaatgcattcgaaagtcccagtatagggctagctagcgatttatattcgtgcaaaaataatgcgttatcacgtacgcattcatgcacacttatcccctgtacatgttgtttttttaattattcataaacatatcctaccttttgctttggctaattaagtggcggcaacttttaggttcttgtgtcatgcaaaatgttaaacaagcatagcctagtgttgatatatttcccaaatttaaccgaaagaagtcaggtgtctcctttggaacatctagaaatataggcgtatatatagtatatgattgtctaattttgagctttgactccattaaaaacattttgatctttgactaacgattaatccaataaatctagatttttccataaaagaatgataatataattcttcttagttattactatgatttcataaccatataagcgaaattatataagagaaatttatgatgaaatattcctttttaggacagtcaagagctataaatgaaatgtgacgtatatatctgatattccccaaaacagtctgtataggtggcacaattgtgttttgtcgccttgtcaaataatttcacccctagagataattaaaaggtctcgcatgcttaaatattgtttcttctacaaaatatgaaaaaataaatataaagacggttttggccgtctctattgatcaccactatctcatagacatggttagtaacctgtctagggcaatggtaataccttagagatgggtcttagaactgtctgtgattacatattataaaacatctctgatttgtcctaatataagtcaaacttctttatatatatttaactaaatttatagactaatttagcaacatctggagagatggaaataaaacataagtcatgtttgtcctaactcgtataatgtgtatgtacacatctccataagacatataagacatgtgatccactattgaaataaacataacaataaataaaggtgctcatgaaagtaaatatacttcaggagagagagatatatgaaagggaaatagagtgtgggacttagatggtatgctgggcccacatggttgtattttttgggttggtgttggtactcacccagaatcatcacctagcatggaagatgttgcaaatattattctgaatagagaatgtctcgagctttactacgacctatatagatgaataaatatgaaaaaaaatataaaaataaagtagtgattataataaattataaatgatatgagatgtttgtatgagttttaagatatattttttattgaataatgatgaggcttgtttgcatgttaagttttaatgggttgtagctatatgtgtgtagtgttgtatcaagttctcttcacttggtaatggtaagcaagcacactatataatcatgcatgctgttagttgtagatccgcgtaattagtttaatgcatttcttgctgacgatcgatgcatggaaacagatggaactctcaaagtgtactaatgcagaatccactttgcatctcaaagtgtactaatgcagaatccactttgcatccaccaaacatgcaactggacttggcaaacacatattccattcaagaaacggaagagccttcctacgcaccgtccactgatcatcactactcttgctgacagaaacaaacgagatgcccgcactacaagaggaaccccctttagtaatacatatatgtattgctaaaagtctctataagtattgctagggtctgcaccaacgtatttaatatgcgttgcctatgctgccgttgctaggatcaattacaacacatagacaaccgttgataacaagtggaaataagcgttgctacttagcaacaattttaataggtttcagcaatacttatatatgttgttcccttgagagatgaacagttttatataatcttagcaatggatataatcaagttgctgcaacatgtacaaatattgtaatttgagctatccactgtaggtggcctttgaccaattattttgtcaggcaagagacccatgaactcaaagcatgcacaagtgacaatagtccaatcaatcatgataatcgattatatattaaatatagtattttgcattacatagacaatcatcagtataattcatggcattaaacctttgttcagaacattaatgcagaaaatagaatctaaagtatataaaaaaaacacatcttgttgcccccattctccaccttgcagccatcatcattccgtgatatgtacaggtgacctagttgcgtactggcagtcacgaaatttcccccacatcttcacccatttatcttgtcaacctataatagaaaaaatatataagcattaatataccattatgaagacgaaaagcacatctccgaagaaagaagtaagagataggaacatacaaaaattgcaggctacgcaatttcaagtcctacaacatgaccaacaattttgtagcctttgtatggcctaatcaaatcttcggattttgccaatgcaagatcgacatgaaccattaaaaattcatttcctagctcaacacctccaactctgtgtgttggatcacagcttacaatagtggcaagagccacgtttgtattccgatttttccaactttttaagaatactttagttccaacctgaagtgcataaatacatccatcaatattatcaatgtactttaagaaattcaagtatcataaataatttcacagtaaaatacctccattgaattgtcagtgataaagtccattttgttgcactgttgtttctataaaaaaaatttggatcatggtttgcaatttaaccacaagatagaaagaaagaaagaccaaacagagccaattattgttctccaattgaatcataatactagtgaatcatgcatgttatagtttgaatggactgatatttgtaaacatggtgaataaaaaaacaaccttgtatgcaccaccaactttatgtgcatgtaccatatggctttcctgattgtcaggtttcttgttctataggggagggcaacaaatcagtgctaaaattatatatattaagaaattttactttcaaacttttctatcaaataatttttgaactaaataagaagtgaaaactaaccttggcacaaataatctccatctgtttcccatggtcatttaggccaaaggttcgtttgttctagaataaaagaatacatcacattgtcatgaactatagtaaacattcatagttagttacaaacagtaccaaataatataatgctatgtatccatgataaccatataataggatgcaaccatggtgagttcagaataaaaatataaattgaaagacaaggaccttgtgtgcagtagcatgcttggttggtggtgtcttatcctcatcttgaacatggctttgtgaattctgttgtcaaagagagcatatattcccagttacaaaatagtgcaactattcccatgtataaaacaatgaaatttatgtatattaccatcacaatgttttcctgctcaacatgacaaatttcttgcaagggaccgtcaccatacactttctatcacagtggaaaataaaaggacattaagaccagattttattaaactatttagactaaaatgttagcaaggtttaccactgttgaattgtcagttaaaaagtccattgtgttgcattgtcgtttctgaaaaaatagagagaatttacagtaaaaaccaacatgctgtgtgtgctattttagttgttgtgtagtgttcaataaatagaaatagcattttgaacttgaaacaattagactaaccttagaagcagtactatacttgtttaggcttggtctaacaagcttgcgggtaaggttctctttgttctgcaatacacatgtgtgttatagtttcaaagagcttatatctgtagacatggtgacttaaagtgatgaaaaaataaccttgtgtgtacttgtaactttgtgtgcattcaccatatagttgtcctggttgttaggtttattgttctacagtggaaggtaacaaataaattttacaaatctatatatacatttatatatcgaaattaagctactttcaaacacttattgactatggcattgagtttgaaaggataaagagagaacttaatcaacttaccttgtatgcactagaaatactcttccctggttgcataagctcattctggtccaaatttcctttgcgctgcaatggaatagctcataaaattggcacaaactataatgttccaattatttgtttactctgacatcatgcactccaattaataaaaaagtgaaattaaccttgtttgcacaggaagtaatcttcctttgcttcccactgtgattctggcccaaagactgtgtattctagagtaaaagaaggcatatgattataatgaatgctatgtaaataatagtgaatatatatatatataataatattttaaatgcaaaggcaaggaccttgtaaacagtagaatgcttggttggtggttgcaaattctcatcgtgcacatggctttgtgtattctattgtaaaagagagaaaataaatgctattcccaagtaaaaaaacacagctattcccagttataagatggtgctatatcacattaccatcaaactgttgtcctgctgatccataatgtttccctcctcaaacatacaaatttcttgcgaggggttgtcaccatacactctctgtccataacagaaaatgaacagagatctataccacagtttatgagataatgcagaaaatgttatgatatttcttccataaagatacataccctcctttttgaattaggtacgtcatcacaaatagcttttttgtttgttgacgctccatctaaacctccctgttacttcaattaggtaagttagatgcattcattgggtcacacacaagctcatataatttttttaggactcaactcccttaaattcacctgattcttttgtgccttttccaacttggttgccttctcttttaattgtaaaagttcagcatcattattctcaacatggcgttctaacttttccatctgcagtctaatagccattacatcttcactggagttatcctccactgtagtaagatttatattctgcaaacgtcgggaagttggcacatcaagcacttgtttaggctttggaactagtccaagaccatgcacacgcccaggcttgtcatctcctagtatttggttcaatgcatctcctttccaagcagtctttcctttactagcatccgctaaagctagttgttcagctataagtctcttcaaattatcctaaacatatgaaaaattaatacgaataaaacaacatatgagaataactgaaaaatatctatggttgagtgttaatagtataccacatgcccatttatattcttgtcacttttgcgcttgtgtgtgtggacataaacaacagctctatgtggtttcttctttgcaggatctttttgtctctatggaacacatgaccaaatcagtaaagtcttaacagtagctatacatgcttgaaatggaaatagatgaatactattcaagacatgttttaccatctcttctcttgtgtgagcaaaactctttgtccctgctgtgtgaattgccttcttcttttggcagtttttcttattctgctcacttattctctgttatggtctcgtagagttagcaatcaaaaaagaatattgcattgttttgtttagtacagagttctaatttgtaagaccattacagaaatgaatatggtacatgtaccttcgatttctcgttcatccaatgattgacaagagcaatccactggtcagaaagcacaccttctaggacattgttgcaattagcttccttagtctcattcacatcaaaatacaaatcttttagttttgctttatattgccaccatctttctacaattttttttaatatgaactcttccatccgaggagcataaaggaatctcatctacatatagcaacacagaaactcatatggccatatggggatatgcataacataatacaagaagttagcaaaaatgttgatctgaaaaggaattaccttacttgcttaagtatgtcctttttaacttttagttcatttgtatttttctctctctttcctattacatatctccagtctgtgtagcctaagctacacagactaccattcctagctaccattccaagaaatttacccaaaattccagcttcttcccctaccgcctgattgagatcattgcattgaaccacaattctaagccctttcggaaggttccaaacatctttcagttttgtcgaaaggttccaaacatctttcagttttgtcttgccacgtgtttcaggtgctccattttcaactgttcggtgttaaattgcaaagacaaaagtgatccttagtaatcagggatacgagtaataatgtcattatttcttaccattaggactgttaaacttagcagttacctcgaacattaatatcaacatcagtatcttcattgctttcatcatcaatatcaacatcgtcattagtgtcttcattgctttctccatcattgatatcaaaatcgtcatcagtgtcttcattgccttctccaaaatcatcacatacagtttcttgttcagatggtgtggcaagctatggaagggtattttcttcttcagtctgttcctctgacaaatattcctcattgctctgaacaatacgccttcttctactccttgccatatctcttgcacccaaaaaaacctatctgtcatttatggcgtcgaaagtatatcattctcatttcagaagtaggactgtgctgtacatagtttcagacagaataatttcagaattgattataccctgagccattttggatttgtttttgaagaacaacagagtactgctgtcccaaaagtaatgctataatatggatctgtttgtcatactcactaattcatttgtccattttataggccaacaatttgaaacaagtaatgggtagaaataacaaaatttaattggctgcaaggtaaaactagatcacatattgtattgcttacagttgtgtgaagcctagccgtacgtagaccaggctccttcagctatggacggtcagtgcatctgactccaaacctgaaaatagaacacatcaaattggtaagtattgtagtactggaagggaattagcctccattgcaatttggcgactcagagaggtagtaagatgtgcagagggaggcagagattccggggcttggaaacattgccgccaaccgcgcggggtggagcagagcgaagtggacagccggtgtcgggaggtataacccgcatcaattgcagtgccccggtcacccagcacatcggctgggggcgtctccggcccgccgcatgccctacgtcatccatgccctacgactggatgaaattcggacgtaacatattttggttagttgtttaatttatctaagcatgaccgaaaagacacgtgtttttccatggccaatccggtccggacagaccgcatgaaaaagacatgtaatatatttttggtcctaaaatatagttatttaaaaaatgttagcacgataaaaaaacacgtgtttttcgttgtcgacccggtccggacagaccgcatgaaaaaatatatataactaaataacagtgatttaatattttaggacaacaaaaaaccacatgttttttcgttgttgacccggccggacagaccgtatgaaatctggacgtaaaatttgtgttaaaatagtagttagttaatttatcatagaacgaccaaaaaaacacgtgttttttcgttgttgacccagtccgaacagacgggatgaaattcggacgtaacatatttttgtcttaaaatagtagttatttaatttatattagaacgactgaaaagacacttgtttttccattgtcgatctggtctggatagactgcatgaaaaagtggcataatatattttaggtgttaaaatatagttaattaaaaatgttagcacgacaaaaaaaatcatatgttatttcattgtcgacccggtccggacagaccgcatggaaaagagatgcaatatatttttggtcttaaactatagttatttaaaaaatgttagcacaaccaaaaaatcacgtgttatttcattgttgacccgttccggacagaccacatgaaaaatatatataattaaataacagtgatttaattttttaggacaacaaaaaaccacgtgttttttcattgtcgacacaatccggacagatcgtatgaaatctgtacataaaatatttttttgtcttaaaatagtagttagttaatttatcatagcacgacaaaaacacgtgttttttcattgtcgacccggtccggacagactggatgaaatccggatattctgaaaataagttttcaaatggtttatttttaaaattttaaaataaaaaagttcaaaaaattaaaaaatttctggggcaacagaattttttttcccgttcaaggagaggaaaaagtttttaggaattgccactagagaaatgaaaaaaattatgcatttgctagttctcgaactagagttgtcaatacagtagaagaagctaagtaccactaggctatgtccccctttatttattttttcacgttagctgcaattgagaatataaatagacagaatataaatagacttctccaggtatttatataagatggaaatttaaattctgttagcacgaccgaaaaggcacatgctatttcgttgtcgacccagtctgtacagaacgcatgaaattaagacgtaaaatatttttggtcataaaataatagttatttaaattatatttgcaagaccgataaaccacttgttttttcgttgtcgacccggtctggacaagccgtataaaatcaagatgtaaaataatttttctttaaataattgttatttaatttatgttagcacgaccgaaaaaccacatgttttttcgttgtcgtctcggtccatactgatcgcatgataaaatccagacgtaacatattttgtcctaaaataatagttggtgtggccaaaaatatttatattgaaaaaataagttttcgatcagtttaattttaaaattaaaaataaaaagttcaaaaattctcgttatctagccagctaagaaggatagggaaaaaaaattaggaatcgcccctagaaaaaaaataaaaaaaatctaggctggcatatttgttttcctcgttatctagccagctaaggagagggaaaaaaatttaggaatcgccactggagaagaaatggaaaaaaatgcatttgttaggatttgaactacagtcttcgatacggctgaagaagccatgtaccaccaggctatgtccacttcatgttggagttgtccgttcgacttacttattcacgttaggtgccattgacaacgtaaatagttttcttatataggtggaaatggaataacagaacacaatagatgcaaagattataaacgcccattcctttttctcatcatataaacaatatgatatcctggatatttaaaaataagatctaaccaccaattctgtatataactaatgtagaacattattacaggacttatgtatgcaaataaaaagttgaatcgatctggctcaatcacttagacaatccaaggaaatatacgaatgacattttcatccagaaaagctattgtggtgaagaagccttcatcgcagtaaatctcaatccaaaattactgccataaaaataaagtgctccccaagtgaagatataaataatataaggaaatcattgataatggacagatagatagtgaaaaaccttcataacctcacctttaattagttaccatgttatcgacagttgttccttctatatctcttcgaatccatgtctgaccatcatgtgcactgtcaaatagctccccaagattattgacatggtatggttcgcattccacatcattccattcttcgcccagttcaaatacatctctgggtttcatattccttacaatagaccaccctggatttaaatggtcttcaatgtaaaacacttggttgacttgatttgcaaatacaaagggctcatgctcaatcttttcaccggtatgaattttatttgagaaattcacaagtttgcagccaaacttatctattttcactcattttcctttagttacatcgacccattcatatttaaacaacacaactgagaaatttccatagtagtctaacttaattatatcaagtacccttccataatacatgatatcaccaaggatagggttagtatcactggcggacgtgtagctcgatgtttttacagtcacaacaactccactgttttgagtcaccctggcataacgctttgatctgaacctatacccatgggtattgaatgctctatgtcgttttgctacctcaattggtccacgtgctagccatctaatatcctcatcaatactatcgatacctctttgattctccaactgcaagatctacaccaaaccaaaagatgtattagtatttgaaaaagagaaacataaattttgagacttacataatctctgaaccaatcagggaattgttcattttgcatgttctcaatgttttttggagttagccttttgcgtttcttcctttgcaaatcagcagcatgttctctgcaaaacaaataaacataaatttgaagcaaaacacttacaacacataaaaaaaggctatgttaggacaatacgtacttcagatatggcactatagcatcacagttgtatagcacatatctatatgcttgcaatttctctctatcagttaaggagtacgccgatggttttcccaatggttttcctactggaggaaacaaagtggattcttgcctactcatgggagtctcaaattgatctggtttgtcattattccttgatggtatgttatgcttggtagagaaaccttccaagtatcgcgaacaaaatgccatgcactcatctgccaaatatgattctgcaattgaaccttctggacgcgctttgttgcgaacatacgacttcaatttacccaggtacctgtaatatacatacaaggcacaaaactaataagttagtattgtatcatatgacatatgagaaatattataaattgtatgctaatatatttttagtacctttcaataaagtacatccatcgatagcaaactggcccagcaatcttacattcagtagctaaatggacgactaagtgaaccataacagtgaagaatccaggaggaaatatcatttccattctgcacaatgtgattttaattgcttcttccaaacggtcaagctcatcaacatggagaacttttgaacatattcctcgaaagtaagcagataagtcaaacaagacagatgtgacttcatcgggaagaatacccctcaaagcaattggcatcaattgttgcattagaacatggcaatcatgtgttttgagcccatgaatttttccttcagcagagttcacacatctagatatgtttgaagaatagccacaggaacttttatatccctaagaactttacagaacaattgcttctcacttttggacatagtaaagctggcaggtggtaagtagaacttgcttgaagttctttgttgtggatggagctcccctctaatgttcatttccttgagatcaagacgaacttggagattatcctttgactttccttctaaatttagaagtataccataaatattgtcgcacacatttttttctatgtgcatcacatcaagattatgccgaagaagattgccatcccagtaaggtagtgtgaataaactacttactgccttataagtttttgacttcttaaaatcaccgatagcatttatttcatccaataccggacgcccatagtaagtcataggctctgtactaatctctgtggttccatcaaaagaatttctatcaaaacgaaattcatgattaggtggcaaaaatcgacgatgacccataaaacaagatttcttcccatgtgccaaacgtttggaccatacatttggaccacaaggcgggcatgcaaattctccatgcaccatatgtgaagcaagcattcctaaagttggcaagtcatttatagtccacagtacagctgccctcaaattaaaagtttcatttctaaatgcatcatatatggaaatgccattgacaaatatgtctcttaaatcttctagaagcggctggaggaaaacatgaatgttatctccaggacttttgagcccaggaattattaatggcattagaagattaggttccttcatgcagagccatggtggaagattatatattactaaaacaactggccagcaactataggtagagctcaacataccatatgggttaaacccatctgtagctaacccaaatcgtatattacgagaatcagatgcaaattgcttgaaccttttatcaaagttcttccatgccggagaatcagctggatgtcgaagcacaccatcctctactaagcgctcttcatcatgccaacgtgggagcgatgttgtttctctacacatgaacaatcttttcagcctctcctttattggaaaatatcataagactttgcttggcgttgctttctttctttctttcttcgttaacttggtttctggttttttatctttccatctagaagccttacaagttgaacaaaaatcatcattaaccttctctttccaaaacagctgacagttattgggacatgcatgaatttgttgataatctagaccaaattttgaaaccaccttcttagcctcataaaagttttttggcaattcttttccatttggaattgccatgtgaagaatatcaagtagatctccaaatgatttatcacttcatttgttcatggatttcatattgaacaaaagcactagcagagataagtgtgatagttcacatccatcccataaaggcttctctgaatctttcaccaacttataaaatgcttgagcttctaaatttggtccatcagtgtgtgtacatggcgaatctgcagaatcactcataggcatgtcgtcatacacagtcctaagtgcatcattaattaattcgtgcatgttagcacgcatgtcttcattgtgaggctgtggttgttggttcctaatttgctcctctgaagactcaccatgaaaatcccattggtcataactctgaagcattccattgcacaccaaatgatcatagacatcattttttgaaagtagcatagtatgtacgcatgtttcacatggacaataaatctttgtatcctctaacttatctttatatgcaaattcaagaaatccatctactccagctaagtactcaacagaacctctagggtagcgcaaaagaatcttgatggtttctaaatccatttcgacctatataaaaaatttgatatttcaggttcttgtagataataacaatgacaaggaattgtctcttatgatcatgacgtagcaaaaatagggcaattagaaaagtaccagtataaaatcagtgtcagctaattttgtcacaacctaatagacctcctttatacactgaaacaaaagcttttactctgcaaaaatagagaagagctaaatcaatttacagaaaaaacatccagcaatctaatgtcaaagctgtcatctccaagttaaattccttactataaattacctctagttaatctacagatgatgactccagaagcacatgcgtttaaaacctatgttccaaatatccgttcggatgaacaagaaaaatctgcaggtgttattaaactcaatcagatagactcatgatgcaacaaacctgaataattaaaaaaaattgacattgacctggatctgacactgacctggatttggggccaaatggggaatcaacctatgagaagtggctaagaaaaggaccgtgcttgccgttgacccgctgtcgtcggcctcggcccgtcgccggcctgccgcggccgatcccctcgcgggctcgccgccgccgctgctgagaacgcgccgctggccgccgatgtgcgctgccgccgccgccgtcggtgtgcgccgtggcagtgatgtgcgagagcgtgagaagaaaatgagatgcggtgtgggaacaggatggggcggcgctctcgtgcgtgttgggtgaggtgagagacacgagaggagaggagagaaggtgggagactaaggttgcctgctaaactgctaatttcacagatcgtattttagttgttatgatataaacaactaaataaatcatttgataagaaatgtgattagctcagttggttgggttgcgcatattctatcctagagacccaggttcgaatcctctgtttgcatctttgccccactaatttattcctatcaggtatcagcagccacttcgcttgtggaatttttttaaaaaataaactcgcttgataaattttttagaaaacaaaaacaacacttttcccaataaactcgcttgataaattttttagaaaacaaaaacaacacgcccaatacacaatgtaaaaaaacagctcgctcaattattattattttttaaaaagcatgcttagtccaaaagttttaacaggaaaaaaaaagcaactcacttgataatttcttttaaaaaacaattcgctagaggtccgaaatgtaaaaataaatatctcactcgattattttaaaaaatacaataagttcgcttattccaaaagtttttacagggcatcaagaccattgcaaattcagctctgcaacccatgttctgcaacacatattatctattacaaattaggctcacccactactaagcgttgctagggtcgcattttggcaatgcatccttaatgcgttgccaagcatgtattgctagagggggttcttgttgtagtaacgcatcagttatcaaactaacaaagtataagtaaaatattactacgaaagaacatattgacaaatctattaacttaataaattaacagaaaatttagccaccatgtcctctcacgacttagaaattcccacaattaatcaagattaaattacactagtggaacaataacttggtaggtgggtatgatttagtggaacaacttgtaaaatgtaaaaaaaagtataaatttggtaatcacgtgcattttgataaaaacactgttacatatctatgattcatcctattaattttgttgtttgtattataagaatatgtttcgtagtgctcatcatcggaaacaatgaatatttgattagtcaaatcgcttgaaaattatattagtttgcacttagttttgacggtcattatattttttcagtttcaattcgataggttgtttcattattataaccatgcaaatgcaatacatttagacgcttgtcgagaactcgagatagcctaagtggctgctttttctacatcaacgtaaggttttcggtaggatttttcgtccgtccctttttttcgcatttttttctttttttcgccgctttttcttaggttgatcgagaaatattcaatcagattttatgggatgattggtttagcatcgtacggatattcaatcagatttgatgggatgattggtttagcatagtacggatacgagactgtttccagatattgaagacgacaatcggttatgcgagctaggcctaccgctttacatgtgggctaggtcaaatagagacaatgcaactgctttacttgtgggctaggtcaaatagagacaggccaaacagaggaaggtaacgggctggactaggagggaggtaacgggcaggactaggactgaaaagaggaagaaagacccaaaataaagagtataatgtatgctatacacaattgtttttagccgttgcaacgcacaggtattttttctagtaataaatagatagatatcaaaaatggcaaagtgcacaaactatttttaattctaatagtaccaacattgcaccaacatcctaatcctaaatgaaaattgcagaaagggctaaatagttaaatataaattcatagctaaaatagctactttggtccaaaacaacccaagaactgcttgcgaaacgcctccttgaggttctgccgggtgccgctcttgcatggctcatcgtcattgtcgacgctgcatttgcagatcatcatcaggccatgcaggtcatccggcccgagctccgtggacatcgtcgccgccgccgcggcctcctcgacgacggcgacgtcgcagtggatggcgaactcatcatcggtgctggaccactggctcgccaggacgtcgtggcggatgaacgtgaagcagcagtactccgccttcccggtgccgtggaacgacgtcgcgtagctcctcacctcgttcgtcggaggcacgcacggctgcagactgaccatgcggaaccggacgttggttcggatgccgccgccggcggcggtggcggtgccggggtcggcggcgtggagcttgaggcacacggtggagtagccgttgcccgaatatttatttgctcgagttggggtggaagaagaagctccaggtgtgacctgcggcctggaacttggacgactcgatgtcgtatttgctgccttggtgagatttcttgatcgcgttgcgtattttgatcttgagaaagttgcaaccggaggtggccgccgaagtagaggtggccgtcgacgcggtgacgacgtcctttgtcggtgacgacgacatggcaagctaactagcagctacctggtggtgtgatggaaataacatgcttggagacattgatcatttcatcaatttaaatgcctaatgcttagccgcacgatcagcatgtgttggatgaaaagatgcttgcatacaacaacatctgctgatcgagtcaatcacctgaagacttagttctcacgtgaagagagaacgtgtgcttgtggccgtttggcggctgcgtttctcacggagccgatccggctttgacgcggaggagcaacggattgagcgtgggctgctgttcagtgttagctctatataggagtcaaggagacgtccttgaaggatacagaacacaatagccatctactctgaaattcctctactgccgccgtgttgcgtcgccgtcggtccaagccggccgttgtgctcgtcgtgcaatgagcatcccggtgagcggtgtctccgagccttcgccgcattcgcacctgcacgggggcggtgtaaaggtttctgggcaacgtatttctacgcggccgctcgacatcatcgattgactgcactgcttcgactcgctgatctccgtcgatccattcagtgagtgaattctttcgtttacaaaggaaaggaatctagttttgatcgtacctgagttttatatatgcatggtactgttcatctagattaaaatattgtggctagattaccattgtgattagcttaatgacctacttagcttggttatttatgccttgtttgatatctagcatgatagaatttatgagtttttcttgtcctatcatgtcgcaagtaggttatgcttgctgtatgtgctttcaaataataatgcttggaataaaattaatggctaagtatgtattatttccaacagtggtggtggtggtggtcgacggcgagatcaatcggggacgaagaactcgatgcagggttaacgttggttaaatagattataggagaggtaattaaccacacgtttgacgtacgtacgcccggctatatgccctatccgtattgtagtttggttcggatcatgtatagaagaaaattaagcctggtaattatattagtagtatatctttatcaacttcgataaagcagttgttactgggatatacgtacgaagcagttaatatgcaacacaagttactacagctattaggtcagttaattttagttgggttccgatcggatgcaaaccgttacaaacagttacgtttagagacgggacaatatcaggttgttacggtagataggaatagttttaatgtttccatggtacataatccataatccatgtttgagtcggttataaaaattgaagatgttttttggttcgttatacgtgtttgagtcagttttaattttatgttttggttttaatctatatgtcctctctatctctctcttattataaaaattgaaaatatttttgcctattttagtacgtcgtctgtgtaagtttttaagtttgtttgcttttggaaatacaaattgaagatgtttccgtgattcgtcatccgtgtttgagtcgattttaattttataatctatatctcttctctatcgctatctctatcttttctccactattataaaaattaaagatatttttgccggtattttggtatgtcatctgtgtacgagtcggtttttaagttcatttgcttttggaaatacatatccatatttgagtcggagtcggtttttaatatcgtttacttttggtaataaagaaggaaacataaaaaaaatctgcttaaaaaactcgtatgctaatttaagacgatcggactccgaactgcagcttatgattttgtaaaagaaatataaatccaagcgaacttcgacagtgaatttcatcttaactaaaccatataacaattataagattaaaatagacttcacccgttgcaatgcatgggcatttttactcgtggattaaaaagtatggtaccgaagagatatcttttaaccagaaagtacgtactggataagttattacactatatatatatatctatatctatatatgtactcatctaccaagtttatatagtgtagacgcaaactactcactaataaaaaaagaaaacaaataaagtccaactatatatgcaatttaaaatatctcacattttgaataacaattaaaataagagtccatgtagaaattctatttagcaaaaactgaaattgtgattaaaaattaagaaacaatgaatattgagataaaaatccatgtagagatataatttagggaaaaatctgaaatgcagattaaaattcaaaaaataagtaatattgagacaagagtccatctctaagtctctctgttcctaagtcctggttcccaactccctccgcctagttttccacgcgcacgcttcccaaaattgctaaacgatgtgtcttttttaaaaaaatttctatacgaaagttacttaaaaaatcatattgatctatttttaaaaaaatagctaatacttaattaatcaatggactgctccatttttcgtgcgcaggagatgggttaccacccattccagtgaacacagccaaaatacaatttaggaacatctaaaattaagattaaaaataaataatattaacagatatagtccatctcaaaaatacaatttacaaataagtaaaactcccattaaaaaaatattatggcgaaaagaattcatgtgcaagtacaatttcgaaatatcttaaatccaggttaaaataaataatattaagagaaagaatccacatgtaaatataactttaaaatatcttaaatataggttaaaaataaatattatagagagtccacgtagaagtaaaattttaaaatatatataattcaaataaaaaataaacgtaatagagaaaagagttctggcagaggtacaatttagagatatttcaaattcagtttgaaaataaataaaattaatagaaatggtccatatagaaatataatttagaaacaatttgagctggagttaatattattgggaaaagatttcatgtaggagtataatttaataatattttaaatctacattaaaagtaaataatattgacagaaagagtttatatttttttgaacgactcacacgagacagtgcgaagttctattgatagagcaggaaaaaaattacaagactacaaccctggagggtcataaccaggaaaaaagaaaaaatataccaccacccacacatcgacatcgccaacacaccagcccaggagaagactaccaccggaccggacgccgctaagcgtgaccgaccgccactagaccaacaaggggacacagacggtatcacccctaggggatgccaaaacgacgtcttcaagaagagaagcgacggagaaaccgccgccgcagtctatcgggactcaaaggagacaagactgggctttcacccggcaaccaccctttgaggggtgagacagaacgacaacgccctcaggagggggaatgaaccatcgttgtcggtctggcagaggccggactgggttttcacctgccgctcaccacctgcgaatccacggctaacgcaccgatgctccaccaccatacaagctctaccgacatgtggggcccctgcaccggcgtcccccgccggccagccttcgagcaccgaagaccgcgccacacccaccgacagctcctccttacacctaggtcgcctcctccaccgccagccgcacctcccgcgccaagccggcctcctccactggacgcgcctctcgcgccaatccggcctccctccatcggccatgcctctcgtgccaagccggcctccatctccaccgcccgcgcctctcgcgcggagtcggcctccgctgccattgactgcgcctctctgcgccaagccggaatccaacccctccaccaaacgatgtcgcgccggccagatgcagccgtctgccatgccctcggctagccgtccgagtccgccatgcctccggtgaccgcagacgcggtcatcaccaccgcagccactgttgccgaacgcccagccacctcgccgtcaccatccttacctcgctccctactcctttcccgcctccattgctatcgtcagcgatccgcatccgccaacgtcaccaccgcctccacggccacggccgctgtcgccgctgccaccgacgccagccatcggctctgcaaaccgctgcgccgccaccctccgccaccaagcagccagctcgacgtcgccgccatgccctccgccgccgtcgccagccgacgctgccgccgtcctcaccgcgagcagcaaatgccgcgagcacggccgccgccgctgtcgccaactgccgctgcaagcaccaaatgccgcgagcaccactgccgctagcaccaccttgagcacgtgttggtattttttaacgacatcactagaaatataattttggtatattatggttacagagttcatccgcaagcgcacgaatataccattgtagcatttcacccgagagtattccaagggtatcgtatttattttatcccgtggaaagatcatgtagagagaactcaactaataatttatatattacttgtgataatcatattctaaacaggggttaagataatccaagggtagagtgacacacaagcattactactcatcctcataataatttatctaagctaagtggaaagaaaagagaaaagaaatctactcctatacttctagtatacatgctatacatacattctagttaactgatttactagctaataccctctatccgatgccctcctggtactttgagaagccacccctgattgccgagttccttacgacagcccgtcatgactatccaaccagggctaaatacggaggaataccctccccaggaaattaacttaggattacatataggcgtggaggaatacccgtactgagctgtcaccatcagcagcccacctctcatccgcaatatataaccccaaataatgatatcccgtaatctagacaccacgtctaaactaccagatactactctaatatcatcgtcatgacatagagtaattgcataagcaaacactatacccgcaccaaagcatctcccagataagctaatcgtacattcagtataacatgaacataatgtaaataggtactcatatactcggaaagtatttcaataccataaatgtatatataagagtattctaataaaagtacaaagcttacaaaagaggaaaggaaagctgctagagctatacacgaactcttctgaaggcttccagactcctgactcctattctatttctattccaccagttagatactactaaactaaacttgagaggaaagagagagctcttgcttgaggtgtgtgttgaggtgaagagagtgagctccttatataaaggtggttatgacggttgtggaaggggaattgtccgaagtaccccgcaaccgccatcaggagaagatctggagcgtccctgccaaaccccacagccaacggtggagaaatgggttcggacgaaccaccaggtgcggccgaaccatcaggttcggccgaacctggggctggctcaacgagcccacaatttggctggtggcctcctggacttctcttctccacagacttgtgaattttggcccagtttgtcgtgtcaattctgagttcttggcccattcatacacaagtctgattctcgacatcgtccgattgatttatcatttgatttgatgttgattctcctccattttattgttattctctgcaaaaggttagtatacctaatactagtggaatattattgctctcatatttttgcattgcaagcatcactagttctctcctattttagtaatattgacggtagaaactgatcgataccgaccgtcagcagcacaaccgccgccgccgtctccaaatgccgccgcgagcaccactgctgcgaggaccaccacgagcacgatcgccgtcgccgtcgccaactgccgcgagccccaccgcgagtaggaccgccgtcgccagccggccaccctccagaccgaccgagaggcgcggatctgggggacatcgccgccatcgccgccatcgccaccaccgccgccatcgccatccccgccgccgccttcacgtccttagccaccgccgccgcctgcgcgccctcagctaacgccatccccgtcgccatcgccatctccaccgccttccaccaccgccgcccagcaccacgtgcccctgccttcgccgtcgccctccccgctgccagttgccaccccgccagatccggctggagcggcctggatctagcggccaccatcgcccgccgaggacggctcccccgcccgcccgaagcgttgtcggtgagaggcctcgccgctaccgtccggccgcttgggcggcggcgaggcggagggggaggagggggaggaaaggggcggctgggtttccgcctcccgtgccgcccgaggggaggacgacgcaagaggccttgtgtcttgtttgctcatattaattgggaagcagccaagcaggagcatatgcacgaaatgctaccactggtgacctatggcggcaggagaggaacacacaactggctaaggccaactagcatggtgaaggtcgctgccagtgggattggaattgggatcctctgatgtgaagtcagaggaacgtggtgactgacatgtgggccttagtttatgggcccaccggtcgaaacatgaattcggcaataataaaagcgggtagcgcacgagacctaaaagtggatggatgcggagacaaggatttagacaggttcaggccctctcaatgagaggtaatacgctactcctgtttggggatttgaatccaccgggtgtagtatagatctgatgatcaggtgtgtcatgccccctagagggcctcctgcccaccttatataggatggggggtaagattacaagatagaaaccttaaccaatacggtatcggtttcctaaatctattttacaatattatcaaatcaagactttaggccgctccataatataaaaggaaacgtaatacccaagtcatgatctgttacatattccatagatataagttatcccctatgactagtcggataaccatgccgtgtgggtatagggtacccataatctccacagtagcccctgagaccttcacagtcgaaaagataatattctctcaaactaattactccaaagccgagtgcttcaatcatctttgccatggtctcccgagtacttttaccaaatctaaagactgtggagggttgaaaactaaagtcaggtgcatcgactagatgcacctaataggtgtagcccccgactatgtggttaattaaacaaaccaagcatatagtcaaggaataaataatccaaccaaccgagtggtttcgataattgtagtcaaccaagcgacttgatattaatatgtagcatatgcggtgtgaatccccaaataatataatccaagtgatataccgacttctttgtaaaaattgatacgagcaacctaaagttgactacatcattgaaaattcacatagcaaaatagctataaaaaagcttgaatgctatgaataaagaaatttccaaagtatcaggcatacgccatgcgcacactgctttaacagatatgcttaagtccctaaaagacacatggtttcaccacactcggaaatatacggcatatatggtgtaaaatccgagtaaataaactcataaaggatttaccaaccgcctggaaaatgaccaagatatataatcagcctaagccataatattggtcaataaaaatgcacacttacgtggcaaaaagcaatgatattgtatccaatcaattgcttaaaaacccaaacagcaccttgacttatataaaaaagtcagcggggcagctgtataaagctttactgtttgacaccttttaagatgcataataacaactcctaaaaatttgagtaactgcggtataaaaggattttaaagcattgggcacttgatcacgcgcactttggcctaagcaaaaagtgcctaagtccctaaaagaacgtgacaggccacacctgaaaatatgggctgcagacatattaagcctaggacaaaaaatatgccttcgaaaccctttaaaggatgacgcatgtaacatgctcccgagtaataaatcttccgggttatatagaccaagtgtagctcgtatgaatagcttctgatctgagtgattatcccttataggatactccaaaatagatataacaattgaatcccgactggcgcaagtattcggttgataacccttacgggaaataataaatagtccagtctttgagcatagaaaatagacccatgatcatgaattcatgttgcatgtatccggaacaagtccaaattgaaggtatgatacttgtgtttgagctaataagcccctgagtatatagcttgtccttttgtcgtaatcataattgtccattgatggtagctgacacagttggcatagagacaagacgaccaatatagagataatattgcccaccagaggtggcaaaaatattggtggtagtgaagatagtgataccaatcaaaagtgatgaagttgcacagccgtggagatgaagaaaccagtcggcaacaatcaggtcagccaataatgaagatgaaggcgcccagagataaagttgtgtagccatggcagcgaaataatcagtcggtgacagacgaggcagatcaaagacgatgacgaaatccaccaatcatgaagatgaagaaaatagtcggtgacgacaaacgcaaccgacaataatgatgataagcagcaacagagatgatcgactatgatgacgaagttgcccatcaaacagcagtagcataggctatgttgaagaagcttgacaggatattgatgaagatgacgatgtcggtgatccagtcaatagcaatgtagcaaccaatggtaatgatgaagacgctcatcagcgtttgcatagtagatcaaccgtgaaggcgaaataacaagccgacaatgacggaagtaaccggaggcgaggacgtagtcatccattagcaacggcagagatgtcacggccgatgaagtagaggtgctggtgatgaagtcactgacaataatccatcaaactgttgagaagatatcgaagcttaagtaattttcttgatgtgtgtataatgaagattgatgcaacaccccttgatttgtaaagatggcagtagaacttggagttgtagctgttgcagatgcttcacttaaaggaaagtaaatgctgttgtccaactcatcgaaactgagctgattggttgataactctaaactcccagacatgtagatagaatctcaaacttgatacttgaaaattttggagtagattgtggcagcgtggagaagccaaaattgccggtgaaatcattggagctgctgaagtagaacacttgctctgaagcgaagacaaaacttataactcccgaagtagattccatagaactcgttggctgatttcagagtcttgtatttgtgtagcccccgactctttggttagttggaaaacaactgaacatagagtcgagaactgtagcttcttgtcgtcgagtagtcattgcaatcaaaagtgaagatgcatgttgaagatgtccgagtaaaaatattgaagatttgaacaccacttgttataataacatgacatcatatttagtgacgcatgccaaaatgtcgaggctcatgtagacgtcgtggttggtgaagtagcaaaactcgcgaagtagcagcaatagagtttgccggtgccgaagataataaagatgaagtcactccaccatgatgacaaagttgcatagtcgtgatgaagtgaacatgagtcggcggcaacataaccagtcggcgatggaataagtagaatgatgacgaaaacgaagacgtccttgaacggcagcaaaataggccagccatgaaagtgaagacaccatgggcggcggcaaaggcaatccgatgatgatgatgatgccagtcaatgttgacgaaaacacgtagccatagaggcgaacaagccagtcggcgtcagacaaggcggccagcaatgaagacgatgacgtccatcaatagtggtagcggtatataccagccgtagaggcgagggcactagtcagcagcagacgaaacgaccggcggcgaagatgataaggccaatcaacagtattagaatcctgcagccatgaaagtgaagaaaccagtcgtagacatagacaacttgagttgaaggtgatgacgcatatttgtggtggcggcgacgtggccagccatgaagacgatagcatcaattagcgtcatacgaagcggccggtcggtgaagatgtaggcgtcaacgacggcagcataataggccagccgtgtaggcggagacaccagtcggcggcggcgaaggcggctggtttgtgaaggtgtagacgcccaacaacggcggcataataggccagccgtgcaggcggaaacaccagtcggcggcggacgaggcgaccgatcggtgaagacgtagacgcccaacaacggcggcataataggccagccgtgcaggcggaaacaccagtcggcggcggacgaggcggccggtcggtgaagacgtagacgcccaacaacagcggcataataggccagccgtgcaggcggtgatagcagtcggcggcggcgaaagcacgctggccagacgctcaacaacggtggtgtgaccaaccaaccgtataggcgaaaacaccagtcggcggcgacgaaggtaagccggttggtgaagacgtagacgcccaacaacggcggcataataggccagccgtgcaggcgaagacagtcagcggcggcgaagacaagccagtggtgatattctgactgatccattcctgaatcgtaggagataagtttaaagctatgaatcccttttatgcatatctggatctggatcttacagaacaaacatataagatgagtagtatctgatgtaaatataatactcgaggaaaattcaagtattttaaaatgtttataatatgtatttctcttcttgtcaattttgatttccccgagcagatgactccgtacgtttaaacactctgcctaactagtcatagcccccaagcatcgagagtcggccaaggcactttccagagatgcaaatgagtgacatgagttcgtcattaatgaaacaaagtttcacggatcagaatttactcactactggagagggaaacactccgtagtgccaaaaacacaccgcaacacacaaaaaacactccgtaatcaggttactcagtgccacactccgcaattttcaccagggagtgatgttgtcttcccgtgcatcgtagcggtgtgtttttatgcatacactccgtaaccatccgaaagttacgtagtgccgtagaaactcggtaaccttttcagcacaccgtccaccggaactgaacagcaacaaggaacgggagacggagcgtttgcacatgatagcacacgttaactttacagggtgtgcgcaaacacaccgtaagttttccctggttacgggtgcagattagtggcactctgtaacattttaggttgttaccgggtgcctcagcattttgatatttgaggggcaaattaataggaatatacagcttcatttctattaattatctatagcagaattccagcatccatacacatcacatgcagttacacataaaacacaataatggatttaaatgcatttgacatgcatgttcattcaattaatcaatatgacaacaatctgatatgaaataataacaatacaaatctcagaaacagctacaactgagatgaaattgagcactatcttcaaccagtataagcatgggcaaccaaaaggccgtgcaaccagaaaaaaagcttagacgaacagcattgccggcagtctggaaaaagaaaaggacttaataaccatcaatcattgtctgtttttcatcctgggatagcttcatcactctaaaatggatgccactatcgccatcagccatgatgtaaccccagcttttaccattagctatagtgtgcttcctagttttccatgaaattgccaattgcttagctcaactaatgaagtccatatgactgcagcatcaggaggtgaaggatctgatgattcacaaaacaaattcaacatcaaaatcccatacatcaatactatgttctgatattaagaaagaagtatacattgttacttagttctggtatgtctttctagtgcttacctttgccaggagcctagaactaaagcagtgtaggtcacattaattgttccaaaggtacaaattagttcttacaaagacacccaatagtattcatgctaaagagagcaattagacatagcctagatagatgaatttactaagacaaccagagagtaacttcaaaaaatttcagaaaacctcggcttgaaccagtgaaatgctaatgatctagtgctaactagctatatgtaaacaaataacataaacactacctttacaaaaatcttaggtattgttcaatgaagaattgtactatgcaaactactatttgtaatggtattgacgaactgtaatatcggaaacattagtgtaagcacatcaccaattatgatttctaacctggaaaaaaatgtaaagggacgaagagattacacttaaatcgttcctgcaacatcattgtcagaagtaattgtgatatgacctccattacatcctatcagaatttccttacctgcatatattttaaacaaaaggttagtacacttgtgaacttataattctgatcagcaactgcagataatttatggattggttgcaccatgtatgctacctatcatattgcagtcctctgagactcggatgtcttcacgaccaatggttgatgtctacacaaagaagaaaaatataatataccaaatcgactttagaattggatcgatgttgttccaggttgtctaaaatatctgtaaggatccttgcatatcttgatgtagctgctcagtcagtagtaaagcttagaagcataactttaatactgatatacatacacccagccctacaggccaaagatgcaagacttcaattactgagatacatacacaaaggcctagggcaaaaatatggtatttgattacagaaagacatgagctgaagcataagcaagcatcctctaggaaaaaaagattcttgtggaaccaatgcagacaaaatctgtcattagaatcaccactgaagaagcgaattttaaaatactaaatcccgctacaaacatcactaagcaaaaatcatgtgcatctacattctacaattttattattctctattttcagaatatgcactgcatcacgaactaatcagccactaaatctcacatcacatccattcactgtcatcagatctgaacaaacacaagatttggcctctacctccaccccacaagactacatcccctttgccccatcagcaaagaacagccaggagcccatcccaacccctctccccatccccttagcccctatcagcaagatgcaaaagaagaagaggaaacattaggagaggggaagaggaaggaggggaggggcaagacgacctcgtactgttgcttccttgaggctgtaccgcttgtgactgccgttgcagctgccgcagagcacgtagcgctcgccaccgcaccggctgcaggcggcgagggcggttgcgccggcgccggctacaacgcgtcggagctcgccggactcgtggaggcggcggacctcctcggcgccgccgaggtggcggccgccgacgaacacctgagggagggtgacaccgcgcgcgcgggggaggagcgcgccgagctcctggaggtagcgggggtccatggcgaggaggggtcgacggctgtcaacggagaggagaggagaggatagaaggggaagattaggttggtcaaagtgaaagtgaaaatatcaggaggggagagagaagaggagatgagatgaaaacatttgaagccaggaggaaggaaaaaaatattaattttaaaatattaaaatttcgaatcgaattttattatactaaatgaactcatgtgtaaaagttgtcaaaaataaagttgtagaactcgttgaaatctaccatttttcttttggtcatttttccatccgactttgattaaactatataaaatttaaattttaaaatataagaaattcaaataatttttcgagtagtaaatgattttaaatgaaaaaaattgtcaacatcaaaattgtaaaacacatcaatatctacaacttttgttttggttatttttctatatgactttgtttcaatagtttgaatttgaatttcaaattatgacaacttcaaacaacgttttcaaatagtaaatgatttcaactgaaaaggtcatcaacaataaagtggtataactcatcaagatctgtgacttttattttgatcatttcttcatccgataaagcgatttgtaacattgttcataaaatgtacatatctcttatatagttttataaactatcagagagatatgtaaattttttgaaaaatgttactatcactttgtcggatgaagaaataacaaaaataaaagttatagatcttaatgagttatataattttgttgttgatgactttttcagctgaaatcatttactgcttcaaaatattatttgaagtttagaaattcaaatttttaattaataaaacaaagtcacaagaaaaaaaaagccaaaaaaataatagcagtaagaatataataacatgatagaacatgattttagaaacatttagaaaaaagaatcatccaatttggagtttatatgagtgagataaattgagaaaatatgtagtgcaaaccacatatacagtggaaacttggaaactaccgttggatcgagaaatggacgtccgagattcgtccacatcaccatgagttaaaattcaactcccggtaaaattttaactcatgagtgaatctgcgagttaaattttaacttatggtgacatggacgaatttggacgtctatttctcgatccaacgatagtttccaagtttccactacatatatggtttgtactatatatttttctagataaactagttttaaatttttggcctgaaagttgggagttgggaatttatattggcggtgtaaccgccaagaaaaatacatattttcttatcggctagggaatagccgctaataaaatatgtttattctttgcggctagtttgaaccgccaaattaaagtgtaatcttggcggctgatttcaaacctccaagaaaattacatggccgtcaaagacattatgttttcttgtagtgtaatattttctacacaaaaaaatataataaaaatattttcaacacgggatctaataaaactattttggtatcctagatgttacgtttttctatgtcattagcaggattaactaagttttcgtttcgtttttctatgccatcatcttgaaaaatcaatttatttgatctttcaaaaagcactatatatagatttttttttaaaaaaatatataccgtttaatagtatagaaaacatcacgatgaaaaacgatgtagtaagtagcccacacaagacggttgttttgtttcttctcttaaaaaaaaaagagaagtcacgttttatctgggttaaaaaaatgatctgcgaataagattttttttttagtttttataaggcaaaattgattatatagcatcgaaagttcacgtttttggttttatagcaccgaaagttaccggttcactttaatagcacccaaagttcaccatgttcccatttttaacacttctgtcaattctctatcgttttccgtccgtcttgatcagccacacacacgatatgacgtttctacccctcacaagtgcaagtataatgcatgtcaatgaggggtagaaatatcatatcatgtgtgtggctggatcaataacgataaagacgggcggaaaaattgacggaagtgctaaaaatggaaatagggtgaactttggatgctattaaagtgaaccggtaactttcggtgctataaaacgaaaaagtgaactttcgatgctatataaccaattttgcctttttataaccctccagctaaacatgtggcccccaccactatctgctccgttatactacgttacggttaccgtgtgtgttatgcaatagttcaccgtaagtatcaggtgccgtcatattttctgctattgttctgttcccgcccaaggttttcgttcccgcgccattcccgcaacagaaaatgcatgtgcgccaaaaggaacagccgtgcgcgccaacgaaatatgtcggtgctgaaggatgcggggcccacgttccctggtgtaataatattatagcactctgtattttccctgtgttccccagtgtttggactgaacgctacgtgatagaacttgttgcgtagtgtttctctaatccacccggtaatttacagagtgctaaatgaaacactacgtaactttttgctcacactcgggagtgtctcccgtcctggtagtgactactcgggtacttttgcaattcttaagagcagaaaataaattatcttatctctatgtttttgacttttcccaagtaatacttagcaccttgcgttactcggtctatccaacgagcctccaggtgctaggaatcggcctaaaggcaattatccatcgacaaaccaaacggaaagcataggaagatagaactccataactcgataggcacttttgtactcaaattatatcacaagcaatcaagataaatattatgaaaattgttgaaaatataatataacatctgtagcccccaactcactagtcaacggcgaaccaattgatgtagtgaggcaaaggaaaaggaaaatatcatctaaagaaaattaacgatgacttagctttataatattccccttggtgatggcagaggtggccaatgtaggaacaaagtcatccatcaatggcaatgaaaacaccagccatagaagcagcttgaggcgactgatgatgaaaacgaagacgcccatcaacagcggcaaagtccgccaactgtataggcagaaacaccagtcggcggcaatgaaggcgagccggcggtgaagatgtagacgcccaacaatggtggtgtgaccaaataaccgtataagcaaggacaccagtcggcggcgacggaggcaggccggcggtgaagacgtggatgcccatggacggtggtgtgaccaaccaaccgtataggcgaggacaccagtcggcggcgacggaggcaggccggcggtgaagtagtagacgcccaacaacggcggcataataggccagccgtgtaggcggagacaccagtcgacggcggtgaaggcaagccggttggtgaagacgtggatgcccataaacggtggtgtgaccaaccaaccgtataggcgaggacaccagtcggcggcgacggaggcaggccggcagtgaagtagtagatgcccaacaacggcaggcataataggccagccgtgtaggcggagacaccagttggcggcggcgaaggcaagccggtcggtgaagacgttgttgtcatcagcaacggcggtggcgaagacaagccggcggagtagactcgtggccgattgaccgcatagcgagacgcctcgagtccatgaccggcatcaatcgccccagtagtgccgcgcaattatatgcaagtaacaaaaacaaaaaatatcaaaagattaatatgatatttagagatcaatctaatgaacaacaataagttggaagggaaaaatcctggtgatgtcggagtttaatgcccacaagcaaccaggaactccgtagaacttgggcgaccatgtgcatgacgatcaaaacttgggtgaaatcgcgcgacatcgactcgccgccacaagttcatgcatttaaaagaagaccaacagattagacgagagcatatacatatatataaatatatataacagctgtatgtgcatatatgaagaagattgatctctgcttttgccatgagtgtatataaagcttctccctgttggttgatgtgcttcaagtcagcatgtgtttccttctggtaggctcggcagtgtccatcaataggcaccacatgccatcggctcggttggcatttagggtcacacaagcacgagaaaagtttcgtcgcttgaggacacggcagaaaacttcgcctccctctcagccgaccaacccatgaacacaagaaaataccagaaagttattctggaattaaaaatcaatctaaaaataataatagattgaaacaacaaacctggtgatatcgaaaattggttccatcgcacttgttgacgggaaactcgacgcacccctacctggcgtgccaactgtcgaaacatgaattcggcaataataaaagcgggtagcgcacgagacctaaaagtggatggatgcggagacaaggatttagacaggttcaggccctctcaatgggaggtaatatcctactcctgtttggggatttgaatccaccgggtgtagtatagatctgatgatcaggtgtgtcatgccccctagagggcctcctgcccaccttatataggatggggagcaggattataagatagaaaccttaaccaatacggtatcggtttcctaaatctattttacaatattatcaaatcaggactttaggccgctccataatataaaaggaaacgtaatacccaagtcatgatctgttacatattccatagatataagttatcccctatgactagtcggataaccatgccgtgtgggtatggggtacccataatctccacaccacctgttagtgaccacgtcgggggaagttcatgtcagaggatctgcttccgtgggattgctaggagggttggcgagtagatgatctgcggttctggttgatctcctgttaatcttctcgtataaatggcaagatggacaataaactgaacggccgaacttttgagccgccaccgcaggagtgcaggacgactgatggtttggcaaaagtgatggaattgccaccacatctgtgcgctgtgttttgcattttgctgggatgtgctccctccctggggcagtttggactccttatctgcttttagtttctttattagccttctgaactatgtagtgaacctgtggtagtttgcatttcgttaatgaaatgggggagcaatgctctctttctcaaaaaaaaaaaagaaaatctaccaactcactttgctatgtcaatcgatccactgtgttctgataatttaagagatacttcgatggatttccattgatatgctgatacttaatatctagttaggtcaagctgtcaactgttgaatgctgggtacggctagaacgaccaatgtacgctgatgttttctagtggcacatgcagcctacatgtggtatacacaggttgtgtttagtttctgaaatcggagagaagtttggggaaagttggtagtttggaaaaaaagttgagagtttatgtgagtagaaaagttttagatgtgatgtgatgtgatggaaagttgggagtttggggaaagtttggtgtgaactaaacagggccacagtgaatttaatcattgacaccctccgctgtcgcgcctgtcgatcctccgctgctcggccacactccggtgcccatcaatccttcggtatggtactgcacccattggggctacacagcagcgcccatcgatcctccgccgcgtgtcctctcgcttgttggcgcccgatgaccccccccatcgccacctgtcaagcttcacctctttgccgattcatcaccgtgcgcctgttagattgtagttgatggctgccaccaagctttaatttgcatctgtttcatatccaaaaaagaggagctcgccggtgctatgggccgccgtctgctacacaaagacaccactggaaaaagcattttcgctgatgttgggtatttttttcgcagacgggtatgacaatcagagtaaaatccccaccagcgaaaatgagtaccggggaggagttggccgttcgccaacgaagatagattattgcaagcggaccacataagggagccgcatgcaaaaatcatctttgcaggcggcacacatatggacccgccggcaatattcacatgcaggcgggctccttaggcggcgccttatgtggtccgcctgcaaaaatagccctataaagtcttcttcttccttgagccttgttcatttcattcgaggtttctttctcctctaacaccaaaaatatatgggagaaggttttgaagttcaaatcttcgggggatttttctatggtagttagatctacacctttccactcttgttatgcattttcttttaataatttcagacctctctttgtgatggatctatgcatgcaaaattgtgaagaaaagctcaacgcttttttcttttcattttttgttactttcctttgatatgtttgtgcttgatgtgtgtacactacttgatgtctcatcctctagtgatttaatgtgctaatataaagtcccaaaattttttattttgccctcacatccatcttctagatttagataggagagagaacaaaaatgtccatctcttaatatggtccatgttaaaaatggattttgctcccatctattccctcttctttcatgtacattttcccacttttgttggactttcctattatattaatttggtatgtctctatataccaaaaataaatataatttgtccatgaaaaatatataataattattaatagttctctatcatttttagtgaaatgaaatttggtatggctatgtaaaaaattaaatgtactatgttttcaaatatttgttgttcattttttgtaatatagttgtacatgaaatttttgtagatatatggataggaaccaatggatatatcattcgttgaggtttttggctccatatatggattaagtgtctaaatttattggtattgccaaggaacacgctgaacagaacaatatgacggggattctttgtccatgtgttgattgtatgaatgaaaaagcgtgggaagatgttgcaaaagtaacggagcacttagtaacttgtggatttatagaaaagtacgaaatatggacacatcatggcgaacatcaagtggatcggcccgaaaaaagaagttccgccagaagttgaagacatggagtacgccgatggttgtggtgaagacaaaatcgatttggaggaaatgttacgtcatgcagatcctgaggtgctcattgggtcggctagaggtttagataattttgatgctttatagaaggcagcgaaggatgttttgtacgatgagataaagggctgtgacagtgagttctcaacattacggtcagttcttgaacttatgaggttaaaggtgagatatggatggtctgatagtagtttcgacggtctgcttgaactattgaagaaaatgattccgaggtctaactcattaccatccaacacatatcaagcgaagaaacacatatgtcccctttcacttggtgtggaaaagattcatgcatgcgtaaatcactacatactctacaggaaagagtatgcttcattggataaatgcccaacatgtggtgctagccggtacacatcaaataccaatacttgtctagaagagtctgacacatttgagggaactaagagaaaaatcctgcagcttgtgatgtggtatcttcttgtcaaaggctgcattaaacggttgttctcaaatccgcaagatgcggaactaatgcgctggcatcaagaagggcacaagaaagatgggatgctctgacacccggtgaatgctcgtcagtggatgcatctagaaaagaatgtgtttgacaacgtaattggaacattgttggacatagcaaagaagactaaggatggtctgcaagcgtagcttgacctagtcgagatgggaattagggaagagttacaccctcaagaaggagagaagaatggcaaagtatatcttccaccaacttgtttcacactaacacccgaggagaaaaaggcattttgcaaatcactccacgatgtgaaagtgcccataggtttctcatcaaacatcagtcgactagtctccatgaaagatttgttggtatctggttataattcgcatgtttgtcatgtcttgctcaccgtgtttcttgccattgcaatacaggacataaaaccagaacatttaaaggttgctatcgcaaggttgtgctactttttcaatgcagtctcatagaaggtcatcagttaggaagagttatcacttcttcgtacattcgcacatgagacacagtgccaacttgagatatgtttccctctagcattttttgatacgatggagcacctcatcgttcacatagtgccccagataattgcgcttggcccgttgtacctccatcaaatgtggtcatatgagcgttacatggctattttgaagggctacgtccggaattgcacccatccaaagggatcaatggttgagagttacaatacagaagaggttgtcgagtgctttatcgattacctcaacaatggaaagacaattggaatacatgtacctcgacacgagggtgaattgactggtagggggaccaaaggaaagaagagattcgtcgcccatgattacaaaacacttcgagaagctcacttcagcgttcttcatcagcttgctattgttgagccttacatcgatcaaaacatcaaactactaagatctaacaatacgggacgcacaaccaagtggatcatgaaagaacacaagcgtctcttcatagaatggagaaccaccgaggaaataactatgaaaaggttggcatgtggtccatcaagtatagtcaattattgggagggatatgacattaatggatacacgtttagtacaagagctcgagatagtaagaccgtcactcaaaacagcggtgtacgtgtggaggaaattgattccctaggagaaaaactatcatacttgggtttattgaagaaatctgggaaattgactatggactcatagtgcaattccccatatttaagtgccagtgggtaaaatacccaaacggtgtcattagtgacaagtttggtcttactgttgttgaccttgagaatgtgggtcacaaggatgacccttgggtactcgccaatcgcatggcccaggtgttctatgtgacagaccctacaaatttgaagaaagaaatagttccatcaggaaaacaaaagatcttgggagtggacggagtcgttgatgtcgaagattacaaccagtacgatagtatggcactgtatactcaatttgtacaaaagattaagcttttggcggcatctactgagaagaccgtgaagccttacatacgcaaggatggtgtggggaaaaatgtgaaagagtaacgtttgtacatgtttgcaatgattactatgcctttaagtaattgtttggtatgtaatgatgatatgttttaattgacaaacaatttattatgtagtccaatttacattttttgaattcatttacattttatatatgttttttaaaatcaattacattttttaaaaataatttacatttatttaaaatcatttacattttttaaatgttttttaaaaccatttacattttatatatgttttataaaattaatcacattttttgaaatgattttatattttttaaaatcatttacatttatttaaaatcatttactttttttactgatttttaaaatcatttacttttttaaatcaattacattttttatatgctttttttagatgtttttaaacatcatttacatttttttttacaaatttttagtacttttccaacttcttattttccttctgaaatcatttttgccggcggggtgtccgcttgcaacaatgacaaaactgattatgttttatcatcttcatcggcgggctgcccgcctgcgaagatcgcgtgcctatataaggggtttatacaggttcaggccgctgagaagcgtaataccctactcctgtgcttagctgatcttgcaagagattataagatctccttgttggaatagaaggtgttgatgatgaggggcagaaggtgctctaggaaaaaaaaagggcttgtcccccctcgcagtaggcctggacctccttttatacctcaaggggttaccacatgggcccaaaaacctaacttaggggagatggattacaaactatgcattaaaatgcaagtcttgtttcttcacttggaaagccatacgcacgtcgtcttggtcatggggcccatcaaaccacgccgcctgacacggggggcgcccctgccagtcgccatctaatgggtgatgacttctgggatcccgttggcaccgggaaacaggagcctcgcattgactagagcggatgaaccgactccggccatgacacgatttgacgggatagggcaggctgcacgccgcctgacacacgtggtagtgtgcaggcacattaccctggtcccatcagtcattcgacctgtcactgatcggtcacagaccggtcaggcgcactgcatgccacattaaatgcggcgtggtgcgccgcttaggtcgccttaaatgcggttaggtaggcgttggggcgcacacctaaccccacacacgtggcgtcctgcggagggggtcggggcaccccgacccctagccatggaaggggcagccgccaccctaccccggctcgatcccttttggggagtgccacgtgggtaccgggggcagccccctccctcaagtcttaataccctcgggcgaggagggggctgccgccactccaccccgggcccaaccctcctcgggggagtgccacgtgggtatgagggcggcctcctccctctaaacatgatacccccgagtctatatcaccaacaatatggatgtggatgtggcgatcactccgtgtaagtgatcgtcggaagacgggtggagacatgagcgccacccgtaacacaaaacctttgtgaaaaccaaaaacctaataaaacaaaatgattttgactggggcggcatgaatagaatatgggtggttctggaaacggcaagtcaccgaccctggttaattaaggaccgagtcaagaagctatgtaggaaacgaaccgagtacaaccacatttcttaaatgggtatagactcggcggactaagaaatccttgtggggcggcacctcagtcatggtaggttctggatgcttgatgattgtgatgaggaagtgttgtgatcagttaatgacatcaaaaacctaaaacgcaccctataagtatatatattatatatctccctgaacccgggaatgccaggactcccctcactgccggctcgaggtggtatgttttgttaggagtgcaatggggacccatagtccttggggcaggtgccacaatacgagggtgactgaaacaccgggtcgtgacgagtttcatgtgttgggattaggctcatatgttgggcaagtcacggagtgcgggattaaaagcgtacatccactgtagtgtgaggaaaactaatctattcgaatagtcgttgtcgtgattaaagagcatcgggacttacactactcttgactagcctcatagattgttaatcttgcttagattaggaaaagatgtgtgaccttgcccgatgagtgggaaggatgtagtgaaggagaatgtgggaaaaactggttgcgagggtaaaccggaccaagcgaggattggggaaggtggatgaaccctcatggattaacgacaacttcaacaataatgttgttttcagttaaaactgctaagtcataggtttgtgaaatgatttgtgaaatctagctttatgcaaacgaaccaaggcatccttgaaatatccctgtgagcactatatgcattatgtagtggtggcttgctgagtacggttggtattcacccttgcttaattaaatattttagaaggagaagttggagccgatttgtacgtgtgccatgctgatgaagagatgtcgaatacggtggagtagggacctaggttcaccagtcgctgcctgtggaataagatggaccgtcgctgcttcgcttccgctaccgtatctacttcattggatatttggtcttatagatgacaatgcttggtctatttgggtgccactccagcaacccttgtattattaatgtattataaagcctgtataacgatatcggctttgtgatatacaacgttgccatgtgtataccatctactgatccagggaatggtattgtaatcacatgaggtttccagtgtacaaaaccgggggccgacacctcaccacagggtggataacttgttcatcatccagaatttctacaatggtgtaagcatggccatggtaaggctgtccatgtcggtgtggcccgtggccccccgtagtgcagcggagggtggtcttggtggtgcccgagccgacgtcgaatgtgtgcgtgcagcagtcggcctcgatgaggtggacggtggcaagatcctcctcggtggtgtgcaggtagcgcaacacctctagggtgggcatgtagcagaagtagcagatcaagaaccccacaagggctttcagcaaccgccgacgccatcacgttagccgcaggcgggaggcggctgacgacgttggtgacaatgttggatacgggatccaggggcccaaagtagaggttgctgtcgaggatggcgggtagcagcgctggcatctcatcgatggggaggcgcacgatagccgcagcgtagaacccatggatgagtcgtttcagcatcgatttgtcaccgcggtgtgcatacggagttgggccttgcctggtcctcctctcactcttccatgttgctgcacacatggcgcctatctttagctagctatggttgtctatctttcacctcctccgtcttcttacgtacatcgctggttgcgaaaattaatgatcgtccatgcaaaatcacctcctctggttgcttcatgcatttccctgcacaattattgtcccttcaccaccccccaccctccccggcaagcaaatatgtcggcagcaattttcctttttgttcttttttttatgaattcggtcaaagttttttcatatttagttacattttgttaaaaaaatcaaataactttgtgcaaaaagtgacaccaaaattccaaaatttcagtccaacaggaaatagaaaaccctggaaatgtattcactgattaagatccattcagtggatgtccctttgtatatattttctttatcaaattcagtcaaatgactgaatttttgattgatggtatagagtatagtgacatctctgactttacaattcagttatagttgtcgattaatagggaagtgatttcgaaatttttgagatgaacctcaattaagctattttgaggcaggaaattttttcgcgagcgagagagctaatagttctgttttatgctagataaccgcttgcaacacgctgacccttattaaagaaccacgttgaatacatcttcattggagaatactacaccaacatttctcgaattcttcatcgagttggaagacttgaactgaagaccctttcttttgccatgatagcctgaaaattggacaacgaaacacagttaactgaagttccactgaatacataatactaaccgaagtgtttgtagggtgaaggttttcgcacttcttttccccaatctgtacgcagtgtgatgaagaggagcatccctactttactgatactgccacacacaaggccaagccaaagaccctgttttatggaaacagctagcagtttcagtcatcatcatacaaaggtacaccaaaacatttctatgaatcaacaaaaaaacaatctgcactgcatatttttttcaaaagagattgagagagtagtgctacctctccattgagatggaggacaaatgcaagcagcacagccgtcggaataccaaccaagtaaaacgcagcaagattcacatgagcgccaatgttctgcttaccacatcctgtcaaaactcctgaaacatttggaggtccaagtaattttattactactgatcgacttaattgtatgaatcaatcagttcacccgaaaagctcgccgacaatgagaaaaaaaatgtacagctgaaatattttgatgattgatcacaagtagaaatatggtatggatttgtacctgaaagagcaccattgatgccatctatgaagaaggagaccgcaaggacggggagcatacttgcaatatatgccaccacttcctcctcgctgctataggcatttccccagacattgcgcagaaaaatcatggctatcactagcacgaggcatacaagcacggtcatggctatggcgactcgcgctgccatccttgctgctcgaggatgcccgccacctagttcgttcgagacgcgcgtgctgcgcaagtgcaaaattggtggaactaatcagttctaaatatctaatccaatgacatgtaaactgaaggaagaaagcatgcttgccatgtaaataaaataagggtaaactgaatttggtcaaaacttatttaaatttcatatattgtcgttcagaaattttcgggaatttccccccaaaaaaaaagaagaagcagaatagaaaatgttccaaacgaatttgcaaaccctgtaagagaacaacacagtagggcactgttctaaaagatgacacttgtatgaagaaatggattttagactttagagtcgaaacaaaccttaaagatgagccaatgccacgtggcaccatgaacaggagagaagaagtgctcaagctgcaaatcaaattggagttaacaaaatacccatgggaaggaggagagctgatttgtatctgtgttgcttgtgatcaaattaccagattgacagaacagaagtttcaagctgaggattcggcagaatgcccgagagcagcacaagtatctcaaacgaccaccactccaagctgcacacaaccaaatcaaccagttaatcaatcctcacataaaaaatttcccaaaatttgttcaagcaagctcgatttgctctctcgatcacaaaacatgttccaagatttgctcaagcaagcaagaaaccagcaatggtgtcaggactaagacgtgtcactgaccagaccatcatggcggacggcacggcgagctcggtgaaccggcggagctcgcggaaggcgtctatggagaacccggtccacgtcgtctcgcaggcgccggacagccgcacgtagagagcgaggacggcgaggttggtccagtacgtgacggcgccgctcagcgcggcgcccttgctccccatgccggccttgtgcaccagcgcccagcacacggcgacgtggccgaccgccgccacgccggagctcgccatcaccggcacgacgatgccctgcgcctgcaggaaccggagggcgcaggcgagcggcacgtaggccgcgagcgacgggatcatccaccgcgcgtacgcgccggcctcggcggcgatggccgggtcctgcccgaagaggaggaggatctcgccggcgctggcccagacgagcgcgatggggacggcggccgccgcgagcaccagcatggcgcgctgcgcgtagacgccgagcagccggtgctgccccgcgccgtacgcctgcccgcacagcgtgtccagcgcgctcgacatgccgaactgatcagatcatcccaccgagaaatcagtcacaaatttgaccaagaaatcggagagatgaagcagttcttgcatgcgagcaaggtgttcgacgacaggtgcgtacgagaaagctgaagccggtgacgttggcgagcgacgcggcgagggaggagccggcgagctggagctcgccgaggtggccgacgaacatgacggacaccatctggaccgagttccgcagcacgaagctggccatcagaggcccggcgagacgcagcaacctcttcacctccgccgcggccgccgccgccgtcgacgccatggcttcgtcctcgccatctccgccgcgtcggatggcgagcagtggctcctccacggttggctcgtccatgtcgatcgaatcaccaactgtgagacgtttcttgggctgatgctaggctgaaaatggtggattcgttgtccaacttatacggagcataataagttggtgtgttgacgagtttgtgacggtcaaatcggagaggtgtgattcattttaccctccacatgctgggcttccattatttaagagtaaattctatcacacttattatatggtccaagttatataaattataggaattttagcacgtgaaacataacctcgaatattatggttataaagtttcacaaaaccacgccgttaactattttagacatactccattactcctatatgaaaattttgaaaaacggaagtaacatttgcttgatcaaaatcaaaatggctaactgtttggttttctaaaactctagtgaacataatacttgagattacgtgccacaatatataatagacagggttttataaaatagtaaattttgtaacatcctaatacattattgttgactaagatggtacatataccgtagtcacgagtatcaacataatcaaaatggcaacaaatatagtgtcaaatcatcaaattttatgggcaataatggaacagtagctgcgaaggtttgtgtggggaaaatgtattccagtgtgtgtgcactggaaatcacgaaagaatattcaaaagagaaacaagctttagttggaaagaaataaaaaaagtaggattactttgtgaaggcacttctgaaaagtgaaaatgatggttttgaatgtaacttaatcattgtgtaataatactgaaaaccaaaaacttaatttagcaatgagcgggaaaatactggggacgtttcttgggctgatgtttgcaatctagggctgaagaaagtggattagttgttcaacttatagggagttaatttaatgttaatttaattaaagtggaatttggaatgtgtttggacggattcgattcgatcagtggaaggggcctctagcaactcactactgaaaattctttcgtttagttactcagttgacgtgttgacttgttttgtttgtaccgcccaattcttggatgccaaggcacaaatacctaatgtgatttgcatcctaattcattatttgtaggcgtcagtttaaaaagtaagacgtggtgttgtccggtccgagatcagtcagcaattttgactcggaagaaagatgactttctaaaacttgggatgcaagtctaaatctccaacaaaattgtaaggtttggaatgaaacaggacaaagctgaaagcaacccttttttacgacccacacggtataggaggaaaaagaatagaagattaccgtcctcgaaggctataatcaggaaaaagaaaaaaaaatcaccacgtgctagcgactccttagtccttacacaccccaagagaagcactagcaccaaattgaccgccggcgccgctatgcgagaccgatcaccgctaatcctacacagggttgcaaacgcccctccgagtagggctccaaaccaggagatcatcgatgggctcccgatcatcatcaggtagaaggcctgaggagggagagggcgagagagaagatctactcgtccctcacacaaacctgatgataatgactcgagagaacgccgattacccaaaggatcgaagctcatcaggcaaggaaacaaaacctcgtgaacgatgcctccaaggaggtcgttcgcttcctgttgatgaaaaaaacatgggggtctgggagttatgcttagctccagtgcagatccaaatctcgctttcgagttcaggacgtgccaattggtttgaccctacaacaaacaagaataaacaagaaaatcaagttaaattacgatagccggtcggcttatgagctgataacgtatcatgtaaacctagccgatgcaatttgtccgaattggttgtaaggtgtaggatgaataaaataagacaaatctaaaatatgttccatcggctgtagatacaatcagacatgttccatgattcaacctttctatgagatgtaagcaaatagtatagattgaatgagatagtgtagattgctcgtaaatcagatcaaacaaattaaagattaaatgtagtttatatcatagccgatgatatgatacttttggttaagataggtaccgtatcggctaatactccaatatagccttatgcaagaatatcaatctaaataaatatttcaagagcaagcttgatatatttaaatagtgtgatacacttgtatgagggacagatacaacatgaaaaacatgattaaaggatttaaacaaagctaaaaaattatatcatgtaagatcggttgaaaccccgattctatccctattagcaatcaagaagcaggttagtttctataattctaagcatgactaaggctgatgcagcacaaagtatgaaaagaagcataaagtctaaacaatcatgccttgactgattttcagggtggtggatatgttagctaatccaaaccgacaaaacaaattagccgatgccggcaaaaccgtaaataagacatggccgatatagctaatcgagtcatcaggttagattaactaagacatataataaccagcgatcgaataggatagattagaacatctaaaacaacgccctaatccaccaacgcaagccactgtgacaagccattgctctcgtcagaagatcgaagccgatgccctaactcgaagcaagaactcgtcgaaaaagtagaaaagtaaaagggtggcgatgcgccgagagtatatgaatggttgttgtttttttagaagaccctaggcatatatttatgcacgtagtacaaaacctatccatatcgggcacgacacaaactttgaaaaaaaaaaacacaccagcccattacggactctaacatagactcctaaaacacctaaaggaaaactgacttttatcctaattaatagatgcaattatctccttggcggactcgatctttgcttggcaatattaccaaccccttcctccgaatccgataggaacacaacttgctactatcggcaacactcagccgatatggtcctgtcgatacttgttaggcgatccaatccctgtttggccaaacaaaattacgccgttaatttttcccatcccttattcctttttcaatggaatataccaaattttaccattaacacattcccctaattctggagtatggatagacatgcttcggaattcatccgtcacaggacatttaacaccagcccattagggtttataatggcccaaatagcccatctcagcctttaacaccgtaatttataaatagcaacggtcacctctgccatcatcgtgctgccactttatttcttcgtttcctacaccaacaagctctaatttcctctcttctcaactccggcaaccaaaacgaaactatcaaaccccctctggcgaactccaccattcattcaaatggcgacgactagcgacatcctagaggtaatatccgtaaaactctcctttttcctctttatttaccgcactaaatccataaatccctcattctctggttttcgcctcgtgttctttgttgtcatctcttttttactactcatttcactgtagcaaatgagagatcaaatagtgattcctctagtcgatcaaccattatattattttctcggactgatggggcaatgaggatcccattgaatttattaacgcggagaccaatcgaattcctttcaagctatctagcccctgcatttccgattggaatttaagattcagatcttggccctccaaggttcccagctagagaaactagtatcggagtatgctggaagccaagcacaaagtctggtccaatataggcataactcagtgcatcgctctatctttggccgagccggaaaaggttgagtctctgattgcatcggctacacatttttggtccgatactctgaacacaccttcttgttcaaccatgggccgatcagtcccaccttgctcgatatcgtcatgctaactggtttgaacatcacttcatcggctaatctttgtagtctgagaataaaatgtgttaacaagctagagaccaaatgtgtcagcggctggtcagcttgtatcaccaagcatgccagaactggagcagtaaccgacagagagcatgtggcctttcttaatttctgcttggagagatttgtcttctgcagtgcgactattggagggtcagcccatcggccacttgggcagtccatggtggcttgtacaactctggcttaagttctacaccgtcaaaatcactggagtgcacgtcactgaatcaagatttctggcttatttcgcagaaggtgatgaaaaatctcttcccagatgcacgtcacttggcgaagcagcaatcatctatcttagcagcaaccttacgcttgaaaatgtcatgctctggttcaataggttctacactggtttccctagggctgcaccagaaactggttcccttatgaagaattcgaaggctatgaacttccatcggacttcaatctgaacaacattaactctgatgaagcaagccgagagatatttataacggctatcaccccttgcattcttcagaccggcatttctatgggacaccactctcatatctcgtatgaattctatcacccattagtggtggcccatcaacttggtttcggccaagtccctatcaaagtttacttcatcaaaaagatacaaactcggggaacgatcacaagtgcacttaagtgcgattgtctcccaaacctcaatggtccaaatcttggtcccttcattgactgggacagccgtactatcggcagtagaccatggatcaaatggtggggtgaatggaagcgtcaccttttcaacctccagtctacaacttcctcgctttacttgatcctaaattcgttcctgatgatgctgaggtaaaatctttgtgcactcaattcttcctctatttcaagcactgatcatctgtccatttatatgcaggaagacgatgacactcccatgaccagctttagtgctctgccgataaattatgttcccttatcggtatcgtcaagacttggtgcaggtgcccctcccacatcttgcttacttcaagaggctatgagggagccgataccaagtctgaagactaagcgcaagaagccggccatgtggcacaaaagcaagacgcgtgttggtatttcttaatgacattactagcaacataattctcagcaatggcgcagaaataattctggtatattatggttacacatttcatccgcaagcgcacggatataccattgtagcatttcaaccgagagtattccaagggtatcgtatttattttatcccgtgggaagatcatgtagagagaactcaactaataatttatatattacttgtgataatcatattctaagcaggggttaagataatccaagggtagagtgacacacaagcattactactcatcctcataataatttatctaagctaggtggaaataagagaaaagaaatctattcctatacttctagtataattctagctaaccgatatactagctaataccctctatccgatgctctcctggtacttcgagaagccaactctgactgccgagctctttacgacagcccgtcatgaccatccaaccggggctaaatatggaggaataccctccccaggaaattaacttaggattatatataggcgtggaggaatacctgtactgagctgtcatcttcagcggccctactctcatccgcaatatataaccccaaataatgatatcttgtaatctagacaccacgtctaaactaccagatactactctaatatcatcgtcatgacatatagtaattgtataagcaaacactatacccgcatcaaagcatctcctagataagctagccgtatatttagtataacaaggacataatgtaaagttggtactcatatactcggaaagtatttcaataccataaatgtatatagaagagtattctaataaaagtacaaagcttacaaaagaggaaaggaaagctgctagagccatacccgaactcttccgaaggcttccgaactcctgattcctcttctaattctattccaccagctagatactactaaactaaacttgagaggaatgagagagctcttgcttgaggtgtgtgagtgaagtgagaatggcaactccttttatagcctcccaatgacggttgtggcggttggaatggtcggaaatgccctccaactgccatttggggctaatccacaccgtccaggcgaagccctggatcggatggcgctaaggagggttcggcttgatccagcccaatttcggctggcggcctcgtctgttgcttctcttcacagacttgtcaattttggcccagtttgtcgtgtcaattctgagttcttggcccattcatgcataagtctggttctcaacatcgtctaattgatttatcgttggtgttgatgtcgattctcctcctttttatgatcattctctgcaaaaggttagtaaacctaacactagtggaatattattattctaaaaaatatatgtattgcaagcatcactagttctctcctgttttagtaatattgatggtcgaaactgatcgataacgaccgtcaataacgcgcaaaactggcttgtcctcaccatgggatggataaatggctcatcatccagaacctctacaacgagctgacgcagttggcctaagatcatattgatgctgctgctggaggagccttcttgtcactcattgttgctcgcacatcagaactaattgagtagatggtctctaaccaagggtggagcaaagaacgactccaacctcattagtggggcatgcatacagtcaaggagatggacatgctcgccgctaagatggacctcctcatgaaacgcttggacgaatgtgctcgtgacaaggcagaaatgaatggtactacccaaaccttggacatcccaatgacgtgccagacttgtggcagcactgggtattcagggaatgactacccgtttctgtggacagaagaccggcgatcttgcgtaacctcaaggagagcgtaagcatggccgtggtgaggctgtccatgttagcatggcccggtccccccgtggcacagctgggggaggtcttcgtggtgccagagccaacgccaaatgttcgcgtgcaacaatcaacctcgatgaggtggacaatggtgaggatatccgcctcggtggagcataggtagcacagcgcctccaggctaggcatgtagtagaagtagcatatcaagaacccgacaagggctttcagtgaccactgcaccatcacgttggccggtggcgggaggtggccaacggcattggtgatgatgttggatacgggatctaggggcccaaagtagaggccgccattgagcatggcgggcagcagcgctggcgtatcatctatagggatgcatatgatatccgtagcatagaacccatggacgagtcatttcagcaccgatttgtcgccgctgtgcatgcggagttgggccttgcctgctcctcctctcactcttccatgctgccgcaaacatggtgccatctttagctagctatggttgtctgtctctcacctcctccatcttctcatgtacatcgtttgggaaaataatgattgtccacacgaaattacctcctttggttgctccatgcatttctctggcacaatgattgtccatcactaacgcatcctccaaccccccctccccccctgcgcacaagcatatctcggtggaaaatttccccccttttttttcctttttttgttgaatttggttaaagtttattcagattcagttacattttgttaaaatttaaaataattttgtgcaaaaaagtatgaaaattccagaaacttcaatccaacaggaaattgaaaaccctggaaacggattccctgattaagatccattgagtggatgtccttttgtatacattttctcttttttcaaattcaattcaaatgactgaaattatgtttgatagtatagagtatagtgacatctgtgactttacaattcaactataatagtcgattaatagagaattgatttcgaaattttgaagatgaagaacctcaattcagctattttgaggcaggaaatttgttcgcgagcgagagagctaataattcttttttatgctagataaccgcttgcaacacacttactcttattaaagaactacgttgagtacatcttcattggagaaatctacacctacatttctcgaattcttcatcgagttggaatacttgaaccgaagaccctttctttcgccatgataacctgaaaattggacaaatgaaacaaaattaaaccgaagttccactgaatacatgatacaaaccgaagtgggattccctaattaagatccattgagtggatgtccttttgtatacattttctttttttcaaattcaattcaaatgactgaaattatgtttgatagtatagagtatagtgacatctatgactttacaattcaactataatagtcgattaatagagaattgatttcgaaatttttaagatgaagaacctcaattcagctattttgaggcaggaaatttgttcgcgagcgagagagctaataattcttttttatgctagataaccgcttgcaacacactgactcttattaaagaaccgcgttgagtacatcttcattgcagaatactacacctacatttctcgaattcttcatcgagttggaatacttgaactgaagaccctttctttcggcatgataacctgaaaattggacaaacgaaacaaaattaaaccgaagttccactgaatacatgatacaaaccgaagtgtttgcagggtgaagctttttgcacttcttttccccaatctgtatgcagtgtgatgaagaggagcatccctactttactgatactgccacacacaatgccaagccaaagaccctgttttatggaaacagctagcaggttcaatcatctggtttcacaatgcatcatcatcatacaaagctacaccggaacttttctatgaatcagcaaaaaaacaatctgcactgcatattttgcataagggattgagggagtagtgctacctctccatttagatggaggacaaatgcaagaagcacagccgtcggaataccaaccaagtaaaacgcgccaagattcacatgagcgccaatcttctgcttaccacatcctgtcaaaactcctgaaatgttccgaggtccacgcaattttattactactgatcgacttaacgatatgaactatccgaaaaactcatcgatcgataatgagaaaaaaaagtacagctaaaatgttttgataattgatcgcaagtagaaatatggtatggatttgcacctgaaagagcaccattgatgccatctacgaagaaggagaccgcgaggatggggagcatacttgcaatgtatgccaccacttcctcctcgttgctgtaggcgtatccccagacattgcgcagcagaatcatggctatcactagcacgaggcatacaagcactgtcatggctgtggccactcgcactgccatccttgctgctcgaggatgcccgccacctagttcgttcgagacgcgtgtgctgcgaaagtgcaaaattggtggaactaatcagttcattgtctaatccaatgacatgaaagctgaaggaagaaaagcatgtttgccatgtaaataaaacttaagtagtacaagggtaaactgaatttggtcaaaacttatttaaactaagaaggcagcccgggcatatgtgcgggctttccattttaatgttctgtaaaacaaatattagagtaaagttaatattcaatttcgaatgggttttagttgagatgatattttattttattttattttaaacttcagagatctctcaaaaaggtatttgggattgctttcaacattggttatgactgcattgcaattactgtaggaacacgtggattgtaaactaaaattacttgaaactgtgaaatctttattttatggaatttttaccactactacatgctacgaacttatgggtacgcatagcacatatcctgtcaccattaccacaaccacttctaggacacttgggtgagcaagtccctcattctccatcgccacgctttataaactgctaaacaatgcatttcgtgcaaaaatctttctatatagaagtttctttaaacagataaaacaaatatacaatggttagtagttacgtaatcactcgctaatgacctttgtagattttgtgccatggaaaatctcacctgagttgttgaaatgaaagtgtccttaaacaatgcaccatactatatgctacaaacggtggtaaggtgttacacataagctatttctatgataccaaaggcaagacatgctttgtacgaccccgatatgatgctcggatcatcatctatcctttattcattatttgactaaagactatagtgaatttaaaaggatggatgagggaacatggtcggattcataaaaataatggcacaaccaattcgtgcataaggcatctcaatattgaagtcaactgactatgtgtaatttcatggtaaaagagagaactttgttaagtttttttaaaagacattagatatataaccatgtataataattgttctataccgatttatgtaaaaaaaaggaagccagatgtttttcttctcttatactaagaatttataggatttccaattttgttggaagtatcaagagaagttctagatgtcttaggagggattagagtgtgtttaatggacattgaggagattttctcgaaattctagggagttggccgcttacttggatgaccatccttttgaatgttattgcaaaattattttaaaaattggacatgtaaattaaggataaattgaaggtcggatgatttctcttttaaataaatgcctgtaattctctttctcaacaaacaccaaaaaactttcatcgtctattagataaaagatagattatataagtacaaacatacatcatatatattagtcatgctagaaacatttgtgtggatggatgttttcatttataccagcctactctttaatcctttttcctatatagttggtacccactacaagttattcatgctataaagctcaaattctgtgaggccacatcatcaagattatattgattattatatcatctcgcgtctatgcaaatcaaccgttaaatcaagttcttctcagccaatggcatgtgagaggaccaatgctttttgtcttcctcttaattacctcatgcatatcattatatctccctttattactaaccactaaacaatacatctcccacaggaagcctacaccactacatttgtgtctacctctttcttattccctttaatttttctattgcatctactagccatatctaggctgatgcaatggattttcttggaatatttatgcttgaacatgcttcctcagtcatctaaggaggaaatgtcaatggtccaatgaaattttggtttgccactgtcatagatgacatcgaaaatttattgggacatattacaacactcgatgatctttacaaattgcaaggatatctatatatgtctatctcctatggtgattggtttttggtattctatcatgatcttgcttcttttcatatctgatttcttcgtttatcaccaagcttcatatgtcaatgtatcacaactatggtaacttaaagtattgagggattggtccactctttgtgttaaaaggctgattaaaaggctgtgccaaatctttgtgtttttcagacttgcgatcactgaatttgtttctccacaattcctcccatttactcataggtgaacatgctgtttcttgaaattactagattcatgcacccaatatgtttttttaagatcatataccaacatatgtatgcaacattatccatattttctctttgttttctcaaaaaagaaatatttcattagttgtttaatatatctgagtgagatcttaagccaatttagtacataataaaaatagtgtcatgtttgcttactatttatggttcttcaaaataggagtatcttaattggaatcatgtcatttctattcatatagcaatacaatgtacagatagaacgttcaagcatgttgatcatgcaattatgataaatttacaactatatgttcccttctatgtaatgatactataccaataatcaaaagttctagaattacatcttacaaattcacgatatagctatcccgcagcaacgtgcagggtatcaactaattggtacttatgcttactcctactttcttagtatctatacacatgacatgcaagatgcataagatgttaaatttgtgcaaagtaagaaatatcggtgttcttttgcgattaattagaacatcgttatttaggcacatgacgtagtgatgaccaaattaaagatgaaattatgggagggtttttttttccctttatcagaattccaacattaattttcatatttttacctcagtttttttttaaaaaaatctatgggttttggatttataagcaaacccattgaaaaaatctagatggatagatttgtggagctacgaatatccagttaaaaaaaatcatgaatccaaaacaatattaaacatgcctttttttcagccttaacctattagcatctaatgggcagttgtgactcagttgctccatacatatggatatatacatggcactaatatttgggggtatagtagactgagccctacatattaatggttttatcggaagaatataactaattataaagagtagaggatattcgataaatatttatggtatagtagaatattctattttttataatccttaaaaaatggattttgataggaaaaaaatacttcccataaatttaaactgttattttttttccaaattttctatatttttctccttttttagactctctactaaagggtctctcatagacttttagggatcagtagcacaaggtttttttatccgtgttagaatatatttttattaccattggaacatggccaaattgcattctgtaggacgcttgttcctttcaaaagggagcgaacagaaatacactaatcggacagaacaaaaggttaggagtagaaagataccgatgagttctgatttctctgatgaacgagaaaaggtaaagtgaacagctgtgacgctacggagataataaaacccagttaatcgtgaactatatatatacgtacattcatctagaggactgcaattttgctcccatcgtgaactatataactgcagattgtttggaaacttggagaagctgtggtgccagcactgaattaacgtgagtactagctgatagcctgatatacctcgtgtacagatgggagcaccatgccggtcaaccggtgcaggcccacatcattatacacgatggtttcgattttacttaaagcggagaaataagaggagaggatgcagggtggccgtgcccatagtaagggggtgtttagggcaatagcagtataagctatggggcccttacccctagcccaaagtcacagctcaaagacacacatcccacagtgcaagtacccatatatgtgtggctaaatgggatgaaggtactatatatggaaagaaacccagcccacagtgggcgttacccgaggcgagtggtcatgaggagcggaacgaattaattcctaacctacccttccagcgactcctctcccagcccttcccctccccccaatccgccgcacccgccgctcctcgtcctcccaatccgccacacccaccgctcctcctcctcgtctactgtggcgctccgctccggccgcctcttctcccgtcgacggcgccgcctcgtcccggtcagccgcgccgcctcgtctcccgtcgaccacgccgcctcgcctcccggttgaccgcgccgcctcgccgaccggcaagggcaagggggaggaggaggatgaggaggtgggggagtagatccagcgagcggcgaggaagagggccgacggttcttgttcagccgcgcgagcggccgccggttcttggcggcgggaggcgtcccggctgccgcgggcccgtggcggcgtcggccaccacagcccgcgccgccgctcctcctcccggtccgccgcgcctcctcgcctcccacgccgcggggaggagggagcaagaaggcgtcgccacccactgcacgcggcggcggcgagaaggaggaggagtaggaggtggggcagtagatctggcggtcggccaccaccaccggcctcgccgctgcccaccgccgatcctgaccctgccggcgccgccgctgtcagctccgtcaagaaatcaagaagcgaatcactgttcttaatatttttgcatgttctgttctccagttcttgatgagaaaaatcaagaactgctctcctgttcttatctttgcttgtcatgtgtatcttcagttcttgtgatgtttgttcctgtgatcctactcctatctatacttgcttgtcatgttcttatcttcggttcttcgtttttcttgctttttcttgattcggtggcgggaggaagaatggttgtggcgggaggggaaatcgctggggcgggatggggtttttcgtgggcgaatcaggaatttcttcactggatgcggcatgaggtcacgacgcggcaaagaaccgaagcccacagcgcaggctcctctcgtttttttggccgcgcgtggactcgagcaaacaagttctgcgtcgctcagtatggacgcgaagagcctaacttggtcgcgggcactcgtttcacatcggacaaaatcctccgtggcaccccatagcaccggtcctaggtggagcactgtgaaaggcccttagatccaggggatataaagtattggtgtgtcacatcagatattatatagggtgtcatatggggtgttcggaccctaataaaaaaataattgcagtatccgtcattaaaccacgagacgaatttattaagcctaattaatccgtcggtaccacatgtttactgtagcaccacatttttaaatcatggagcaataaagcttaatagattcgtctcgcaaagtagtcgcaatatgtgtaattagttatttttttagcctatatttgatacttcatacaggtgttcaaacattcgatgtgacagggtgtaaaattttgggtaagaatctaaacaagctctaagatagaggggatcggaatttgttttcatattttagggataacatcaagtggttaaaaataacaggtccaccaatataagtgacaattaatggtaagatttttttcttcttcttagaatttttaattagtatttttttttgtaatttattaaaatgacatgtggtggtttaggaacgtttgtaggaatcccacgtgacggcatgagagcgtttgtaggaaatttaatgaacctttagtatataatagataatagataggtagattgatagatttcaaatatcgtcgttcagaaattttggggaatttagaagatttcaaaaatctcagtcccacaaccccacaaaaaaaatacaaaaagtgcaagacaaaattgcgaaccctgtatgagaacaactcagtagggcactgttctaaaagatgataatgaagtaatggagtttagaggcgatacagaccttaaagatgagccaatgccacgtggcaccatgatcaggagagaagcagtgctcaagctgcaaattaaattggagttaacaaattacccatgggaaggaggagagctgatttgtatgtgtgttgcttatgatcaaattacctgattgacagaacagcagtttcaagctgaggattcggcagaatgccagagagcagcacaagtatctcaaacgacgaccactccaagctgcacacaaccaaatcaaccagctaatcctcacaaaaatattcccaaaatttgttcaagcaagattaatttgctctctcgatcacaaaacatgttccaagatttgctcaagcaagcaagaaaccagcgatggtgttgaaagattccaaacaatctgcaagcaagcaaacaagatttcctcggcttgtttggtaattcgagggaaggggattgggagtttatacgagagaattgatgattagattaagatggaaatttgatttttaatcccaatatcttgtttggtagaggtgatgaaaattggtagggagtttagttagagattaggtcattaataaaaacggatagctgagatttgcttagagaaagtaaaggaggaattctctcacaattacctgcccctacgcgggtattgaaaaggagagagttccttcctcaattctccatccccatcccactaaaattcccatgtctctcaactaaacaaaacacttaatagcctcatccctctaaactcacaatctcttctaaaaactccatccaagaaagcagagagacacttgatgggtacatagggctccttgaccaggtcaaagccaccacggagagtgctggacgtggtgctgccgtattgctactgttgctaatgttgtgcatcatttttgtttcttcccgttcaaagaacgagtttgcatcgcccaccgccttatcgacatctgcacgtctccgacatcggcatcgactccaactttctcttcatcatctagccccacgcaactttggcttgatcatccgttcaaacgcctggctacgacgagatcttgctgccgatcatctacgagcaagtctactacgctatcaaactccgggttgccactgcgttgccccctcgggctacagtgccaccgccccgtgatctacctgtactggttgttacagtgctaagagacgccctttttagcatggctttatcaccagtggacttctcgccgttgcatcgatatggagctgcagctatatgttgtcctcttggacaacagcttcaccgctttcgtcgtcttcattgccgttcgagcatcaacaatttcgtgttcgcactggtcatcgccagctactcgggttcttttttgtctacttcgagcatagccaccgtgtctctaagttgccaccgtcgccgctctaagccggtggtccaactacttctaaatggctggcatgcaattaaataaaaattacaacctacttctattccacaccagaggcttgagggggcccttacgtgagggggagtgttggaatataaagtgaattgcccatcattcttcatcagcttaagcttttaggttgaactagtcagtgcatacaactcaataaatggtgtcaggcgtgccactgaccagaccatcatggcggacggcacggcgagctcggtgaaccggcggagctccctgaaggcgttcatggagaacccggtccacgtcgtcttgcaggcgccggacagccgcgcgtagaaggcgaggacggcgaagttggtccagtacgtcacggcaccgctcagcgcagcgcccttgctccccatgccggccttgtgcaccagcgcccagcacacggcaacgtgggcgaccgccgccacgccggagctcgccatcaccggcacgacgatgccctgcgcctgcaggaaccggagggcgcaggcgagcggcacgtaggccgcgagcgacgggatcatccaccgcgcgtacgcgccagcctcggccgcgatggccgggtcctgcccgaagaggaggaggatctcgccggcgctggcccagacgagcgcgatggggacggcggccgccgcgagcaccagcatggcgcgctgcgcgtagacgccgagcagccggtgctgccccgcgccgtacgcctgcccgcacagcgtgtccagcgcgctcgacatgccggactgatcagatcatcccaccgagaaatcagttacaaattcgaccaagaaatcggagagacaatgcagttattgcgtgcaagcaaggtgttcaacgggtgcgtacgaggaggctgaagccggtgacgctggcgagcgacgcggcgagggaggaaccggcgagctggagctcgccgaggtggccgacgaacatgacggacaccatctggaccgagttccgcagcacgaagccggccatcagaggcccagcgagacgcagcagcctcttcacctccgccgccgtcgacgccatggctccgtcctcgccatctccgccgcgtcggacggcgagcagtggctcctccacggttgactcgtccatgtcgatcgaatcaccaactgtgagacgtttattgggctgaaaatggtggattcgttgaatcgttgtccaacttatagggatgagcatataagttagtgtgttcatgggtttgatatgtttcgtttgtggcggtcaaatcggagaggagtgattctttttaccctccacatgcaggcattccatcattgtttaagagtaaatcttatcacacttattttatggtgcaagttacataaattaattataggatttttttagtccaagttacataaattatacgaattttggtacgtgactataaaattttagtaaaccacaccgttaactattttagacatattcctatatgaaaattttaaaaatagatgtagcatttgtttgatcaaaataaaaatgactaactgtgtatttatgtgaaactttagaaacataatacgtattatcatgtgctacatatcaaaatcattgtggttttatacagcttggatcataatagattcggttttatgaaatttactctcgaagagaaaattttatttaacatcataatacattatcgttgactaagatggtctcatataccatggtcacgagtgttaatgtaatcaaaatggcaagaaatatagtgtgaaatcatcaaattttacgggcaataatggaacagtggctgccagggtttgtgtgtggaaaaggtagtccagtatttgtggaccagaaatcaggaaagaatattcaaaggggaaaagttttagtttgagagaaatagaatagtgggattactttgtgagagcgcttttcaaaagtgacaaagatggttttgtatgtgacttaattatcaaaatgactaactgtgtggttttgtgaaactttagaaacataatacttgacattgtgtcacatatcaaaattattatggttttatgcagcttggaccatgatagattcggttttttgaaatttatactcttgaagagtaaattttatttaacatcataatgcattatcattgactaatatggtttcttataccatggtcaggagtgctaatataatcaaaatggcagcaaatatatagtgtgaaatcatcaaattttatgggcaatgatggaacagtggtgccagggtttgggtgtggaaaattaaggtagtcgcgatccagtgtatggaaaattactgaaaatcaggaaagaatattcaaaggggaaaaattttattttgagagaaacagagcagtgggattactttgtgagaacacttcagaagtgaccaagatggttttgaatgtaacttaatcattgtgtgatatctaaaaaccgaaaaactggtcagagtgttaattagtaatgagcgggaaaatactggggatgttccttgggctgatgtttgcaagctgaggctgaagactgaagagagtggatatttgtccaacctatagggagttaattaattaattaattaattaaagtggaactcggaatgtgtttggacggattcgattcgatccgtggaagggacctagaaacgcactactgaagattcttgcgtttagtcactcagttgacgtgttgacttgttttgtttgtaccgctcaaatcgtggttgccaaggcacaataccgctctgatgtcgtttgcatgctaattaatcatttgtaggtctcattataataaatacgacatgtgtgttgtttggtcttagatcagtccgcaattttgactcaaaagaaagtttgactttctatcttggggtgcaagtctgaatctccagcaaaattgtagtaggacttgggaatgaaacaggacaaaacagaaagcacctgcataacatattttgcgtatgaccgattattccgatagtgttgttgtgagtagacatgtgaagctcatagcccccagggaactggctcatagcctcgtagcctcacggaactgtctatatatcactccaaagatttttttttaaaaaaaaagaaatcacgagtataattacaatgtaataacaatgtaattttactataattgaaccagttgtatgcaaattaaaacaagatcactcgctggtttgcagatgcgcaatgacctcaactgagaggcacacatctcaacgcaaattatacggtccagaaatcaagtggtagctaaaaaatatattgtttcgaataatatatagcaaaatcaaaacctcaaaggtgaaatgaataaaactagactgcgattttttatcacctccatcacatcctaaatatataagtgatcatgcccctctctgatgtgaccatggctactatagatataaccgtcgttcacatcaaaatcaagccgtccaagttctgcaatccagttcggccacctgctacagtgtctacttcaaacggccgccaaaaatgcatgcgagctccgttttgggtccatgagtacttgctggaaagctctcggagtcatctttccaatggatccagcttcatcgccaaattccatcctagtcggccgaaatcacaaaaagaaggtgctgcgtcacctataatgggcctatgggcttgtaacttcgtctgggaccccggcccaagtggggtgcgccccaaccaggtggagcatgaccctagggttcccttaggtcgtcctcccacctccttaaatagttaggtacccctttagagtttcttgggttttgtttagatgaaagtttagccattgctacttcgcttgcagcgcgtgtgtcggctagaccgtccgtctgcttgtattcgaaaccccaacttatcgtgtgtattcattcctatttgcaattcagattgtttttatcttgttcttgcttgtttctttgatttgcttgcaggaataaggttgatctgcaccggcaagatcaacaacccacggagaggtgtatcgatcgctaaggcgcaacacaacgtctcgtacggttgtagtcggatcgtcaacgtttctcccaaatcgtagttatcacaactcaccgaaagatcaggccaacaacagccttgagtgtcgagaggaactcagggttcatcactctccattcgttttcaaatacaagcggctttgatatcccgttagtacgcctgtgataatcttgtttacacccaaatttggcacctaggagtaagataggaaaaattgccaaattttagaaatctgccggtttcctccgagtaggccagtctgaccgccgtgtgttggccggtcagaccgccggttgagggccggtcagaccagcggcatgtggatggtctgaccggcaggtccgagtccgagtgtgtgtttcgccgggtctcgaagttttcttgcttgaaaaggcatgtttcaggtttcctttggattctatcccgagatggacggggaggagagcctatagagggcaagaccaacccctatataagggacatggccggttcaattataacagatcaatctacaatcaatcaatcgaatcgtttttcatattgcttttagtttttgctttagttcatccatctttgtcgatttgcgctgtaaatcgttcgccggcgctgcgagagtgcgacatctctttgtaggtttgtcctgaaaatcttcaattttgcccacgagacgggtagttatctaaaaatcggctccgctagccggtttagttatcaaaacccatcttggtctagtttttgctagattaaggtggttggcgactctaggattaccgcaaggcgttaagtgctgcgatcgtggttgtcaacttgtcacaaaaaattaccaactatttctacagatatctaaagataggctagttgctcagccatttacaaaacaggttttggccgactgcaaggacagttcctgtagtagtggatctaactgacaaatatggtttacaacatatttttccacgaagtttgattcgtttagtttattttgctcttcatgtttgtcggtctatcatcgctggctatttcgtcctcaatgatgatctaagaagacttgtttgggttaaaaagaataaaaaggaaggtagtttgtgtatatcttattgatcagtgtgttgccgtatttaattatagtccgagtcaccgatttgtttggtgatgccgctttgatgatttctcaaaaatggaacgaagatgggtggctgatccttcttttcatttacttttgcgcgagccaaaattggctaggttcgtggctatgctcgtctgctggcataacggagtatttatgaaaaatcctgaaattttcaataaaatcaaccatatctctctaagaaaaacattaccatcacatcacatcagatattatagttggcctataattctatacttggcaagcaagttccaccacgtgcaaaacagtaaattgattttttttaaagagaataaaatatctttagaactcgcgaccggctgcctgcttgcgtggaactttccaaaacatttcactgcagctgaaccctataaacagacttccggacgtcctgtcatcttctcaacttcactgtttcatcacaatctttagacttgagaattagggcctatttagttccgaaacaaaattttcacagtgtcatattgaatgttttgacacatgcatgaattattaaatgtagacaaaaaaaacaaattatatagttcgtcaggaaattgtgagaaatcttttaagcctaattacgtcataatttgataatatggtgctacagtaaacatttgctaatgacggattaattaggcttaaaaaattcgtttcgcagtttcatggtggaatttataatttgttttgttattagactacgttcaatacttgaaatgtgtgtccgtatatccgatgtaacatgtgtgagcaaatttttttccaactgaacaagcccttagcggaatacttaggctgtgtttgtttccttcttttcccaacccacgtctctcattttccacacccactcttttttagaccgctaaacggtgtattttataaaaattttgtacacgaaagttgcttaaaaaattatattaatatatttgttttaaaaaaatagctaatatttaattagttatacgttgagtcactccgttttacgtattagagggatcagttcccatgtctagcctctaggaaacttagttgatatatagcctgatacagataggctgatacgcatggacaagccactaagccagccgccgaggcggaggcgccgctgctcggcgcgctcgccaatcacaagcaacgcgagagcaccgcggcagcggaggccaagagactggtgagcctggcggcgccgctggtggcgagctgcatgctgtagaacatcatccagatggtgcccccgtcatgttcgtcggccggcccgcctcctcgcctcgtcgctcaccaacttcaccggcttccgccttctcgtaagtattggtcgaacaccttgctcgcgtacaagaagtgtctaatctctgcaattttcttggtcgattttgatcatcagttcggcgtatggcgagcgcgctggacacgcgccgaacgcgctggacacgcgctgtgcgggcaggcgttcggcgccgggcggcattgccttctcggtgtccacactccacaattcaggcccatatgtgttctgaatgactgtttaaattcatcagtaagtgtgtttgtaatagacttactgagatagctggagatgtcattttcccaacccatactgcttttatacctggaaggctgtgtgattatacatgaggtgctccatgagatgaaaagaaagaatctggaaggaattattttgaaaattgatttcgaaaaagcatacgacaaggtgagttgggacttcttgatagaggtgatggttagaaaaggcttccctagcaagtgggttaactggattaaaacctgtgtcatgggtggtagaatgtgtattaacattaatggagagaggactgatttctttaggacctttagagggacttagacaaggtgaccccctctccccgcttctctttaacttggttagtgatgccctagctgcaatgttggatagtgccaaaagggaaggggtcctcagtggcttagtttctgatatttttcctaggggtatcacccacctccaatataccgatgatactgttctctttgttgctaatgatgataagcaaatagtggctacaaaattcattctctactgctttgaagagatggctggcctaaaggttaattaccacaagagtgagatttttaccttgggtctgtctgacaatgatactaacagagttgccatgatgtttaattgtccggtgggtcagttcccaataaagtaccttggtttacctattggccctgacaaaatcctaaaccttggttttgatttcctgggccaaaaacttgagaagagattgaattcttgggggaataatctgtcccatgctggaagagctgttcaaattaatgcctgtctctcttcaatcccttcctatgccatgggtttctaccaacttcctgagggagtccaccaaaaatttgatagcattagagggagatattattgggctggaaacaaactgaaggggaaataccatatggtaaagtgggaggatctggctttcccctaagattatggtggcctgggtttcactgagactaggagaatgaacattgccctcttggccaagtggatcatgaaaattgaatttgaagatgatagcctctgtatagagttattgagaaggaaatacctgcatgatggggggttcttccaatgtaaagagagatatgcttcccaattctggaaaggtttgctaaatattagaagatggctgagcctggggtctgtgtggcaagtgggagacggctcacacatcagcttctggagagatgtctggtggggcaataccctctgaggatcctgtttcctgcaatttttgctgtttgcaatcaacaggagattttagtgtctcaggtcaaagaggggggtctggattgcttgtcttgtaggaggtccttttgtcctgaggagatttcagagattgaaaggacctatgaaagaagtcataggaaatattgaaacttctgattccagagattgtttaggttggggcctgtcagctaataaaacctacaccaccaaatccctcaatagagccctgacttttagaggtattagagaggtaaacactgagatttggagatgcccttgccctatgaagattaaacatttcctctggttagctctcaaagatagaattcaggctgctgagcaactgaaaaagagaggttgggatggatcagagttctgccagctctgtgatgttttggaaacaactaatcacattctttttaactgtgatatggctagatttgtttagtgtttttgccgagatgtcctcaattggaataccattcctagaaactttgatgatttcttttctctttgcaatggggtttcagaccatactcaacttagaatcatttttagtctgttagctgctatttgttggaatctctggattacaagaaataacatggtgtttagagagaaactggtctattctccactaactattccttttcaaattatttctaatcttttgcagtggagaaaactctttcgttctgaggaagaatgcaagctggacgcgctggtggaaaggatccgccagcgcgtctgggccaacgacggcgagatccgccagcgcgtcgaccaggacgcggacatcgccgccgaggccggcgccaacgcgcgctggaccatcctatcgctcgtacgtcccctaccacatccggttcctgcaggtgcagagcgtcgtcgtgccggtgatggccagctccgccgccacggcgatctgccacgtcgccgtgtgctgggcactggtgttcaaggccgggatggggagcaggggcgccgcgggcgctgagcattgccatcttgtactgcatgtctgcatcaacctcgctatgcttgctctctatgtcaggctcccagctgcagggagacatggacggggttctccatggatgcgttcagggagctccggcgattcaccgagcttgccataccatcggccatgatggtttggagtggtttggattattccaggtgttgtttcgatgggcctcaatctcgatccattcacatgtgtgggccgggaatgtgaactaagttccaaacccatatatgtcgatggcaatgggcttgaatagaaaatgatatagagaccgagcgcttgctcgggtggcaagcgtcgccggtgggcacgctgcccgcgagcgttcgaacttcgaacaccaggttcgacactcgtgctcgcccgggggaatttttcccctctttccccgggtctaacttcggttggacccggctaggtaatagggtacacacacgtgtgcgcgtttagtgggactgcacgtttcccatgcactgaggcccagtgcctccaatctcatttctagcgtgtgttagggacacgcacgcgtgtgtatgagtgtggtgtgtgtaagtgtgtattcccttctaaaaaaaagaatagaaaataatataagttgagttttcacaatgcaatctttggttacttgatttatgaacaagtctttttttttgtgtgtgcagcatggagtggtggtcatttgaattagttgtgctgctctctgggcttcttcccaatcctaagcttgaaacctcagcgttgtcaatatggtatgcgatgaaccctaagattattaattgcatataccataaaggaactaattatcgaaatacatcttcctcttttctactttctcacttgttaattatgtagtctcaacaccggttctctgatgtttatggtgccatttggtctctgcacagccataaggtatgaaattctcactcagttctgaatattcatttaaatatatgttccatgtttcactcaatcaattctgaatatccatttacatatgttccaaatttttctgtacatagtctgattgatttcctttttaaattttcattggtagcacgcgtgtgtcgaacgaacttggagcagggaagccttaagctgcaacgctgggaacaagagttgtcatttgtatggccttgtcttaagggtttatcatcacctgcacgatgattttgctacgcaatttgtggggatatatgtacagcaatgaggctgaagttgtcaaatactttgctcgttctcacgatatcctttttcatgatttctactgtgtaagtagagaataccggagcgtaactctaattgagaacaccacttcgtctgagttttatcagcatctctttaagaaagttaaaacgaataatatcttccaatacaaatcaaattagttacggcaagtccttcagatgaaatccaagttactatattaccgacacataaatcaagtccaaatgtccaatggcacaaatatagtcaaatcgagcatctgtgacaaggtttttttttttgtaacggaattgctaaagctctatcaacagaaaatccaacctcaaatcttgcaaattttggatcactggatgtggttcacgattcgtgctcttcttctccaactccggcaaccacctcttcttctccggcaccggcgaacccaaactccggtagagggccgacgaattagggttccggggtggggtggggctgggaaggggaagggggaggaggaaggcgggggagttcgccggctttagaggaatggccgtgggaggcggcagcccggcggtgggcggcgcatcgggcgggcggcgaggcggcggcggcgccgccgaagccgcagggtcaggagcaggcggcgggagcaaagcggaaagagtggtaggaggaggcggccggtggtggcaccccgccgccggcgacggggaagacgacggacagctcgccgctgccggcttgaggcaaaggagaggagaaggagggggaaggggagggggagggggccggccggggtggcctcgccggcactgttgacacctttcggccagccggcgaggccgggcggcagcacgctggggtgacggcggcggtggcggaggtggggggaagcactaaggagcggcggcgtgaagaatcgggaatggagagaggagagaggatttttagggtttggttgcctgcacgaatcttaaagcaatcggatgctccaaaatttgcaagatttgtaagggggttttctgtcaaatgatctatagacaatcccttttcgtaatggattatagtccgaaactctgtgagatgatgtagaagacaatgaagtaattgtatcactggaggagaaaccgtttgtagtcccgggtggtaaccccctttagtcccggttgtccaaccgggactacgaatccgggactaaagataaaaataaccgggactaaagattgatctttagtcccggttcgtattaccaaccgggactaaagatcggtcagccacgtggccggccaaaccatctttagtcccggtttgtgttaccaaccgggactaaagatcggtgcaccatttttttatttgcatggccctgtttgctgcatggttgattttatatatatatatatatatatatatatatatatttatatatatatatatgtgtgtgtgtatgcatatgtgtatatgtataaatcatatattacacacatatgtataatttaaagcacttaacattttatgtgcatatatgttaccaaaatatatattaacactaaagtaaatgtgtacatatataaatatatatatacatgcatatatagtacaattcatttgctcggtagctatagctacgacttcgacgccggcgttatgtcagaagaggaaggaccggcgttatgaattgtcaatccatcgtagtagaattcaccatcaggattaaggacttcttcgttgatgaatcccatcagttgttcttgaacagccgtgataaaatccttgtgtgggagattatccctcatgtgaatacgctatcattcgaaaaataatgacatatcaatatatgaaattaataaacaacttaacaaatcgatacgcaatgaaattttgaatggtttatgtatacgtacatcgagctctcgtgttgtgcacatttggtttgataggcagtgggcatactcagtagccgcataagttagttccctggtcctgctttgcacactacatgagaaacgatgagagatttaatatactctttatattaactgtaattagagattcaattcaatataattttggatcatgcatgtactcactggaaaatgaaacctccgtccaagtttttctttctaagtcccgcagaccaattgacggaaccgatcccaagccctacatatgcagttgtaagctatgattaattaattattacccgagatcaatataatagcaatagattccccgcgactttggaatagatgacattatattacatgtctatcagttggaagaccttgtcaaaaatcgtctcctctttattcattgagtcgtacatagtggctctgcatgcgtccaagttgaagaataacaggacccggtggaatctggaatatgcgtgagatgagatatatatgaaaatatacatgctatatgtatgggaacgaaatttgtttgaacgacaataaaaactcactctatgttgtacggcagtagtatgtacgtcttgaaatgctgctgcgttaggagatggacgagattgtcctctgtgtctttcttgtacttgtcgatcatttcggtgttgattttccaaggatcgatgaacccagtatcgtagaccctccgccgtcgggccctttgaatctccattctacaacgttgaaaggaaattattattgcttacatatatgccaggagctaattattgaacgaaacaaattgaactcaaagatactcacaaaatccatgcgctcagaagagagacgtcgagagcgtccagatggtacagatcgaagagatccttgaaatggatccagagaacatcttctccttgcaagaagtcagggtttctgatcctcgctccgaacatctctctacccttggcgctcatttccatgtaccgttcatggaatttgtacatctgtgtcggtagggactgcagctgctcaggcgtgacaagcggtttaccgagttcaaacttgtatgccacttccgcctttgggataggtgcgcctcgaatcagctgatccacagttagaccggtgtctgaaatgaattctgttatgccaaaatcttcgccggtcaccaacggctcgacctcttggtttggttgttctccaagctgagggactggtttggacttcttgtgataggctctctgaagtgttcggtcatagtccgatatctgtaaggcctccttgtttgttgcggacattcacttgaagaagttcttctcgctcgggtcaataggtatcttcttttcaggactccgaggcttgagttgcctcttcacttctcctgccacataagcatcaagctcctcttgactgcaatcgtacggtggctccttgtttttggtggcgtcaactttcgccttcttcgttgcccttgtgcgggcaggcggtggagcttggcgagaccttgtcttgggaggtgcaggcggacacggtggaggcggaggaggcggaggagctggaggagccggaggagatggtgcaagaggaggtggcggaggagccggaggagatggtgcaggaggacgtggcggaggaactggaggagatggtgcaggaggagatggcggagccggaggagatggtgcacgagacgccgcttgtcacccagggaggatgatgtaccgcttgtgccatagtataatggcgtggcttgtgtctcgtagatacgtctcaacgtctcctcctgggtagtccaactcgaggtcctcgtacgcggcttccaccagctcaacttcgaccctcgagtatcctgctggaatcggcctgcagtggtaagtcccagaagggtccgttgggatggccattcccgacgccacctttacgtgatgagaggttatctattagtaatcaacctaagcagtaacttgcggaatgtacaagtcaaaaatcatcaaactacgagcataccttgattgataagttcttgaagggaatatgcagctcacatggtgtccgctgcgtgatctcatcaatggggcaggtggtttcatcctgggtttgcatggcgtctatgctctgtgatcctacttgccccgttgaggcgcagctactacgattgcctgatgggctgaccattgcaggaggaatgtacggttggggatcctgggacagatgtgcggccatacgttcatccaccttcctcttgcatgctgagctcgtagctcaataccctgtactcaagatctgcaatcttcacctcggtatctttcttgctcctcatccgactcctgtacgtgtggatgtcctccttaaatccaatcttccagggaatcacgcctttccctcgtgttcgtcctggatgctcgggagtctgtagggcgagtaacagctcgtccttctctctgtcgggtcggaatgtgccctgagaagaggcttccactgcgtccgttagtcgactggcagcctcgcgtatctgatcgctgaagacaagggagccatcaactgggttaagcgttccaccgtgagcatagtaccagaacttcgatcgatccggccatttagcggtggccggttcgttacccctctcaatcaaacttgcctccatctcctcccacttcggcattgcgacgctatatccgcctgaccccaagtggtgatggtacttcttcttggcggcattttctttgtttctggccatcatcgcttgcccttgttgccctgtcttgtaagcaacgaactcgtcccaatgatcccttagctttgggaatacgtcgaagtttggtgttagtctcttcaggatgtatttcttgtagagatctcccttgaatctctggaactgttctgccatttttctttagagtccactgtttcactatgttctccgtacctgtgggtagcgtgaacgtctcgagcattgtggtccacagcatctctttctctgagtccgggacaaagctgtcattatccccgcgtgcccttgttctgtgccagtacaccgtgctgacaggcacgttgtccctcacaacccaaccgctgtggcgtacaaaattcttggctgcttctgctgggccactaggtcggccatcttcgtccacctcagttatgatgtgccgaccctctatcttcttcgcagcacctcgttgtccgcgtgccctcttctgtccagcggagggatgacttccactggcctcctcatcgttcccctcctcgttcccctccgcatccctctccacgttcccctcctcgttcaagtactggtttggatcctcgttcccctcttcttcgttctagtactggctgcttccctctgcgattatatcatacagtatatgttcctcatcgctatcagccatctgtgcatacaaaaaatatttgttagatctataggtcatatttgctaaccgtaatattaaaactctactaatcttatattaaatctctaataatcttatattaaaattgtaataatcatatatgctaagtctaacaatcttatactaaatcggtactaatctcatattaaaattgtaataatcatatatatatatgctaagtataacaatcttatattaaatcgctactaattttatattaaatctctactaatctcatattaaatcgccactaatcttatattaaaattgtaataatcatatatatatgctaagtctaacaatcttatataaatctctaacaatcttatattaaaattgtaataatcatatatgctaagtctaataatcttatattaaattgctactaatctcatattaaaattgtaataatcatatatatatgctaagtataacaatcttatattaaatcgctactaatcttatattaaatctctactaatctcatattaaatcgctactattcttatattaaaattgtaataatcatatatatatatgctaattctaacaatcttatattaaattgctaataatcttatattgaaaatgtaataatcaaatatgctaagtctaacatacttatattaaatcgctacaaatcttatattaaaattgtaataatcatatatgctaagtctaacaatcttatattaaatctctaataatcacttctttacatcacttgcctgcgcgaattccttcgatggctagctaccacttcggcttgaggaacgacgacgtcgtcttctctgcaacattaccaggaaaatgtattagtctaaacgggccaagttacatatatataatcatatatgtattaccaggaaaatgtattagtctaaacgcgttcgttctcacacttttagtacaagtgcattcacgatcgtaagcatttcgttcacgttcgttcacgctcgttccagttcgttaacgtttcgttcacgttcgtttgcatttcgttcacgttcgttaacgtttcgttcgcgttcgttcgcgttcgttcacgttcgttaagcgttcgttcacggtcgtccacgtatcgttcacgttcgttcgcgttcgttcacgttcgttcgcgttcggtcacgtttcaatcacgttcgttcatgttcagcaatgttgggcacgcgcggcagtggtgtggcggcgcggcggcggcgtcggggagccgtgggccggcccggcggcgtgcgggcgcggcggcggcatgccacggcgatggcgtgggggtccggcggcgtgggggcgcggcggcggcgtggagtcgcggcggcatggcgtagcggcccggcggcgtggcgagctcgaggcgggggcagcggcatggcagtggcgacggcgtcgtcggcggtgacggccgcgtcgaagtcggtcgtcggcggtggcggttgaccgcggtgtggcaatggcgtcaccaacgagctaggcggtttatagagagagagagatcgagaacgagagagagagagaggcagcggcggctctcacccaagagatgtggcggcggtgtctgcggcagaggcggcgaggaccgccaagcgacgacgagagacgacggcggcaagatagagcaagaatgattacaaccacagtactcagcaagtctcatcgggagatgcatgattaatgcaaaggagtacaaggggtaataatataggggttaggttttgcagtaaagagcatttaaaagacacttagttgcccaaagctattttataaacacgattctagagctacacaatattattaatcaaggccgtggaccctcacgaacctgccttaacccaaggcctacgatgattcggaccgaactggcaacccgacctgggtcccagctcgtcccaagccaacccaggccaaccattccacattttagttgttaagcaagttttaagaattaaaccactaacttggatacattgctaagcttgcccataaccgagcgcgaggctattcgaatagatttactctgatcagaggtgtacatctttacccacaagacacatctttacttcgcattccatggccttggaacccgttgtaaacatgtgacataacccttcacccatcctagccgtgaacaaaagtaccgacccaaccctgcctacggccggtatcccggacaagtaggccaggattgagcccctagcaacaggatctagaccgggtgcgccacacacattggggtgagaccacccgcgtactagtccagtgccatggcatctcgactaacgggcaccaacccatgtagccttcatttgcctagacatctcgattaccgagccgcagctcgtgtagccttcatttgcctcagagatatccatcatcgcaacgacttcatccacctctatccgtgtccttttgttcaggactagactgagcaccgagttaagccttacccattagacatgtggttagtatagtagtgctttgcaacagaggcccgaagaccggtccttatgatagccgaggtgctcctagcaaaaccatgcacctcgagcctagcctaaaaccattttggaagttttgaatagaggggggaggtgtgtgtcaattccatcacaagtcaaccatttcacaatgtcaaaatgatatgagaactcccaaagtctaaagttatgaaaccacctagtgttgcctaattaatcagcgaagcatctacataaattcatactagtggaaccatgaatagattacccactagttggggttttattttcctagggtgaacaaggtgataaataacaatagcaataataataaggtcataacaaaggttaataggcatggctaaataaaacaatgataacgcgggaatttaaataaagcgataattcattaatttaaatcaaaataattttataaactgggattcaatatgctcaaggataatgcgacttgccgtgctcagagagaacagccttccgaaccttcggcgatgaccgcgaacctcgctaaccgccggaacgacagaagctacgcggagaacacaagcaaagctacaagcctataaagaagcaataacaatacataaaaagaaagcgcagggttctttaggttataacaaacattaaaagacttgaactggtcgattcggagttcgtatgaccaaggcatggtcatctgaagcttaatgctgttatatggagatttgtggattattataattaggttttgcaactataaaaaatgtgtaagcgctagcctaaaaaagacaggaaggctgcgctgttgacatgcggaccccacatgtcatcctaaggaaccacgatagaccgagtacacagagacggtccatgggtcgacggaagcagaccccgtgtgtcaaccgaggcgagtggccgacaaatggactccactagacaccacgcgggctgcacacgtggaaaccatgcggctaccgagcgggcacactaacacggtcaccacacgcacacacgaacgactaccgacactggtacacgggtaccggggtcgataaccgcacaacgggcaaggggcaacaccgaaaagacgaggacggggcagcgggagaacggacccttaccaccacgtgatgaggcgtgggaacgacgacgacgaatggctcggtagagacggacggaaacgacggagatgaacggacgacactttggcggcgatccttggatgaaggcgagacgcggccgacgcaacgcttgacgacgcggagccgaggacgaagacaacgacggggctgcgacgcactcttgacgaaacgcgggcgacgaatgagcacggcttgacgaagggagggccgacgacgagcgggaacgacgagaagacgacgagggcagccggcagcagctgcacggagacgaggacggcgtggaacgcgccactgcgttgtcgacgatggaggcggcgccacgggacgacgagccgacggagaggaacggccgaccggaggagacgttggcgaggacgaccggcgcggtggcctccgggcaaagacgggcagcggtcggggtagaggacgacgcggcgacattgtggtaggatggcgacgatgacagccgctgcactggtgaggcggcacaggcggctggaggcggtggagtggtggcgacaccactggtcattggcgaggacgcgtctccggtggtttccccgcgaaacggaggcgatgccggggaagaggatgcacctgcgaggccgagggtggcgacggcgcacggtcgtggtgggaggtgcggctggaggttggccggcgccggagagagagaaggagaaggcggggagaggcggggcggccacgggagagcgcgggagggggctaaaactggagaacggaccgagggggttccattttataggatgggggagggagccgggcacgggagaggtgggaacggcagcggaaaagtcggccggtggccatggaaagcggccgggattggcgcgggcgttccgggtgattaaaagcacgaatcaagggggaaatatgggggaaagagagaggaataaatgggtattacttccccctatttaattttggaatctccggtttgaatgaggtggatttggaggagggaacgagctagggttcacgggagagagtgaggaggccgggcggctggaggaaggagacgacgaccggcgcgtgggccccacgcgggcgcgcggtcagcgcgcgtgcaacgcgggaggggagcggcttgggccaagagaaggagggagagaaggaaagggagagaaaaagagggaggaagggaggaagggaggagggggattatttttagtttttctttttagtaaactttgatagttgttgttgttgcttagtaattatttccggtgttctgaaaattcaaataaaatttgagggctccttttagaccaaggagaatttaacgaaaattcttcgggccacattcgaatttttcttgtacgcattttaatgtttgccaatttcttttcaaattttaattaattctattattccttttagagaatgatttttatttcgggatgaatttatcaggacgtgacaatgagggcgcaccaggaatatatatacccccagatctttagtcccagttggt

SEQ ID NO: 6398 - DNA, 1584 bp, Oryza sativa
cacgcaagcgcgagagccgcgccctgcgcctctccgctctgcccgcgcgcgtgcgcgtgagccgcccgcgcagccgcttggccccgcgagccagcgcgcgtgcccgagccgcgccactccatccgccgcgcctcccgttgcgagccgcgcgcgcgtgccggggtggccgaccgcccggtcgccgccgccgtcagcctctgcacgcgcctgtcaccagtctcgccgctccgctccaaaccgccccgccgtcatcgccgtcgtcatcgcccggccccgccactccgcgcgcaagccgccaagggacggaggcagcatccctcctccctctgccgcgtcgcccccgctcacctcctcctttttcccgaattggcaaaggggcaagccccatatctccccctccttttcccctttttctcctcgccggcgtcatcctccctgtcgccgctttggccgcgaccgccgagcgccagctcgcgcccttgaccgcgcaagtccgttcccaaaccgacattgccgcccatttaaaccccagcctcccctttcccttcctcttccattcgcctccgtgccattgccgccgctcccgtgctctgtctcgcctccgccgtccatcgccaagcgccgggagagccggtgcgttcgtggacgcggaaggggactccgggcgtgccctcttcttcctcttcctcggcccgaggccggagagatcactcccgcgccgtcggcctctcgtcaccgtgcccgtcccgcacggtagtgcctccctccgttcttcctcctcgctccatctccccacccccccttagctttcggtagtagctcgagtagcctccccgaagttagccggcgcagccccgaccgttgccgtcgctcgccgtgtgctcgccgccgtcgccgcccgagctcggaagcaccgctcgtcgccggcctcgctcggcgtagttccgcccaatccgacgctagcatcggattcccgtaaccgcgtagatgctctcgccgccgggaattagcccctagtgatctcgtcgccgtttcccccttctcccgccgccggttgccgccgccgcaatccgccgccgtcgagcaacccccggcaaatccgacccgttggttcgtctcccctcgtcacgtgcaaccgcccggtgtgctcgcttttacccgtatcgccgtggttcgctccgtcgctcgccgctgtcgaccgccgtccgttccggccggcgtcgtcgtctacctcccgccggcctgcgtggcagccacgtaggtgccacgtcggcgccagctcagcctagaccgggtcgagacgaccccggtcagtccctccccgtgcgcgcgttccaccgcgagccgtgaggctgagcgtgggcccgccgtacctgcgtccatcgcgaaccgcgtgcgtacaccacgtccatcctccaccctagcgccgcgccgcgtgctccctccgcacggtgagccgagccgctgacaagcaggtcccacccgggaccgcgcgtggtgcgcccggtccaccggactctctctccttcctccgcgcgcgctcgtcttgggccgccttgggccaccttcttgggccggccggcc

SEQ ID NO: 6399 - DNA, 7874 bp, Oryza sativa
ccccttccacccgcccacacttaactcattaatgcactgacttttcttcttaattaatacaattgatttgtgtctcctttgtggttaatccaacattttatgttttaaattaaaatatttcaattatcacttaattaaattgaaagttgtatttgcaattttctgaaaataccaacacaaatttgattctgcaaactacgtacaacacgtacgaccatatcaagtactggggtacaatacattatggtttatagcacttgttatatatagtatctgccaaaaggtcccccatcgggtcgtacaaaagtgatcttgacgatatcgacagttgatgattaattaatccctccttccaaaagtgtaagattaacttttttttttcgtccaagaccctgtttagatgggactaaaacttttaattccctactatcacattaaatgtttggacactaattataaatattaaacgtagactattaataaaacacatccataatcttggactaattcgcgtgacgaatctattgagtctaattaatccatgattagcctatgtgatgttacagtaaacattctctaattatgaattaattaggcttaaaaaatttgtctcgcaaattagctttcatttatgtaattagttttgtaagtagtatatatttaatactctaaattagtgtctaaatacaaagactaaagctaagtacctgaatctaaacaccacctaagactttggaggaattaactaatccacatgtaaaaaacccaaaaataatacgcaaagatgtaactaatgggtattaagatgcttactttatttcgataaacaatatatttaatttagcacaagactaacaatataactctatctcacttcgaaaagcaaaaaataaaatatacttaacacttttggatgaagggagtaatacactgcacaaacacagcagaggctgtaatatgtgtgagaaatttgccatgcatgtgacatcgttactttgtagcatgagttttaaatttagaatatttattttaaacatttcagtacgtgcagctcacagattgctgaaatagataatatatggagacaaatatattgtattcttgaaaggttgttgtcacggttaaatgcaaaaaagctaccgtgcgatcggtcgtgcgcggcgatcaggctccctcctcacattgctcccttttttttttaccatattacctattttagtaaggttatacacctaaagtttctatactcaaaatttatatacctaaagtatacacacctaaaatttgtatacctaacatctatatatctaaagtttacacaaaaaagtgtatatacctaaagtttacacatttaaagtttatatgttgaaagtttaaatatccgatcaagattatggattttgactcaaattaatgtttgacatataaatgttttatgcgatttattttagtttgtaattttatcgctgggcccacatggagcggcaaccacgtagcagggaagacgcgtagagattggaggcaagcggagcgatcgtgtgcgtgggcttttttctgttttaccatttcctgattgtgcatgcgtccatcccacaatcactcgcgtatcaggaggacctggttatatgcacgttctttattttcctgaaaactactttctaaaatgccacgcatgcccaagacgcgtgccgtgcgtttgagtagacttgacattcttctggctacctttggtatcgtattgtagctgatgcctggttgaactatcgtgctatgatcaattcaccatcttaactaatttcgttgtcactaccggagaactgatctttgctccaatgaaagatctttagtcctagttgataacatcaacccatactaaaaattgatctttagtctcagttgatgataccaacccggactaaagatattttttagtcccggttaatgttattaacccagacaaaagatgtctccatggttagtttaaaaagaaagcatctctacccaagtcagatgtgtgtagtaggaggcatggtaacgcgcgtgagggttgagataagagatcttaaattcgaatcccacatcccccatattttttttttgacttggtatgcatctttagtctcgtttatttcaatcgagactaaagatggattgtgcgtcctagttgcacaaccgagactaaaaatggttgcaaaccgggactaaagtccctttctccggcattgtgtgttcattaattagttagctgtgaagttaatttaggtgcatatatacagtaaaaataatatgatcagactttgtcattttctgtcttaaaattttttatgcataagtggtccaggctagatatagtaattgtaagtactatgcttgttcaagggagagaggacaatattcaattggattactgttggaggcatgtaggattgctatcaacgaaccgtttcaatgttaagctgttatggatagctatatagttaagagtattgtctggacaagataataatagtacctattttggcgtaattaagtacattttgaggttggtacgtatggaaatatacatatttccaacaatatcgatgtagctgtctagctacaatctaattataagctttaagttcagtaaacagtggccaatcaacttagtcttattctatattctgattttttcattacacaaaaaagaattataaaattttactactacacatactccctctcatattaacacaagggcaggaaacagcaatccatgttcaacatccgcgtgagcatacgagaagaccatgcatgcagccatgctcggtatctgatcaaatacgggtttcagaagtacgtatggcatgcatagaacaagagggactgtccatacttgccaatcactccacaggctgcaggctacagcgcgcctgcacgagatggatggagcctccgggctgcagctatctcctctccttttcccagtttgtgagtagtgatgttgtattgtgcaaaaactttcaagctttcacgctgcagttactacaaacggggaaaaggaaatatttgtttatatacataagcgctactcagaaagagtattgttttagttttaaaattgtttctcagaaagtgtgtttttgggtgaggtctactaattgacatgtttaatacttcatatcctttttcttctcgttttaaccatcgaaccagtacgttgtactccctgaacccaacataaccaaaacacacacaaatttttttgaataaaaaacacatacaaaattaaaaggattatgtatgcagacttaattagtataattgagtatcagcatcaacgaattaatgttgtaagcattaacactaattaaatatttggaccacttcctcttttgctttttgaaatgtggccaaggttaccaccaagtgtttagatttggcatatcagatgagaaacttcagatccttaaaatacatttcatttcatatagatgactgttacgtgcaggttactttctgggttgttgattaatttaatgcttgccctcctagtagattagacattttaacacgtatctatatatatgttacaggaagattaattaaacagcccatgcatatatataaacacgataatgcatctgattaattagtcatcactcatttgcacagggaggctgagccccaacatgaaaatgagaggagacatcctgatcaatggcctgcgagagaaactttcgtttggaacatccgtacgttttcacataaaatgcgatctcgaatgatttgaaacagtgtgatcttgacttgacacatgttcgtacatgcgttaatgaaggcctacgtgacccaagaaaacgtgctgatggcgacgctcacggtgacggaggccgtccactactcggcgcagctgcagctgccggactcgatgccggcggaagacaagcgggcccgcgccgaccgcgccatccgccagatggggctcggcgcggtcgccggcgtccggatcggcggccgggtgtgcaagggcatcagcggcgggcagcggaagcgggtgagcatctgcgtcgagctgctggcgtcgcccgcgctgctgttcctcgacgagccgacgagcgggctcgacagcgcggcgtcgtaccacgtcatgagccgcatcgccggcctcgccaggagggacgggatgacggtcgtcgccgccgtgcaccagcccagcacggagatgttcgagctcttccatggcctctgcctcctggccactgggaggacggtgtattttggagcagcttcagatgcaatcgaggtaacagtttgacatgtgcgactaacagtaataccgacatcaaggacctcatgagctagggatgcaagtagtcaatccctaaaaaaaatctgcttactaattcacttatcgtatggttatataaagtttgaaagaaaaaataactagaagtgagataagcggataagcgagcaaatcttgctaccaggcgattccattttcatcaccctaaccccatctcttagtgttttatgattgatatgccttagtaatttatataccactaaaagtattggaatgctaaaaaaatacctcccgaaatatatatagtactttatatgcatcaaattaaattgtaatatctgtctatagacgctagcctctgcagaggctagggcgactctttaagactatctatatatactatggacgtgactacacagctagtggtagctagctagtccatctataagagaccctatctacctatactttaaataaaattttctcttaaactactcatccgatctatgatctgattacaccgttgtgtttgtaacaattaaatctttataacaagatcccacatgattatattttgatgaaaaattataaattacttttatggtatatctaaattacttctagattttactaaattacttcttagacatataaaggtaaattcaataaagcctaaaggtaatttacataaattatagaagtaacttataacaaaaagaaagtaattaactttaatgcatgttttttttcattggtatgactacacagctagtcatagttggtttatactccatctagtgtcgcccttaaacttgtaaaatgaaatagtatatatcttttttttaatctctttaataacttatatcttttaaatcacatattgtttttaagatctatttgcatcactgtactccactcaaaatatgtgacgaaacgatattcatattgagtatattcaaacattttgttaatttaaaagtaatttattacatgctagaaagtaacttttatgttatcaagaagtaactattgcatcttatacatggttaattctcattagttatttcatcaatgttatttacaatccatcaaagattttatctttttttctcatgctacatgaaaaacaaaaatgaaagaaaaaaaacaatcggtgattaaacatatttatagagagttacttctgaaccatgcaaaagttactttcaattaacattgaagttacttttaaaaattgttcaacttacgtgtgttgatttgtactaattaaataaagttttgtagataaagtcatatttttatccctacaacgaatttacttctaatgtcgtgacaaagtcacttctgttttgttttaagttacttttataatatatgtaaattacttttagactttactgaatttacttttatatgtctaagaagtaatttagtcaaatccaaaagtaacttatatatatgataaaaataacttacgtatataataaaagtaatttacaaatataaatattttttattgtaatataatcatgtaagatcttgttgtgaagatttaattataacgaacacaatggtataatcggattgtagatcggataagtaatttgagagaaaactttatttaaaaacgaaaaagacatacatggctattaaaaaaaaggcatgcatgtagtagactttctcttttttttccctccactactccttcggtgcttcctgctacgtgggcgtatcagcctgcctgtagccaagtactagtggagaaagcgataacgttagccgaagatgagatggccggaggtgcgtcgcgcgattagactaaaccgagagcgcgcactgtttagattttatgatatactatctatttgtcaattggctaattttatcttatctatcaatcttagttttcaattcggtcaaatgttgaaagttctctatgatctatatatatacataaataaaaacacatctagattcattaaactaatacaaaaataaagcaaggaacaagttgcaggccatctgtgacgaccgataaatgagaaaggtataataacttatcattaaatgtctcttcaatccttttcgaaaagaaagaggacagtccttgttataaaccaattaccactctcaatggaagttgggagttagaactccttaaaggcatcgatatcgttaccttttttgacaactgatagtacaagtctgcactgcaatcaaacatacatattataaaattaatttgccaagtgctcatacaaatataatgttaaagttctttacaatatatacgatatatagttacacatataaatatctgtaatgcaaccttttttgaaaattttattaacacatatagccgctccttttacgatgtaaaaccgacttaaatttatcagttctatataatttcagtttttttgacggaatatagtttcagttttagttagctcaatccgaggaatttcaagaaaggaagaccaggttttaagtgcgcatgggttatacagtcttggaagccatatttcaattcagccctatattctgaattattcctagtattatcttcttggggcacgtaatgaagcttgaaataaaaaaaatattactccctccgttttaggttataagatgtttttgactttggtcaaaatttatagaaaacaatagtaatattttcgatctaagataaatttattataaaaatatatttaattattaattcaataaaactaatttggtaatgtaaatattactatatttatctataaacttgctcgaacttaaagcagtttaactttgaccaaagtcaaaatattttataacctgaaacagagggagtagttgctatcatattttttgcaaaaaaaaaaaaaaaaaaaaaaaaaaacagttccagtccatttgaacctatttatacacatttagagaaaaagaagaatggctttgaacctatttatacacatttagagaaaaagaagaatggcattgtcattgaattttgtcgcctatttacaataaacaataaaaggccagaaaaattttggatgtgacacatagattaatttagcgccttcgcacactaaccttgtttgctgggaagagcaaaagtgaaaaaggagtggcttgcaccatccagctgccattgatttcaagaagaaaacttaaaatgcaaattttattagtctcgtattaaaaaaattggattcgtaatcttgatatgccaacaataaattattagtaatacatagctgggttaattgaattgatggtttatataattgttatactaacagcacacccctatttggcatccgaagaaggtagacaaaattacaaattaagacacattcaataaatttgttgcgctatggtccacttttgcataatcaaacatttatattaattaaattggctttctggactagaataaataatttttatcatgtaatctttgtttcctatgaacaggatgtcgcatcttaatatatactcctatataatctcgctcaaaaagaataaatgagaagggggaagtatttcattgtccatatttatatggctttcatcgaatcgcgtggtgctt

SEQ ID NO: 6400 - DNA, 6178 bp, Oryza sativa
  unsure (1)..(6178): unsure at all n locations
tgagcagctcagccgatagctttgctccagcatcggttggtgtggatgcatattctccgtataacatgcatctgcgatgagtgcgttcttctccattatcttccacaatcggctcttgcatcggaaattcagcttctatcacagatggccgattaacaactttcatgaccatcaggtttaaccaggtctgtagcagccaccatggtccacctgccccaactactgagccgacggctatcttggccgatgcattgttttacatttggtatagatagccgaggaggattttgcccaagggaaattgtttctttgattctagggcttcggctacaaattgccaatttgtcgtagggccatatctggatccacagaagaggaatttttctagccacatgagtaaaaaggccacatgttctcgaggagtagcagatccttggcccatatatgctgccacataaccagaccaaccacctatgcttttggtcctgaagtcaaattggttcttagtgttcatgctcataggattagccgatgaagttatatccaaaccggtgatcatggtgatgtcgatcaaagttggagtcatcagcccttggttgaacaaaaaggcattgatggtgttggaccaaaaataggtggcggcagccattagaggttcgtccttagcggaattggctatggtaagggcaagcgcttggccgatcccgatctcatcccagtgaactttcttactagccgatacgcgtttgtaccatgtggtccaactcttctcaggggtggttttctcaagagatggccaagacttgaaagtattcttccaatgacccagattagggttggctaatctaaaggggattatgttggtctcaccgatgataaaatcagtgggggtcaagattgccgattggaccaagaaagtagtggttttcatgtgacaggctgggaatcacaactagattggaaaggtgctgcaaatccaaaggaatcgagaagaagaaaacaagatgcggaaaggggaaaacgatttcatgcgaggaaaagagatctagccgatgagaacttacctcagcgtactcggccgatggtgtggtagacgggctggcggaggacgacatcaccgcaggcggaggtccggctggagatggaatcgctttggaatcgccttttgcgtcggtgcagtcgcgngagagagagagggagaagtntgtttcggtggtgaaaatggaagaggacggtgtgagatttctcgagggtgacggttagtatttaaagcacgggagtaacggtcggaaaacggcaaagtgtgaaacttgctcggagtcgatatactgcaaatccgaaacattaccaaatattccagacttggggggcatgaaagcgtgttgacgtaaaacacgaggcctgggagatctgcttaactccagcgcaggtccaaaactcgccttcgggtatgctagcgtgccagttgatttgatcctgcaatcaacaagaaataaagacaaagaaaccgtggttaaacctataaacgatagccgatcggctaagtgccgatgacatatcatttatctttgagccgatgtcatatgtaaatcgatcggcggtcgtaaatagataataaagaactaaatctactcgatcagctgtagatattaacaatatataattcttatatcaatatatacttaaatcaagtgattgggatagatcggtcgccatgccgagacaatataaatcacttagatcgaaatatatattaataacaagactatatatgttcatagcatagccgatcagataaatctagcatgtaccggctaatactccaataagactctatgttaagatgttaaaacaagcagaatataccaaacatatgcttaatatacttagatgcaataatatattgacataaagggtagatttaacgtgtcaacaaagcatatagagcaaatatagttaaatcagataagatcggctgaaactccgatgctaccctaatcggcaaccagaaggcaggctagagattgatattctaagcacgacttaatagatcaaactcaactgatgcaacattaagtatgaaaagaagaacaatatctagacaatcaagccgctggaagtttcatagagtggtagatatcttatataatctaaatcaacgtcaaaatctaacctaatcggctgccctcttccaacagatgttagccaattgtaggttagatagcgatattgccagagattatgtaagatatgtgataactcgacgaattacataaacaagattagagtatcataaagatggaagcactaatcccgagaacgcaagccgtcataacaagttttacctcttgttgaagatcgaaaccgatgcagctcaactcgaaagtaagaactcgtcgaaataaagcaaaagcaaaagggtggcgatgcaccgaaattgtattgaacgtgtgtgttcattgattacatggggttcggggtctatttatacccgaaaattacaaactatgtccatgtcggacacgactcttatctctaacaaactgtaagataccataagtctttacggcagacttttgccctaaacatatctctaaggaaattacataaaattgaaagtgcatctaggcccctaatgattttgatgattgattacaatgcgattagagaggactaacacttttattcaagcaaatgtgaaggttgttatgtcctcgacatgatgtaatgagatgcataccccatgaatgcgacatcacgatgcaatgcggcaatgatcaaatggtatattgtatcttttaccttgcattgtgtcgtaggaatgccgtactattaagagggataccacatgcatataattggtagaatactagtgctcaaaatgcttcatctttgtgtgagttgaaaaacctaagtcaaaatttcaatcccgagttgtttcacttgtcacaacacttacaccgggtttctttgcaagtttttcaacatctcttgaaggttttggaccatgttttatgttgggtttgatagcccacgaaactagctttccatagagtccaagatcttcgaaatccaagttcggagtaaaaagttattgcagttttactcgagcaacatcagactgtccgatttgaaatcagactatccgatgtatcagaccatccgatttttcacagaacttcactctctgtcttgatttgaaaaaatcctatcgagtgagtttttctaagtatcggagtatccgatgtcggatcagatagtccgatgatacagagactccgaaatttcatagaacttgagtctctgtttgaggacgaagtttttgcttctaaaatatcagaatactccgatttaacatcagatagtccgatgtctcggaaagtctgaaatttcatggaacttcgttctctgtttctcgttgccttggaggtttaaaatatcggactatccgtaccccccacctaacccttttctagggttacccaactaatttattctcattcactttgggttgagcttggtgctaaattgctttggatctttgagctctctctccctctctcaaatccctccttgttctttgtgtggtggatcttggtggttgtggatttggtgtttgagggcctagtgtgtgtttcactcgatcttgagcactagggtttgaccaagagttgtgtggtgtttgttactcttggaggttgaggactcctagacggttaggtgtcactcccgagccaccgatctacgtgtggttggcagggagaagtttgtgaaggccggatctcgcctccgcaaggaaagagataccccttagtggaaggaagagtgcttagtgcaacctgttgaggaaagggttagcaaaggcccggttcttagtgagctcctcaacggagagtagaaccccctcaaggatttgaactccgggaacaacttcgtgaacttcatcattggtgatctcccttcatcctccttttagctttgcttaattgtgccgctatagatctagtcgctgtttgtgctttactcttgtttgtgtgatagatctacttgttgtgcttcattggtggatcagacagtctgatccaacatcagactatctgatattttcggatagtctgactgtggatcagactttccgaccttatttcagttttagcatccgcataaagttttaaattagcctattcaccccccctctaggcctaattgaccctttcaaaaatatcctaactaatagatacaattgccttctcaggaccctatccatgtgcggcaatcattttgaagcatatcaatctaacccgatgtcgtacaccaagtcgttttgtcagaatcggctgtatcggcttacctagtctgactcggacccagccgatccttatcgtagccgatccggactccagccgattctgatcgtagctgatccggactccagcggattcttactctgttctcgaatcgatcttcgcctttgattctgcttcggtctaatcctcttttccgatgcagatattaccaaatttggtcgttaacaccaggaaactaacttaggattatatacaggcgcggaagaatacccatactgagctgtcaccatcagctgcccatctctcatccgcagcatataaccctaaataatgatatcccataatctagacaccacgcctaaactaccagatactactctaatatcatcatcatgacatagactaattgcataagcaaacattataccctcaccaaagcatctccgagataagctagctgtatattcagtataacaagaacataatgtaaagtaggtattcatatacttggaaagtatttcaataccataaatgtatatagaagagtattctaataaaagtacaaagcttacaaaagaagaaatcatccgcagcatataaccccaaataatgatatcccgtaatctagacaccacgtctaaactaccagatactactctaatatcatcgtcatgacatagactaattgcataagcaaacattatacccgcaccaaagcatctcccagataagctagccgtacattcagtataacaagaacataatgtaaagtaggtattcatatacttggaaagtatttcaataccataaatgtatatagaagagtattctaataaaagtacaaagcttacaaaagaggaaagaaaagctactagagccatacccgaactcttccgagggcttccggactcctgatttctactctattcctgttccaccagctagatactactaaactaaactttagagaaatgagagagctcttgcttaaggtgtgtgtgtgaagtgataagaggagctcctttaatagctgaactatgacggttgtgatggttggaatggtaggtaataccctccaaccgtcattggggtttcatctcaaccgtccagccaaaacctggatccaacggaggcgagggaggttcggccgaacctcctagttcggccgaacatggggctggcccaaccagcccaccattcggctggcggcctcctctattgcttctttatgtagacttgtgaattttggcccagtttgtcgtgtcaattctgagttcttggctcattcatacataagtctgattgtcgacatcgttcgattgatttatcgtccgtgttgatgtcgattctcctccacttaatggtcattctctgcaaaaggtgagtacacctaatattagtggaatattattattctaacatatatatgcattgcaagcatcactagttctcctctattttggtaatattgacggtcgaaactgatcgataacgaccatcaacacccacatgacagcgagagaatgatgtgggccccacatctctctttgttttctttcttctttctctccttcttttctcgtctgcagcggcggcggcggcactcatccccaccgtgtgcggcaacggtgacctcctccaccatgagcagcggcagtgacgctcttccccaccgcatgcggtagcggcgccctcgcccatcatgagcttcaacggcggctgctccattccccatcgcgtgcggcggcggtggcggcggcaacttcccgtgaaggagggggaaggggaggtcggcgagcgagaggtggaaggggaggccggtgagccggagggggaagaggaggtcgccgcgggagagggggaaggggagg

SEQ ID NO: 6401 - DNA, 7252 bp, Oryza sativa
gtcccgcgctgatccgcggcctctacctccatctgttgtcgtcgtcgacttccccgccctcccccgcggcgcgacgacggcgtggatctggcggcggcagcgcgacctcggcgtggatccggcggcggcgcgacctcgacgtcaatccggtggcggcggcccgtccccatgcggatccggcgccgatgacgacgaatgacggttggagcagcggattggccgacgacggcgacgaatctggcggcgcggaggccggctggattgggcagcggtgggctagggtttggagtggcggattggccgacgacggcgacgaatccggcggcctggaggccggcaggattgggcggcggtgtgctagggttcggcttttttgtttttttttattttgttgaattcattttcgcatgcggttggtacaggggatgcatgtggttgctctagccgtatgcaaagatgacaatctttgcagaagatttcacgtagccgcatgcgaaaatcgttgccgtccgtctgcaaagacgtattcttgtagtagtgtgataacaacttaattccataacaacttttcaaaaataataacatcatactatatgctttatggtatcaaatattacttaagagatatacaacggtaatatgaactatgtaagaatgcaaaccatgtaatttagttgtgtttttttaaagccggtccaatttaaattttaatacgtgtgagattaacattctcaaattattttggaatttttcaaaaatatttggttgatatttcaatagtaaaaaagcctacagttttgaatcatagatgtaaagaaaattcaccaaaaatattttcagctggtaaaatatatatcattggttttttggcatattattttaataattgtttaaatgatatgaaaaaagttagaatataacccaaaataaaatatttattttagaagttcaaatatagttaatatcagtccaacgacataagtcgataaaaatagctatttattttaaaagattataataaattagggttcctaagtagtaatatataatgaaaacatgagagagaatagaaggggagagggcgtgaataagggcggagggggtggaagcccattaccaatgcatgcggcgacggagggcactgaaaatccatccgacgttgtatatatgtaccggcagtagagacatgctcgggtatttcgcaagagtaataattaatctagtagtactttcccagttccagaatatatctctactattataattattataattattgaagatgtttttgtcaaaattttcgtacgtcatcagtatttgagtcggtttttaagttcgttcgcttttggaaatacatatccgtgtttgagttagattttattgtttccttttggaagtataaaaggagtcgtataagaaatattttgaaaaaacttgcatgcttgaaatacatactcctaattgcagctcatgattttctgaaaaaaatatccaatcgaatttccacggtgaattttactctggctaaaccatataacaataataaaattaaaatagtatttacctgctgcaatgcacaggtattttttctagttgatatatatttttcaatgttttgtaatacgaaatgcgcatcatacatgcaattaaattattttttttccaaaaatatgcataaatgcaatctctagaccgtattcttttctgattaagttgtagattttatcttggtttttattagcacttttttttcaaattgataaacggtgtatttcatataaaactttctatctagaagttgctctaaaatatcaaacaaatatatttactaaaattataataattaaaactcaattaatcgtacgctaacgttgttttagttttacgtgcccttacttaatccccattttgatgtatctcgaacgtggccttaatctaattggatacgtgcactgtatttattatggtgataaaaaagaaggtaataacattttataaaaagaaaatcagtactggtagttgaatgtgccttaaatttcagaatggaaggaataaataaaatgtttaattaatttgatcgtcatatgcgcttgtgagttaaacacattataaattggcgaatatccatgttgttattgttacgaaatatttgggtgatctcatccatatatatggatagagtagcaaccaacttagggacatgacggttggtcgtgccccatacctcttctcgcctcacggcgattctagcaacggacgtaatggttcccaaaccatcgtgccttctgttgccgcctctttcccccctatatattgtaaccattattatcaataaaggatccgctgattcattccatcaattctcgctctcgctcaatctccctcgctacaatcaatcttatttacaatacgtttgtcgcgactgagaaaatttgcattttcccgaatgctactgtattaatccctatcccaggaaaagccagggtacaccacacaaacatgatataaaagacacatctttattatatcgataatacttacattattacaaaggtgcttcaggcctgacaatcaaaaataaacaacagcggactagcgggcctacggctccatctccacaggcgctcaactggggtataagccgggactccacctaagacttcttctccaaagcttctcttactgaagggggggaaagattgagcaagaatgagtacaaccacagtactcagcaagtcacaccagaagctgcatgattaatgcaaggggtacaagggggtaataatatggggattaggttttgcagtaaacagcatttaaaagtcacttagttgctcaaagctattttgtaaacacgatcctagagctacacaatattattaatcaaggccgtgaaccctcacgaacctgccttaacccaaggcctacgatgattcagaccgaattggcaacccgacctgggccaaccattccacattttagttgttaagcaagttttaagaattaaaccactaacttgggtacatttctaggcttgcccataaccgagggcgcggctattcgaatagattatactctgatgagaggtgtacatctttacccacaagacacatctttactctgcattccacggccgtggaacccgtcgtaaaggatctgacataacccctttacccatcctagccatgacaaaagcaccgacccaacctcgcctacggccggaatcccgagacaggtaggtaagattaagcccctagcagcaagacaccggccctgtgccatgacatctcgactaccgagccgcagcccgtgtagccttcatttgccctagagatgtccattgagccccgactttgtccatctccatccgtgtactcttgcttggactagactgagcaccgagttaagccttacccattagacatgtggttagtacggtagtgctttgcaacagaggcccgaagatcggtgcttatagtggccgaggtgctactagcggaaccatgcacctcgagcctagcctaaaaccattttgggagttttgaatagaggggggggaggtgtgtgttcaattccatcacaagccaaccattccacagtgtccaaatgatatgagaactcccaaagtctaaagttataaaaccacccagtgttgcctaattaatcagcgaagcatctacctaaattcatactagtggaaccgttaatagagtacccactagttggggttttgtttatcctagggtgaacaaggtaataataacaatagcaaaaataataaggtcataacaaaggtaaataggtatggctaaataaaacagtgataacgcgggaatttaagtaaagcggtaatgcaatagtttaaatcaaaataattttataaactgggattcaatatgctcaagggtgaagcgacttgccttgctcagagagaacggccttccgaaccttcggcgacgaccgcgaaccacacttcgggaacctccggaacgacagaagctacgcgaagcacacaagcaaagctacaaccctataaagaagcaataacaatacataaaatgaaagcacagggttctttaggttataacaaacattaaaagacttgaacaggtcgattcggagctcatatgaccaagatatgatcatccgaagtttaatgctgttacatggagatttgtggattattataattaagttttgcaactataaaacatgtgtaagcgctagcctggaaaagacaagaaggctgcgccgttgacatgcggaccccacatgtcaacctaagggaccacagtagaccgagtacacagggacggtctacgggtcgacggaagcggaccccgtatgtcaaccgaggcaagttgccgacaaacggactccactagacaccacgcgagctgcacacgtggaaaccacgcagctaccgagcgggaacacaaatagggtcaccacacgctcacacgaatgactaccgacacctgtacaagggtaccgaggtcgacaaccgcacgacgggtacaggacgacaccgaaaggacgaggacgggagcagcgagaagggggatccttaccaccacgcgacgaggcgcggcacgatgacgatgaacgggcgcggcggagacggctcagggacgacggaggcgaacggcgagggaacgacttcggtggcgatccttggacgaaggcgagacacggccggcgcaacgcttgacgacgcggagccgaggacgaagacgactacggggctgcagcaaccttgacgaaacacggacgacgaacagcacggcttgacggaggaacgaacgccactacgaccggggaacgatgagaggacgaccacgacgacgaacaccggcggggttcgggtggaggggagacgaggccaaggtcgacctttccgctgcaacgctggaggaggagacggcgacgtcggccaacgcacgggcacggcggaaggggctgccggaggcgacgttgacgaggaggaggatggagaggccggcacgggccacagcgttccggcgaaatagaggagcagccagaggagaggacgacgctgcgacgtcgacggaggagacggcgacgtcgatcggcgtaccggcgacgaacagcagccggccggagacggtgcagtggtggcaacgccactggacgccggcgggaacgcgcctccggtggtcaccgcgcgaaacggagggcaggccgggggagaggaggcggcttcgacgtcgaggatggcgacggcacagcctacgggtgcacgggtgaggagggggaggcggctggaggtggccggcggcacgggagagagaggagggcggcggggagaggcggtgcggccacgggggagctcgggaagaggcaaaaacgagagaacgcacagagggggttccattttataggcgcggggagggatccggccacgggagagggcggaacggaggcgggaatggcggccggcggccatggaaggtggccgggaatggcggggccgttccaggcgactgagggcgcaattcaagggggaaattagggggaattgaagagaaaggaaaggggattaattccccctaatcaatttggaatgaagggaattgattcgcgtggatttgagggaggaaacggatagggtttcacgggagagggaggagccgggcgggaggaggacgacgaccgggtgggtgggacccaccggtccgcacggtcaacacgcgtgcgcgggagggtggcggctcgacttgggctggggcaggcccaggcaggaggagaggagggaggggtggcccaagagagagatgggaaaggaaaaagagagggagggaagagagacttcggccgctggccgagggagagagagggaggctttgggccggacttggcccaaaggaggaaggaggatttaatttagttttctttttaataaactttgataattgttgttgttgcttaataattatttccgatgctctggaaattcaaataaactttgagggctccttttagaccaaggagaatttaacaaaaattctccgggccacattcgaatttttcttgtacgtattttaatgtttgccaatttctttttgaattttaattaattctattattccttttagagaatgatttttatttcgggatgaatttatcaggacgtgacaacgttatcagcacttcgctctaagcgaagagatactacatcgcttttgattccgagaaaagcaaaagaaatagaagaaactaaggaaattgaagaaagaagaagggacatggcaacaaaagagttcgacgaactcgccctcgatgggactaactatcccatctgggcttccgatataaaaatcaattttgcctctcagggcattttaaatataattgaggaacccaatgatggggacccacaaattgagcacaggaagctcaatacatccctttttcttttgaggctctacattcacaaggatcccaaacatgaatacatgttagagacgagccctctcaacctttggaaagctctaaaagagtgttatgatcagcaaaaggaactcatttggcctaaggctaattatgagtgggttcatttacgcctacaggactttaaatctgtggcagaatacaaccatgctactcataacatttgctccaggttgaagttttgcgaacaagagctaacggaggcagagaagatagagaaaactctatcaactatacttctggaagacaagatactgactcaacaaacagtatcgcgctaacaatttccagaaacattctctgcttatacatacattgactcaggcagaaagacaccatgagctttctttaaagaatgcccaacagcgccccccgggctctgctccactgcctgaggtgcacttcaatgtacagaataatgctgagaataagaaaggattcaagggaaattctttgaatattaatcctatgaatctgactggaaagcgcaaacgcaacaacaacaggcgcaaattcaagggtcgaaagaaaggaaaagggaagggtaaggcaccacaaccttgtagcaatggcaacaggcattgcaataggtgtggatctgacactcatgtcggtaaagactgccgcatcccgaaacatcttgttctcttgtactaaaaatccctcaaggacaaaaaatcttctaagaacccaagatttgaagcccacttcaatcttacacatgaagagcgccctgaggttgcaagttctcaccaggctcctgttgaatcagagagcaacc

SEQ ID NO: 6402 - DNA, 7512 bp, Oryza sativa
ttgttctttatagttacttcattcagggctctatagtcgattaccattctctcagagccttcctttttcttaaccagaagcactggggctccccaaggggatgagctaggtcgtacataacctttactttccagctcttcgatttgtcttttaacttctgctaactcattagctgccattcggtagggtctttttgcaattggtgcggtgcctggtgccagttctatggcgaactcaatctctcggtctagtggcattcttgttaattcttccggaaatacgtcgggatattcacaaactatgggcaccgactccaaggaggtgacttgtaaacaggttaagatagaccgacttgcggtaggagtgttaggggtaaagcggacttgctttcctccaggtccttgcaaggtgatggacttttcggcacaatctatctgtcctttgtgcttagccaaccaatccatccctaggatgatgtccaagctttgcgagtctaggactatcggtttggctaggaagtcaacttcctcaattctaaggttaacttccgggcatatttgagttgcctttatattccttccaggggaatgtactatcattggtacacgtaaattttgggttttccaaccatttcttttcacaaaagcttgtgatatgaaagaatgggaagctcctgaatcaaacagaactattgcgggtacggagttgacagagaacatacccatcacaacgtctggagcatcctgagcggtttcagcttgaatgtgattcacacggcctcgaccaaagtggttggaagcacgtgaaccttgtccacttgcctgagtgctaggacgagacttagctgccgctggagtaggagttctggcagtgctgccattagcatgccctgagttggtgttggtaggattctgagggcactgtctagcatagtgacccatctggttgcaccggaaacactgaactgctgacggtccttgaggtgacttgaaggaggtaacgctgtttggcgcagtattgccactaggggcacgctgctgtggctgaggtgccggacggtttatctgaggacgaggggcgtagcctggctggcggttagcctgagtgaccgactggtggtattgcacgggttgaccgtagcgagggcgaggcgcgcctcgggaagaatttccctgatggttagacttgtgtttcttgtactcttcggtagcctcttttctggcatcctcaagtagaagtgccttgttgatcatgtgttgaaaagtggggaagtcatgagcaagcaactggagtctcatcccaactgcgattcccttcaagaacttcctgatcttcttcttgtctgtgtccacctcctcaggggcgtaccgagccaacttgttgaactgacttaggtactcattgacactggtgttgccttgcttaagcctgttgaattcctctttcttcatgtcaatggtgctttcaggcacatgagctgcacggaaagccgtggcaaactcatcccaagcaatgttagtgggttcagggtgtccattgcagtaattctcccaccaatctgcagcaggtcctcttagttggtgagaggcgtagagcgtcttctcaacaggagtacactgcactaagttgaattttctttcaacatccttcagccaatcgtcagcctcgacgggctcgacggtctgagagaactctggcggacgtgaccttagaaaatctgtcagcttggatctattgttgcccatgtgagggtggccatttccatgcacattatgctgataaccggctacggctgcggctattccttgcaagatttgtgtctgaactgccattaagtgttgcatgttgttttccacatgaggtggggaagggaggcgttcttctccagaattgtgactagcagtgcggtgagagcggtgagactgttccatctctgaatcacgggaagctgtgcgatgcgagcggttgctacggcggggttgctcaacttctgcgttacgggaaacagtacggtgcgaattgttgctgcggtgagactgctcattagctgattcatgatttgcttctggttcgactctaccttcttcaaaaccgaagtgggctggcgcacgagctgcacggcaggggcggctagccatctaaactcccagaagagggcggggtaagagtcagatcagcacttaggagggcaaggagcaaagtaaatagcaactcagatagcacacactaggtataaactgaatttttcaaatcataaaaacacctgatacaacgggtgtggacaagtcacagagctacgccgagcttgactgtgcgcacaccacctaggagaaccagactaccaaacaacacccacaacaaacacacgcacgcactacctcgccacgactccaaaagagttggcggcagaacaaaagggcctatcacacggacggctgcagaagactgcctcctctactcctcgtcggcctggctgcctcctgtagtcggctcctctgtcgaagaaacgtcgatcggctgacgcgaagggaccggcggaacctgtcgagggccagcagcagcacgggccgctggcggtgggggagctgggtggtggaaacggaacacggtggaagaaccaacaacacgcttccgcgcagtgcggataaagcgtggaccacggcgagaggaagcaactggggtgtgtccgggggaaaaccgtacacccggtacgttccctggtccgcggttttagaagttcatttagttcgcaagcaccgacccaggtgtcgggttttccaagtcttttgtaaaaccaaagttttacccaagttgtttttcagattttaagttttgaagacgaccgtcgatactcgcatagagtgcacgaatatcgaggcgcaactgggtggttacaaggggacatggtataacaattaacaaaggaaggatcaaatgcaacaaattaggcaggtccgccaatctgccttgcagacgggacaaagattaagtgcaatcctatcaatgcataatattttgcaagcaatataattaaatttcaaatataggctcaagatgttcaaaggtggcttgccttgctcgagatctggagcttgatcctcgaaatcctcgcactgcgggtcttctggctccggaactacacgcgaaacgggacaactcaacaaacggcgaaaagtaaagccctattaatgacctctaagcgtgccattagatagatctcgagatttggggaattttggaagttgaacggagtcaaacggatttacggtggggaagatattgaatttctaagattattggatttttggtctaaaggaaaaggatttaattaaatcatttttggaaaagaaaagaaaagaaaaagggagagggagggaatatagactttcctcgggcggctagggcgcggcccgagagaaagggcggctcggccgagcttaacgggccggccggcccaagaaggtggcccaaggcggcccaagacgcgcgcgcgcggaggaaggagagagagtccggtggaccgggctcaccacgcgcggtcccgggtgggacccgcttgtcagcggctcggctcaccgtgcggagggagcacgcggcgcggcgctagggtggaggatggacgtggtgtacgcacgcggttcgcggtggacgcaggtacggcgggcccacgctcagcctcacggctcgcggtggaacgcgcgcacggggagggactgaccggggtcggctcgacccggtctaggctgagctggcgccgacgtggcgcctacgtggctaccacgcgggctggcgggaggtagacgacgacgccggccggaacggacggcggtcgacagcggcgagcgacggagcgaaccacggcgatacgggtaaaagcgagcacaccgggcggttgcacgtgacgaggggagacgaaccaacgggtcggatttgccgggggttgctcgacggcggcggattgcggcggcggcaaccggcggcgggagaagggggaaacggcgacgaggtcactaggggctaattcccggcggcgagagcatctacgcggttacgggaatccgatgctagcgtcggattgggcggaactacgccgagcgaggccggcgacgagcggtgcttccgagctcgggcggcgacggcggcgagcacacggcgagcgacggcaacggtcggggctgcgccggctaacttcggggaggctactcgagctactaccgaaagctaaggggagggagatggagcgaggaggaagaacggagggaggcactaccgtgcgggacgggcacggtgacgagaggccgacggcgcgggagtgatctctccggcctcgggccgaggaagaggaagaagagggcacgcccggagtccccttccgcgtccacgaacgcaccggctctcccggcgcttggcgatggacggcggaggcgagacagagcacgggagcggcagcaatggcacggaggcgaatggaagaggaagggaaaggggaggctggggtttaaatgggcggcaatgtcggtttgggaacggacttgcgcggtcaagggcgcgagctggcgctcggcggtcgcggccaaagcggcgacagggaggatgacgccggcgaggagaaaaaggggaaaaggagggggagaaagggggcttgcccctttgccgattcgggaaaaaggaggaggtgagcgggggcgacgcggcagagggaggagggatgctgcctccgtcccttggcggcttgcgcgcggagtggcggggccgggcgatgacgacggcgatgacggcggggcggtttggagcggagcggcgacactggcgacaggcgcgtgcagaggctgacggcggcggcgaccgggcggtcggccaccccggcacgcgcgcgcggctcgcaacgggaggcgcggcggatggagtggcgcggctcgggcacgcgcgctggctcgcggggccaagcggctgcgcgggcggctcacgcgcacgcgcgcgggcagagcggagaggcgcagggcgcggctctcgcgcgtgcgtgcggcgcgcgagggaggggcactcggcgcggcgacgcgcgctcgcgcgcgcggcgcggggcggagcggagggagagggggagagagagagcgggagcgcgccgggggagagagcgagagagagagagagggcgccggggagagaggggaaagggccgggggagaggggaagatgggccgagagaaaatcggcccatcgaccccgggggaggcaaaatggacttttgcggaggaatttgatttggaaggatttggattcggaattgaactcgacgatagatcggggattgagatcttgagatggcatggacactagacaacaagcgaagaaacaaatttcgcaattagggtttttaggagataattttcccgctaggcgccacgacggaacgggcgctacagaccaacccccctaacaagaatctcgaccccgagattcagcacctaagggagcagctccggaaactcggcgcggagaagatcttctcgctcccaggttgcctcatcttcagaatggttgctccattggactttgtagaacttgatggtcttccttcgagtctgacgttctgcctcttcaagaaccttgatcggtctttccttgtaggtcagattcttttccagcacgatattacccaggggaacttgctcttctggaactcgaagacatttctttagctgggatacgtggaacacgttgtgcacatctgcgagaccttcaggtagctcaagctgataagccacttcgccacgtctggcggttatgaggtaggggccgatgtagcggggtgctaacttgccggacatcccaaacctcctaacgggtttccactcgggaatcggtaggggttgcagcagaccagctggcctctgatgttccgccttgactctttggcaaatgtcacacagggctacgtattctgcgacatctcgcttcattccagcccaccagaagtatgccttgatatcttggtacatcttcgtacttcctggatgaatggaataggcggactcatgagcttcctttaggatgagatctcttaactccttcttggccggtacacagatgcgtggaccgcaccaaactgtgccttggttgtctatggagaaattggtgtctttcttctcctgtattctttttattaattcttttatcccttcgtcgtctttctgagcctcccggatttgcgactctagggtaggctgtactgtcaagctggcagggacacctgactgtaccacggtcagcattaacttctgcaattctctgcacaggtgatcttggtcaggccgtatttgagctacattgcaataggccttgcgacttagcgcatcagcgaccacgttggctttaccagggtgatagtggattccaagatcgtaatccttgattagttccaaccatcttctctgtctcatatttaactcggtctgtgtgaagatatacttaagacttttgtgatcagtgtatacttcacatctgttcccgattaaatagtgcctccagatcttaagagcatgaaccacggctgccaactcgagatcatgggtgggataattgacttcatgaggcctgagctgcctggatgcataggccacaacctttcgttcttgcattaggacacatcctaagccttgtcttgatgcatcacagaagatctcgaaatcttttcggatatctggcaaggtgagaactggggcagtggtcaaccttttcttcatttcttggaagctgtcttcacaggctgcagaccattgaaatttcttttccttctttaacagctcggtcataggtctggctagcttagagaatccttcaatgaatcttcgataatatccagctaagccaaggaagctgcggatctctgacacattcttgggcgggttccaagcaagtacagcttcaaccttgctgggatctacttcgacaccattggaggaaatcacgtgtccaagaaatgctactcggtctaaccagaattcgcatttcgagaattttgcgaatagttgatgatccctaagattttccattatcaacctcaggtgttcagcatgttcttcctcgttcttggagtatatcaggatgtcatcgatgaataccacaacaaactggtccaggtattccatgaagattttgttcattaagttcatgaagaatgctggagcattggtgagtccgaaggacattactgtgaactcatatagaccataacgcgttgagaaagcggtctttgggatatcttcagatctgattttcagttggtggtaacctgacctcaagtcaatttttgagaaaactcttgctcctttaagttgatcgaataaatcgtcgatccgtggcaacgggtacttgttctttatagttacttcattcagggctctatagtcgattaccattctctcagagccttcctttttcttaaccagaagcactggggctccccaaggggatgagtaggtcgtacataacctttactttccagctcttcga

SEQ ID NO: 6403 - DNA, 6790 bp, Oryza sativa
tttcccccttccctcccctctttcggccgccgctccgccgcgccggtggtcgccggcggcgaccatcggggcgtgggcgcgccgcctcccgccgaccgcgccggcgtggccgccctcgggcgcgccgagtggctgccgcgtggggcccggccgtcagccgcccgcgccctcgggtgcggctgacgtgtggggcccacggcgccggccggtgtgagcccgggtgcacccggtccaccgtggaccgtgaggctgccgcgtgggccccactcccgtgaacccggtccgcgcgcccctccccctcggctgacgcaataaaccctttttaaattaaaatttaaatgaagaaattcgcaaatattcatttaaagagcatataaacttcaaatggccataacttggccatttgaactcagaattggactgttaaagtctctaatttttccttaagaagtcaagaacccatttttgtactttgttcctgcttgttatatggagtttattagagtaaaagcccttttattttccattggtcgtatagacgctgcagcttcggaagatctgctcttcgtggaggttgaagccgacgtttgggaaagcgagcaaggcaagtcacatcatccttgaacatattgaatcccagtttataaaattattttgatttaaattattgcattatcgctttatttaaattcccgcgttatcactgttttatctagccatgcctatttacttttgttatgaccttattattgttattgttattattaccttgttcaccctggaataaacaaaaccccaactagtggacactctactcatggtaccagtagtatgattttaggtagatgcttcgctggttaattaggcaacattaggtggttttacaactgtagactttgggaatattctcatcacctggacactatggaattgttggatcattgtggaattggattcacacctcccctctattcaaaaccctcaaaatggttttaggctgggctcgaggtgcatggttttgatagtagcacctcggccatataaggaccggtcctcggccatataaggcttagtttgtggctcagtctggttataaacaaaagtacacggatggagatggacgaagtcgggggtcgatggacatctctaggacaaatgaaggctacacgagctgcggcccggtagtcgagatgtcatggcacagggccggtgtcctgctgctaggggctcagtcctgcctacctgtcccgggggttccggccgtaggtggggttgggtcggtactcttgtctatggctaggatgggttggaaactatgtcacgtcttccgtccgtataccgtggtggtatgtggcacgtggttacacgtgaggaagatgtgtcttgtgggtaatgatgtacacctctgatcagagtataacctattcgaatagccgcgccctcggttatgggcaagccgagcaatgtacccaagttagtgtttttaattcttaaaacctgcttaacaactaaaatgtggaatggttgacctgggttggcttgggacgagctgggacccagggtcgggttaccagttcggtctgaatcatcgtaggccttgggttaaggcaggctcgtgtgggttcacggccttgtttaataatattatatagctctagaatcgtgtttacaaaatagctttgagcaactaagtgtcttttaatgctgtttactgcaaaccctaaccctttatactataacccccttgtactcccttgcatttattctgcacttatgggtgtgtcttgttgagtacggtggttgtactcagtcttgctcaatttttttcccaaacccagaagaggagcccctggacgatgaaggctttggtgtctagctcgtgcctgccgtcaagcgcctgtggtcgtcgccctagtcttccgctgtttttcgttcgtcttcttgtgtgctgggtcttcgccgcccatgtaataaattaattaattacgcttccgcttgttaaactctgaattgtatcaacttttggtgtaccttgcctcctgggacaaggaataatgcacgcacgtaaggaacgcccgttgggttatttccggtcgtgacagatgtagagcataaccattgcctcaacaccaatcacacaaaacataatggaacacttgatggcaaaaatgttgatctccttaagtggtggaattagactcttcctgtgtagctcacttcagacaagatgttatattggttcaagcatatatcctctatctctttaaagcaagcatttagccaggttggaagaattataactattgaagaactgatgagacagttcttcatgcctagcacctgagaaagttgagacatacttttgccttaaagactggatagaagcatatcaacaaactgttggtatttcttacgattacagataaaatccgcatgcgcacggatatacggatgtagcacttccactacggagtattcaatgggtatcgaatccaagggaacgtgtgagattaattcttcctccggttcatccaaggacaccaagcgaatgtaggcagaggatagagaggatttcctagtgagaaacagtgtctagggaaagcttagttttaatcctaacgcaatacttcaggcactgtcaacccgctgtttccagatgtcgctttactccgtacccggacagggaggacttaagtgctcttgagggctgtcaccacctctacacccaccaaaaacgtactataggatacgcagcaattacaggataataattacctctaaacaccatgtctaagcaattaaaatctactttagtgtttataactcaccaaagcaatcactatattttagttgattatagtgaacaataatcccgtatgctaattaggaactaaccaagagataattctcacaagataaatctaaattacttaggaaaataattctattaataatagagtaataaacagaataaaagagacaggaaaggattaccgacagatccggaattcctccgacttcttctactctactctcttcctaattctagtatacaaatagtacaatagagcctcttgtaattcagctcaagcttgggagtgtgtgtgggagtgaaggagtgaagctccttaaataggacagttaatgacggttggcgaaggggaaatgtccgaagtgccctccaaccatcatcagggatgcatccgggacgtccatgccaaaccccagcctgaacggctgagatgctgattcagtggctaggcccatctggcctggcctttggcccatctccccctctgatcctgctctatccaattctcggagttttgggctgattctccagtgttttgataaagttcaaagcccatccttgtatggatatgtttccttctccactttagtttgattttcctcccaacttctgggttcatcacctgcattgaataaataccaacactcatggaatatgttagaaataatccctaccactatgttggatgttttattatctggacattatgtagatgttggcgatataaatttagcacttaatagccgccaacacagatgcaacactggctagaggatctagagattgccgatgcaacagccaacacattggtggaatttggcatcaacaccgatgacaacgtgccaataagaattaataatgtaatatatgtaatagtgtaagtcaatcattgtactcttttccttttccggaggaaccctactttagggagtaaggtttttaacaaggtaacaactttgtatccctactatgaaatcaatttatttgcagtgcatatttttattttattttcctgcatagttagaggaggcaaaacaaatctcagtatcccatgcgcaggtagctgagcgaggcgagaaactgagttagaccatatcgttttccctctatatcatatttccctccgaaaatttcagaactcccaagttgtttctttttccctcctctgtttgcagattggccgcttagaacagccacaaaccagagcaaccagacaactagagtactagtgtcgattatagaaatcagcaatgagaaaagagttaacgcatgagatctagagtggatgagtaaagggacaagatttagacaggttcaggccttctcaatgaaaagtaatacctactcctattttggagattgcatccagtattgtattgatcttatgatcaaattgtggtcatgaccttgagaggctcctttccctccttatataggcttgggggtagggttacaagaaggaaagcccaaccgaatacgacataggtttccttatcctcttttactataaagttataactcactaactcctaaacttaacatgcaaagattctacatcatcatccattaacaagatgtcatatcatcatccactaaaaatcattaatttaaacatcatgcaaacatgctatattatctataattttataatttattaaattttatagcttttaaaatacaagcatgttaaatcatcatcccacataattcacataacatttcaatttatgtattcattatttttttataatatgctttgaacttatatagttcatcctcacttagttaatgttatttctctcctctcattaagtcgtatcacatcaatttttttagtgcttaagtgattaatctatggtccaaattatccctctccttttcttctgtctaaactatctcaatcttttctttttttgtaaagtcatatcaccttacttttacatttgaatcatcattctatatactatttaaatttaaattatcataagccatgttaacttacataatcttatgttgtctagctatcttacacattatttgtacttgttcttgtcatactaaactcccgtggcaatgcgcgggatttcacatagcacatgtataataactaagacttataaactataccttggaatacaagacaactcaactttcaaaaccccatggatccattcgtctcctatctccagttggataagccgtccgtgtaggtataggtacctatagggtttattaggttgctcgcatttccttagcctggtccagctccctcatctaggccgagtttgtcctagctaaggagatacacatgcaactgttttgttgtttgcattggttcagcctaattagcatgagattttgtttggttagttgcattagaaatacagtttaaatgtttggttacttgcattagaaatacagtttaaaagagattttgtttggttggttatatggatctcatatgtgaatacctagggtgagattaccacttagaactaatggatgaaaatttctaccatccaaaaactgatttttgtaattcaaagcagtttaggttataataaaatccatatattgtctaaagcaaaagaaaaatattgctagatatcgctgtgcacaagatgttgatatatgatgaatcggtaacacaaaatagaaaaagtaaaagagaaaacaaaaaacaaaaatcaaagccggtcaggtgttcagcttgccgttcaattcgctgctcccagcttaccgtccgccgctcgccgctccccgctcccagcccatcacagcagctgtggtgtccagatgaccagatccgacggctagctgtgacccctgtggcggccggaattcggacgggcaggcagtcggggaagggagacgttggtggcgacgacgtaggaagtggtgcagcaccgacgatggcgaggtaggcggagggagtgatagatacagaagtagatagtggctgtggcttctccacgaggtccacgcgagctccgccaaggcacttggctccgcctactccagatccagccctcatctccacaggggctgactgagctccagccgctcgtcgccgcctgctcacaaattcagttgttgtgagttgtgaccctgcagccgcctccagccctcatctccaacgtagccggccgagctccaccaagcccctcgtctctgccgtcttctcgccggttgttcttccctgcttgctcgtctccggcggtcggtggggacggaaaccgcggcttgtaggaggacgaggagatcaggagccgggtgagagcagggcaaatactcgggtggggcggtgaccccagcgaggccggtgcatgtgcgggtgcagcgccttgcactcgcgggtgccgcgcgctgcatgtgacgggccaggctgtgttgcgaagctcgattcgagctttttccctcagcctggctctgggctccgttttgcagccgctcgacctggcccaaccaaacgtgcaagcaaccaaacacaggtgaggttgcatcccagatgcgggccaagtgcgaaccagacaaccaaacacgcccataatttccacaaagagtgctagacaagcaggttgcaggcgaggcgagcttgccgcttcgtcgggccttgttagaaataatcttgtactaggtgatcatatttattttgttgcatagcatcacatttagttgtaggagtagactaatttagttgtcagctgcatgcattagtcgttgtggcatagcgagctaatctcccgtgaagcacaaaatatgttagagtgcttatagtagattggcagccaagtagtgcgtgcgtgcaggttggattagtctcaggattatgtggtgaattagtcttgcatgtattagttagttgcagatgcatgtgcatgcatgcaggttagttggttggtgcaagcaacgacgtcggcgaggactcagtagtggagatgtggcctgagtcaaacagttgcgatacttgtagagttg

SEQ ID NO: 6404 - DNA, 16858 bp, Oryza sativa
tttttgtaaaacttttaataaaaaaaattataaataaaaaaaattcctatatgagcgagtgaacatgggctgtgctgagatgtgctctccaggccgagtggcatctggcagctctactcagcgaccaccgcgaggaagccgccgctcgccggagaatgacaactcccctcaagttcggtgaagcgacgggtgcgttaaactgtattgtcattgtagtgagatacctctagaggtctttcgactacttttacaaggtagtggactaaaacggtttaggttgaaagtctcacccattcttttgtttggtattagatacttccctaatattcgtatttttttattgtcattgtaggtactaaagcatattttaatccaaccttcatactgcgattgttattactactccattcgtcttataaaaaaacaaatctaatacatgatgtgatttgtttagattcgtagtatcatgtctttgttttttatgggataggaaaattagaaactaatttgggatgattggggctgttaaaaaacgacaggatatgatctgtacatattctagtattacatctttcccttttagggacgaggaaagtagaaactaatttgggatgattgggttgttcaaaatacgaggggggatatgtatccatgattggataatttgcagctccatcatggagagtttataaaactgattcagaaatgcggaatcccatttcattcccatctagttttcgtcctatgatcatgttctcatgtaacatcgtcttactggaccagtatgtactctttggctggtatgctaagttgagctgggttcgacactaaaaaaaaagttcatcatggccaggctatctggactttgcgcagttaccttagtaatgctattgcaagacaacagcaagaacctgttgacgctttttcgtggccaacacacgatcacctaacgatttgcggtgtaatcaacggagtcgtcaaaatcgatagatcaaaatcggctagtgaaaccgatttctagattaattcactttcgcgaaatcaagcgactaatttacaagcaaattagcaaagaggataaatatcgtactatgaacgactagtttccgagcaaactagcaaaggataacctcctcgctttcgtggagaagcacgaccatttttcagcgcaaagcggcaaagattaactaaattctagggttgctagaacttagccatgaaaacaaaattaaaaagaacaaaaaaaagtaaaagagatgaatagtgatcgaaattgttcgggctttttttctgccgacgcatggactgactttataagcaccacaggccgcatcaacgatctcctttttctgctatcgttccttccttccttcctatccggattccatactggtatactgcatgcaatcaatcaatgatcttctataatccacgacaccttgtggcctcctgtagcctattcctccacaaaggatccggatgcctccctgcatgtaagctacacactgaccctatgtggactaatacttgcgacacacctctgattacatgtcaccaaaccaggttaattgctgcagccacacccaacagtttgcacacacgatctcttagtgcatcataaattcctgcacatgcaaactgagtatattttccaagtaaatcatttgacagttttatcattttattcaaaaacaatctggcctgcacaaatgtactaactataagccaaattatggtgcaaacacatgcccccctgtttttggtataattagaacttttgttttaccgaaaatactagaaaaattaaccactcatgattgactatactctaaatgtgatgttagtcctaagccaatccatagtcgtcctcccaaaatgatacttaaataagtatcgatcctgggaccacccatagtcgtcctctcaaaacgatactcataagtattcgtcctgagaccaccatagttgtcctttaacgatactcaaacaagtatctgtcctaagaccacccataatcgtcctctcaaaacgatactcaaataagtattcgttctgagacaattaaacttcctgcaatacactaggataaaatatttctagtatttttcactgagaattttaagcaaccttcacccctcataaagtaaacaaacttattattcccaaaaccaatagaaaaaattgtttgccatactaacttacctatttgaaacgatttttcacttattttttttataagccttgactactctagtttaatcaagacctacaccctgtaaaagcacctaatctatagataggcgatataattcatcaaagtatatttcacaacccatcaccgaacttttccatcttacctagtctttacaagtaattaccagagaaactcataattcatttgattcaaattttactactaattcggtcatccctaatgtccattaaaccgaattaacctaacctccaactcgatctggtcatgatactacactatcagtagctattaaccaccagttactagctcggccagaacgacaagacaagcccctgtctccattgcattcagctggccgaaccatcatactccaatgacgcatgtacactactactagaacgtagcaccaagaccacacgcatgcactgtgtacccctatcagaactaccaggagccagcactactgcatgtattcaccacggtgctactactagataaatcggcttccactgaattgctatgcaaactaacactactatttaagccgatttattcaatataatcacacctctactaatcagaaaacaagaaaactgttgcgtcaagtaatttgctttgctattttcctccctgaatatatgacgaacagtaaaggtatctgacaaattaattaaatctaaacatcggtccaaataactatttattttttttagtccataaaaacactaaacttcccattaatcaattgaactactaaaagtgaaacatcaaaagcatatgcatccctcgcaccaatatttaccaagctttgcaaaccgaataatagagcatctactcggtctaaagtgcaagaatactctaaacggactgatagggaccaatgtgtcataaacaatattacttagtgaaattaaaacagtaccagctccttgccaactcacacaaactatatacgaccgaaataatttctaaagagttataaaaaatcacggttatttctagcacctaaatgtttcggtctctaaaagtgataacaacacctacaactaatagtcaatatgcaagacaatacggtaacatccctccataatataaagattgatgaaccctgagttccactcgtcactcaaggctgttgttggcccgatctttcggtgagttgagataactacgatttgtggaaaaacgttgacgatccgactacaaccgtacgagacgttgtgttgcgccttagcgatcgatacacctctccgtgggttgttgatcttgccggtgcagatcaaccctattcctgcaagcaaatcgaagaaacaagcaagaacaagataaaagcaatctgatattgcaaataggaatttaatacaaatgataagttggggttccgaagaacaagcagacggacggtctagccgacacgcgcgctgcaagcaagtagcaatggctaaactttaatctatcaaaacccaagaaactctaaaggctacctagctatttaaggaggtgggaggacctctaggtcgtcctccacctggttggggcgcaccccacatgggccccacttgggccggggtcccaaacgaagttacaagtccattggcccatgacaggtgacgcagcaccttgtttttgtatttgcggccaaacgagatggagtctgctgatgaggccagatctgttggaaagaggactccgagaactttccatcaagtactcatgggacaaaaacggaggtcgtatgcagattcggtagccgtgtgaagtcagcagtgtagcaggtggccgaatcggattccagcacttggaggacttgatcttgatatcatcttgttcatccatgatgtgagctatggttgtatctgtagtagccatggtcacatcatcctccccttcttcacggaaaaccgtcctcggtttttccatatggtgctcgccacatagtccattcaaaataacctgtttcatccaatcaaaactagagaaactcgaagttgtgtgattagcaataacatgtttctctaaatccgaacaaatgaaaactctatgcaccaaatatattcctctatcattatattcgccaaagatatggaaaatagcattagttggacatggcaaatcagacttagcaaataatttctccttcaaattatcgagctcacaaaaatcatcaaaatgaacatagcccaaaatattgaaagaagatctcaattcactctcctctacttcatcatcaatgtgaacaacatgtttaaaattagcacacaatgaaacactagatatagtatgtttattcactagttatggcatggatataagtgaagtactatcgcacaactcttctttatcacaaggaacagaatgcaaatcaacttgtgacaaaggcaattcagaagtaggttccactaaagtttgctctaggtcagcatggaaagtggaaaaatgtaattcattagaagcatactcaccttgagtaatttctgcaccatttaatttaccttttatgccctcttcagataatgtagctgcatcagccttctcctcattcgcgagtgatggaagtgacatctcaaacatatcgttcttctcattttggagacttttctgaacttcctgcaaaacatcagtgataggaggcacaagcatatcttgttgctccgttggattctccaaaattttgcgctcaacaatgcaagcaagcatgaacaattggcctatatgattatatgtcacattaacaagcccagcctgaatattgaaattaagccctctgaaaaatctagtcattgtgttctcattagattcttgtaaaccactataagtgatacaaattttaaaatcatgaaagtactccctaacagttttgtcaccttgttttagatgttcccatttctcaaggagagcacgtctatagtatgaaaacacaaatctttttctcatcagtattttgcattcatcccaagtttcaagcttatttcccacagtatgccatcaaaaagatgcagaaccggtacacttattactagcagccttaatcatttgagcattagaaaaatcatactcatcaaattgtttttctactgctagctcccaattaacataagcggcggaatcatacttaccatcaaaactaggcaatttagattctacccttgtaagatcattatcatgtatcatgcgtgaagaagtcgctatatctcgttgatggtgaagatgttgacattgagcatgaccatcttgtttccccttgcgcaatcctgccatggttagcagcaaacaagaaacatacacaagaatatacacgctcctatcaactactaggtagtggcagctcaaatctcacacactcaagcttttaaccaagctcttacaagatcttaccaatgcaagtggaatggtgatgtacaccgactcaaccaagcaccccaatagaggttggatatatcgatgcctcggcaaacacttgctgtacggctgcaatcaaatctatggagctctgggtaggcttaaatatgtagcaaaggaaagcaatggttcaaatcagagaatgcaaagttgaataatggttcaaagtcaagtaccatgctggtcctagactagatcgtactagagacgcgagcctagagacaaatggtaccacaagatagcactaggaacaacttatgcacaactctgatatatgaaagcaaattcaaagatacaactgatttttctcttttccttttttttttcttctttctttctttttcttttcttttttttggtgcggcttttctttttcttttttttatgcacctttctgccttttttttcttttttttggattttttaacaaaaacaacctcaaggactataaagcaagtttacagggactcaaatgtaaatataaaaaaatacagggactcaactgtaaatgtccaaactcaaaattaaaactatacaaaaatggaatgctctcgtcccgtagattccgtttttgcagacggatctccaatccgatacacaaaaatttttcaccaagctgtctataccgtgaggagaggggatggagggagtcggactcaccaatgccgagaggaaaccgtggctggagatctcaccaatgtcgatctatggaaaggctccatgtgaaaacagagacaaatccctccctttttcttttctacgttggctaccaaacagaaaccaatccaatctaatctagacagatctctcctccttccttcttcctcgcacacacatgcacggcaaaaggaacacacggcagcaacacggcctcgggacagcgcagaatcacaccacaaaaaactagatgcaactcagcaacaacaaaaccgaccgatagaaacttctgaaaaactagaaaaatgaaaccttggcggaaagacgattccgttttcgtaggtcctgacgacaacaaagcacacgacgacgatgatgacagtggtacaaaacgtgaccagaactcgaaactctaaacgaactaaacgctatgaccagcaacacgacgtgacgatgcaacacaaaattcaacaaagcaaaaactgaaaaaaacaatgcaatggcacaatatggctaggtgaatgatacgaatttttttgtatggctattttctggttataggaagataaaaactcaccgagcaacgaaagctctgataccatctgatgaaccctgagttccactcgtcactcaaggctgttgttggcccaatctttcggtgagttgagataactacgatttgtagaaaaacattgacgatccgactacaaccgtacgagacgttgtgttgcgccttagcgatcgatacacctctccgtgggttgttgatcttgccaactcacacaaactatatacgaccgaaataatttctaaagagttataaaaaatcacggttatttctagcacctaaatgtttcggtctctaaaagtgataacaacacctacaactaatagtcaatatgcaagacaatacggtaacatccctccataatataaagattgatgaaccctgagttccactcgtcactcaaggctgttgttggcccgatctttcggtgagttgagataactacgatttgtggaaaaacgttgacgatccgactacaaccgtacgagacgttgtgttgcgccttagcgatcgatacacctctccgtgggttgttgatcttgccggtgcagatcaaccctattcctgcaagcaaatcgaagaaacaagcaagaacaagataaaagcaatctgatattgcaaataggaatttaatacaaatgataagttggggttccgaagaacaagcagacggacggtctagccgacacgcgcgctgcaagcaagtagcaatggctaaactttaatctatcaaaacccaagaaactctaaaggctacctagctatttaaggaggtgggaggacctctaggtcgtcctccacctggttggggcgcaccccacatgggccccacttgggccggggtcccaaacgaagttacaagtccattggcccatgacaggtgacgcagcaccttgtttttgtatttgcggccaaacgagatggagtctgctgatgaggccagatctgttggaaagaggactccgagaactttccatcaagtactcatgggccgaaaacggaggtcgtatgcagattcggtagccgtttgaagtcagcagtgtagcaggtggccgaatcggattccagcacttggaggacttgatcttgatatcatcttgttcatccatgatgtgagttatggttgtatctatagtagccatggtcacatcaaagacccatatgatatccaaggataagaataaaaccatgagggataatcatacatacctgagaattggttccatgacataggtatcggtggcataagtgaagaatatgaataatgtggtggcgaaagaacctgacgattggatacaaaccattgatttggtgcatgcctctgaactcccttctcctcttttgcctccacttctcttttaacatctttttcattatgcacctgaacacttcctttaggaacccatgccatacctctatccctcagcttttctgcacttagtttgtgtaactgcttcttctgccaatttgataagatacatgagtgtctcggttggctaccattgcccacgaagctcttcggcggattctgatttattactaactctgccgaagaagactctcacttcatacttacattgtgtaaattttctagttgttgtacacgtgcatgccccccaggttcaataacctttttctgaactgaagccttttttacactcacacgtgctaatcgcagcaacgctctcggcgacggcggctaggataccgataaacagatcgggaaagaaagacaaaaattatggatagatcaatttcggccagatcaggaccgaaactctcttccccagtggagtcgccaaaatatgttgacgctttttcatggccaacacacgatcacctaacgatttgcggtgtaatcaatggagtcgccaaaatcgatagatcaaaatcggctagtgaaaccgatttcgagattaattcactttcgcggaatcaagcgactaatttacaagcaaattagcaaagaggataaatatcgtacttacgtgacgacgaacgactagtttccgagcaaactagcaaaggataacctcctcgctttcgtggagaagcacgaccgtttttcagcgcaaaacggcaaagattaactaaattctagggttgctaggactcagccatgaaaataaaattgaaaagaacaaaaaaaagtaaaagagatgaatagtgatcgaaattgttcgggctttttttctgccgacgcatggactgactttataagcaccacaggccgcatcaacgatctcctttttctgctatccttccttccttccttcctatccggattctggactggtatactgcatgcaatcaatcaatgatcttctataatccacgacaccttgtggcctgctgtagcctattcctccacaaaggatccggatgcctccctgcatgtaagctgcacactgaccctatgtggactaatacttgcgacacacctctgattacatgtcaccaaaccaggttaattgctgcagccacacccaacagtttgcacacacgatctcttagtgcatcgcaaattcacgcacctgtaaactgagtatattttccaagtaaatcatttgacagttttatcattttattctaaaacaatttggcctgcacaaatgtactaactataagccaaattatggtgcaaacagaaccatttggtacagaaactagtgagtgtggcaaaaatgttgctacggtagtgatcataacggtggtgcgactaaattataacagtgttgattgatagcaatagtacaacggtaaattctatatatagaaacaaatgataatgtttgtatatccaactctattatatacaaaatagaattgcatatatagtaatacgagttaaaagtgagtgtgtaacaaatcctatttgaccagctcgcgcaaatgggctagaccgccagagtaccctttatcttatactagtctcttctgattttatctgggtgactaattaggacgaagaggaggcactaatcagaggaccaaaatgtggcacccaagcattttttatcaaatgtggttagtgtttggcaacacaggcaagacaagaggaggaagagatcatgggggctgataaactgaaaaagagggatttaactcttgggatgtagaaagctgagaaaaggcttgagtcctgacatagtggtcacctttcttttgggggagagaaattaggatcaactcttacctttccagcattcctttgtactatatgggtttattttatttgccagggtattttcataagaaaatgaatagtccgagggggaggttttactggcaaggcactgccaagaaacagaagtaccacttcatcaaatggcaagctttgtgcaggccaaaagattttggggggctgggttttatggataaatggatactgaaattggagtcaaataattcagagatgtgtatccaggtcctcaggaagaaatatatggggcaaaaaagttttttccagagtactgcaactagggggtcccagttctggaagggtttacatgaatgcaaaatgtggtttggaaatttgattaaaaaaaagtgggggatggcctgaccaccagcttctggaatgatgtgtgggttgataaatgtcctctaaagatcctgttccctgacttgtatgctgtggactctcaacaaaatgctacattcagagatatttatcaggaaggggcttgggagttgagtttcagaaggaatctcaatgaagaggggagagctcagttaattgagctgctctctaaaaatccaggatgtggtcctgaatggggggggggggggcactataaagtggtgtggcctcatactaagaagaagcagtttacctctcgattaatgtatagactcttgacttttggaggggtagtggattcagacatgcaggggatcaggaggagtaaagttcctttgaagataaaacattttgtttatcatgtgggcaggggaggattccttgtgcctttcagctggttaagaggaactggaagggaggagagaataaatgcagtgctgtgtggggtttctgaaactgttaatcatgtcttgttcaattgccctattgcaaaatttacttggtgtgtggtcaaggaagttttgcacttccctgcaatccctgtctctttctgggaaggcttagatttgttaaaacagaagttaggggggaagcttggtgtggtggtgtttgctagttggatttgggtatttggctaactaggaatgactgatttttgagaataaattgcttaagtctcctttgcaggtagtttacatgataatttcgctgttacaacgctggaggctcattcaaaagaagaaaagaagaggttcgtttggagcagctgattgaagacctgatgaccaaactgcaacaactccgtccttcagggaggctgccaaatgatttagatgttggttaggagtagtttttatatgctgatcttgggggcgtttgtgttttctggaacagggtgtgggtgccctatgcctggttgctggaatttttccagtaacaacgatgctgtaaaatcaaaggtgttttttattattattctgtgatgaacaattggcatcggagattatcggttttgatgtttgaaatttattcacgtagtggttttggagatgattggatttacaggtgaattacaagtgctgttattttatgttaccggtcagaccgggcagtggttgccggtcagaccggcgtgtatcgcgcggtcagaccggcgcagcccgcggtctgaccggccgactctgtgtcgatttcggtttcgggttgtttgtttggatatccgtgattgtttcatgcttatggcttctagatgaatactatgcgtatgtaatactgttgtttgctaacaataagtcaagttggagatagcttggtctcggaatatggtttctttgtttattttatgtgtaggtgaatcgatgcctcgggagagtatttacagtgatggaccgggagttggcttggggataagacgacgtccgtgatggtcagagatcatgcgggatactaaggctaaagttcaatacacgtggttggtgaagattccatatggcatacaatggaggtattgtgtgcgtatgggatgcggagttgaatttggaaggagtccaaatttggtatgagtggttatgtaaagtttgtttcttgtactaaagggtttcctaaggtgtttaggacttctagtatgagtttggttcgtggctttaggctgcctacctcagggtataaatagagggggagcgtgaggcttcctgagattttttagagcaattgagctgatagttgagtcaaggtttcgagtttccttgagatttttgtaaggaatgctgttggtgcactttgtaaacatagggagaatcaataaagtcgtcatccactttaggagttcttcgatttgtttttcaccgggtttcgacggtctaactggcgacacaccggcggcatcgtggcggttagaccggcgggtgcaaggcggtcagaccggcggcggcaacaggggcgacaggcgattccagggcggtccgaccgagagacaaggcataggcacagtcagaccggcagatcaatcttggtcagactgatctccgtcgaatttgagggtaacttttatttccgctaaaagttttggtttttgggtataccaattattcaccccttctggttggcttagttgttgtgtttcgatcctacaagtggtatcagagacttgttttcttctttggattttaaccgatctagagttcttgccatggctgttagattttcaactaagcctcacgttttcgatggaacggattttctcatgtttttgatggaacggatttttctcattggtgtagtaggatgcaatcttacattatggctgaagattatgatatttggagaaaagtttctcatccttatgtaattcctgaagaaattaatactgctgctttaaaaactgagtttgaacaaaattgcaaagcacgcaatattcttttgagtgggatttctcgttcggattatgatcgtgttgctcatcttcaaactgcccatgagatttggattgctttgagtaattttcatcaaggaacaaataacattaaagaacttcgtcgagatcttttaaaaaaggagtacattaaatttgagatgaaacttggaaagctttggatgactatctttctaggtttaacaaaattttgagtgatcttagatttgttgattcttcttatgatgctaattatccacaatttgagatttctcgccactttttgaatggtcttgatatgtctatttgggagatgaaagttacatctgttcaagagtccgttaatatgtctactttgactttagattcgctttacacaaaactgaaaacacatgagatgaacattctttctcgtagagttgattctaagtcgagtgctttggtttcttcttcttcttctttggatgttgatgcttcttcatcaaagtcttctattcttgctttatttaatgccacatccgatgatcaactcgaacagttcaaggaggaggatttggctttggttgctaacagaattgctcgagctatgaacaatgtcaggttcaggaagagaggtggtccaaatcattgctttgaatgtggtttgattgatcatcttcgttcgcattgtcctaagcttgggagaggcaaaagggaagacaatgatagagagaagaacaatgacaacaagccgaagggtacattcaaaggaaggaagatcaaggagaatctcaagaaggcttttgatcaagtctacgccgcgtttgagccactaagcgacgtagatggtgatagtggagatgaagataagggaaagaacatctccgttgtttgcttcatggcacgtggtgaatcatattcagagtgtgaagacaatgaggtaagtgctcttgaggaagctattaatattttgagtgcaaaaaataagaagtgtgagaagatgtatagaaaataggagtttatcattgaatctcttaattctgaaattgctagattaaaatctcttattcctaatgatgatgattgcaaaatttgtgaggttttaatgaatgagatttcaaaaattagagatgtcaatgttgcacatgatttgaaaaataaatcctctcttgctcttagttttgctttgcacacacgcactttggatgagttgtttttaactaaaaagttgttgcaaaaatatcaaattgtttttcatgctagtttgatgtttaacatgatttgtgctaagaagttaaaacaaccacatgatgttttagattgctcaacatgtactttgtataagaagaaactaaaagttgctttaggtcgtgttgagtacatggaagatgttgtgaaaaacaatgaagtgctttcttgctctaagtgtcgtaaaaacaaaggtgttatggtagattgtgaaaattgtgctaatttggaaaaagaggttttgtatttgaaaaattctttgcaaagattttctgagggtaaaaagaacctcaacatgattttagattaatctaaagttagcacacataaccgtggtttaggttttaatccttatgctcatcatactagacatcctcctgttgtgttaggtgttggtgctagaggtggtgagattttggttaaacctgatactaataaaactgtatttaaatctgtgggtatcatgtctacattgagtgcatcttctttaaaatccaatgttatgcatgcaaaacctcctgttgttgcttgtgttgctaagtcttctgattctactaatgtgtctaataatcgtgaaaaatatgcttgttctttttgtggcaaatatggatatattgatggtttttgtttcagattagctcataaacagaaaaaggagagagaggttgcttttgcaaaatcaaagtggcaaaaatctaggtttccttcgaggaaatcggttagaccgcagtggttcccgcggtcagaccggcgaccggtcagaccggctgcagagcctcggtcagaccggacaccagtcagactggcagtgaagcggcggtcagaccggcccccggtcagaccagctgcaaaccctcggtcagaccggcctcggagaaatttttctgaaaattctcaaactgtaattgcacatggatatatgcctattggatcttctggtcgtgtgtctcagtactggattcctaaatttttgttatcatctaaccccagtactgaggcttcgacttctgcttgtgtgtaggctttgatggcgcggaaggagaacatgtggatcgtggatttcggttgttcgcggcacatgaccggtaataaaaattggttctcctccctaacaaaggcatccaagactgaatcgattatctttggtgatgtttttacaagtgtcgttctcgctacaggtttggttaaggtaaatgagaaatttgaattgaagaatgtagctttggttgaggacttaaagtacaatttgctttcagtttcacaaattgttgatgaagattttgaggttcactttaagaaaactggaagtaaagttttcgattcttgtggtgattctgtgttgaatatttctcgctatggaagagtgtttaaagctgattttgataattctgtttcacctgtgataacatgtttggttgctaaatttgataaaaatgtgatgttttggcatcgtagacttggacatgttggttttgatcatctcactaggttaagtggtttggatcttgctcgtggtttgcctaaacttaagaaagattttgattcggtttgttcactgtgtcgtcatgctaagatggttgcttcttcacatgctcctattgttttttgtgatgacggatgcaccgggacagctattacacatagacacggttggtccagctagagtgcaatctattggaggaaagtggtatgtgttggttattgttgataatttttctcgatattcttgggttttctttatggcaactaaggacgaagcgtttcaacactttcgtggtttgtttcttcgattggatcttgaatttcctggttctttgaaaagaattcgaagtgataatggtggtgagcttaaaattgcttcttttgaacaattttgcaacaaaagaggtcttgaacatgaattttcttctcctcgtgttccgcaacaaaatggtgttgttgaaaggaaaattcgtgttttggttgagatggctagaacgatgttgggtgagtataaaactcctagaaaattttgggctgaggcgataaacactacatgttatatttcaaatcgggttttcttgagatcaaaacttggaaaaacttctgatgaactttgatttggacgtcaacccaaagtttcacatttgcgtgtttttagttgtaaatgctttgtcttgaaatctggaaatttggataagtttgcagcacgttctaccgatgcattgtttcttggttacgccgcacattctcatggctatcgtgtacttattttggagactaacaaaatcgtttagacttgcgaagttttttttgatgaggctagtccaggtactagacccgatattgcaggtacattgtcacaggttcagggggaggatggtcgtatttttgaagacgagagcgacgacgacaacgacgaggtcggctcggccgatcagaccaggcgccaggccggttagaccgccggcaagccgccggtcagaccgacacaggaggtacggtcagatcgacctgagtcgtcgggttccggtactgttgatgctgatcgagatggtcctccggagattacaacttcgactagtactgatacaggacgtgaatcaacttcagaagtcactgctcctttgcacattcaatgacgacatccgccggaacaaattattggtaatttaggtgagcggactacaaggtctaaggtaacgactcatgatgtttatgcaaattctgcatttgttgcttcttttgaacccaaagatgtgtcacatgcattaactgatgaatcgtggattaacgtcatgcatgaagaacttgaaaatt

SEQ ID NO: 6405 - DNA, 8776 bp, Oryza sativa
  unsure (1)..(8776): unsure at all n locations
atatttctttcttaatagtacaaaactatatcttatatagtctctctagttatataattcttatcggtttgaacaagaataaaaataaatttttataaatttgactatcaataacaatgaccatgatgattttggagccaaacctacaaagctacattggatgttatgttatccatgagagatgcttttgccacatgatcaacctggtggtccaagcatgtattattgtcattgagaatttattgatttttaaggtgtcgaaacatgaattcggcaataataaaacggggtagcgcacgagacctaaaagtggatggatgtggagacaaaagatttagacaggttcaggccctctcgatgagaggtaataccctactcctgtttggggatttgaatccgccgggtgtattatagatctgacgatctagttgtctcatgccccctagagggcttcctgcccaccttatataggatggggggcaggattacaagatagaaaccttaaccaatacggtatcggtttcctaaatctactttacaatcttatcaaaccaggactttaggccgttccataatatatagggaaacgtaatacccaagtcacgatctgttacatattccatacatatatgttatcccctattactagtcggataaccatgccgtgtggatatggggtacccataatctccacagtagcccctgagacccttcacagtcgaaaatataatcttctctcgaactagattactccaaagccgagtgcttcaatcatcttcgccatggtctcccgagtacttttaccaaatctgaggactgtggagggctgaaaaataaagtcaggtgcatcgaatagatgcacctaataggtgtagcccctgactatgtggttaattgaaccaaccaaacatatagtcaaggaataaataatctaaccaaccgagtggttttgataattgtaatcaaccaagtgacttgatatcaatatatagcatatgcggtgtgaatccccgaataatatgatccaagtgatataccgactgcttggcataatatgatgcgtacaacctaaagttgacaacatctttgaaagttcacatagcaaaacaactataaagaagcttgaatgctgtgaataaagaaatttccaaagtattgggcatacgccatgcgcacactgctttaacagatgtgcttaagtccctaaaagacacatggtttcaccacacctgaaaatatatggcacatgtggtataacatccgagtaagtaaactcataaaggatttaccaaccgcctaaaaaatgaccataatatataatcagcctaagccataatattggtcaataaaaatgcacacttacatggcaaaaagcaatgatattatatccaatcaattgcttgataaacccaaacagcaccttgactatataaaaaagtcagcggggcagctatataaagctttactgtttgacaccttttaagatgcattgtaccaactcctaaaaagtcgagtaactgcggtataaaaggattttaaggtattgggcacttgatcacgcgcactttggcctaagcgaaaagtgcctaagtccctaaaagaacgtgacaggccacacctgaaaatatgggctgcagacatattaggcctaggccaaaaaatatgccttcgacaccctttaaaggatgacgcatgtaacatgctcccgagtaataaatcttccgggtaatatagaccaagtgtagctcatatgaatagcttctgatctgaatgattatcccttatgggatactccaaaataggtgtaacaattgaatcccgactggcgcaagtattcagttgataacccttacggggaataataaatagtccagtctttgagcatagaaaatagacccatgatcacgaattcatagtgcatatatccagagcaagtccaaattgaaggtatgatacttgtgtttgagctagtaaacccctgagcatatagcttgtccttctgtcgtagtcacaattgtccattgatggtagcaatcaaaagtgatgaagttgcatagctgtggagcgaagaaaccagtcggcagcagacaagtcagccaacagtgaagatgaaggcatccagcaacatcgacaaaattgagcagccatggtggcggaataatcagtcggtgacagatgaggcagccggtgaagaagatgaagatgcccattagtggcgacataataagccatccgtgaaggcgaggataccagtcggtggtgacgaaagcaagccgacggtgaagatgtagacacgtatcaaaggcaataacgaaatccaccaatcatgaaaatgaagaaaatagtcgacgacgacaaatgcaaccgtcagtagcaatagagatgatcgactatgatgacgaaattgctcatcaaacagtagtagagtgggctatgttgaagaggcttgacagtatgttgacgaagatgacgatgttggtgatccagccaatagcagtgtagcaaccaatgataatgacaaagacgctcatcagcatttgcatagtaggtcaaccgtgaaggtgaaataataagtcggtgaagacataatcatccattagcaacagcggagatgtcagggccgatgaaggaaaggtgctggtgatgatgtcagtgacaataatccttcaaattaatgttatagctgttgtagatgcttcacttggaggagagttaatgctgttgtccaactcgtctaaaccgaaatatttgatgttgttgaagtagattgtctgctccgaagcaaagatgaagataatgactcctggagttgactcgttggctgattaattgattgctccatctttgacataaagcttgtcgaattttgagccatgtatttgtgtagccccgactctttgtttagttgggaaacaactgaacatagagtcgagaattatagcttcttatcgtcgagtagtcattgcttgattgaagataagtgttgaagatgtccaagtagaaatccatgatgacaaagttgcattgccgtgatgaagtgacagaagcaaactggtagtgaagacgcgcaattgtgacgataaaagcgccagtcggcggcagacgtagacagcttgcgttgaagatgatgacgcatattagcggtgacggcgacgtagccaaccgtgaagaagatagcatcagtcggcgtcataacaggccagctatgcaggcggaaacaccagtcggtggtggacgaggcggccggtcggtgaagacgtagacgcccaacaacggcggcataataggccagccgtgcaggcggaaacaccagtcggcggcagcgaaggcaagccggtcggtgaagacgtagacgcccaacaacggcggcataataggccagccgtgcaggcggaaacaccagtcggcggcgggcgaggcggccggtcggtgaagacgtaaacgcccaacaacagcggcataataggccagccgtgcaggcggaaacaccagtcggcggcgggcgaggcggccggtcggtgaagacgtagacgcccaacaacggcggcataataggccagcgtgcaggtggaaacaccagtcggcggcagacgaggcggccggtcggtgaagacgtagacgcccaacaacggtggtataacaggccagccgtgcacgcagaaacaccagtcggcggcggacgaggcggccggtcggtgaagacgtagacgcccaacaacggcgacataataggccaaccgtgcaggcggaaacaccactcggcggcgacggaggcgggccggcggtgaagtcgtagacgcccaatagcggcggcataataggccagccgtgtaggcggaggcaccagtcggcggcgacggaggcaggccggcggtgaagtcgtagacgcctaacagcggcggcataataggccagccgtgtaggcggaggcaccactcggcggcaacggaggcaagccggcggtgaagtcgtagacgcccaacaacggcggcataataggccagccgtgtaggcggaggcaccactcggcggcgacggaggcaggccggcggtgaagtcgtagatgcccaacagcggcggcataataggccagccgtgtaggcggaggcaccactcggcggcaacggaggcaagccggcggtgaagtcgtagacgcccaacagcggcggcataataggccagccgtgtaggcggaggcaccactcggcggcaacggaggcaagccggcggtgaagtcgtagacgcccaacagcggcggcataataggccagcgtgcaggtggaaacaccagtcggcggcagacgaggcggccggtcggtgaagacgtagacgcccaacaacggtggtataacaggccagccgtgcacgcggaaacaccagtcggcggcggacgaggcggccggtcggtgaagacgtagacgcccaacaacggcgacataataggtcaaccatgcaggcggaaacaccagtcggcggcgaacgtggcggccagtcggtgaagacgtagacgcccaacaacggtggtgtgaccaaacaaccgtataggcgaagacaccagtcggcgacgatgacggcaagctggtggtgatgttctgactgatccattcctggagcgtaagagataagcttaaagccatgtatcccttttgtgcatatctggatctggatcctgcagaacaaacatataggatgagtagtatctgatataaatataatactcgcgaaaaaatcaagtatctaaaaatatttataaatatgtatttcacctcttgtcaattttgatttccccgagcagatgactctgtacgtttaaacactctgtccgactagtcatagcccccaagcatcgggagtcgacctaggcatttcccaaacatgcatatgagtgatatgagttcgtcattaatggaacaaagtttcacggattagaatttactactcaggtacttttgcaattattaagagcagaaaataaatttatctcatctctatgcttttgatttattccgaataatacttagcaccttgcgttactcggtccatccaacgagcccccgggtgctaggaatcggcccaaaggcaaccatccattggcaaaccaaacggaaagcataggaagatagaactccataactcgataggtacttttgtactcagattatgtcgcaagcaatcaagataaatattatgaaaattgtttaaaaaatacgatataacatctatagcccccgactcactagtcaacggcgaaccagttgatgtagtgaggcaaaggaaaagacaaaatatcatataaagaataaaataaatgatgacttagcttcgtcgtattccctcgatgacagcagaagtagccgatgtgggaataaagcagtccatcaatggtgacaaaaacaccagtcggcgccagtggaaccaagccagtggtgtagatgatgaagcccattaacagcggcgaagtccgccaaccgtataggcgaaaacaccagtcagtggtggcggaggcaggccggcggtggagtcgtagacgcccaacaacggcggcataataggccagccgtgtaggcggagacaccagtcggcgatggtgaaagcgaagttgcccccaacggcgacataataggccagccgtgtaggcagagactccagtcggtggcggcaaaggcaagccggcgatgaagtcgtagatgcccaacagcggcggcataataggccagccgtgcaggcgaaaacaccagtcggcgacgccgaaggccagccggtcggtgaagatgtggacgcccatgaacggtggtgtgaccaaccaaccgtataggcaaaaacactagtcggcggcgacggaggcaagccggcggtgaagtcgtagacgcccaacaacggcggcataatagaccagtcgtgcaagcgaaaacaccagtcggaggcggcgaaggccagccggtcggtgaagacgtggacgcccatgaacggtggtgtgaccaaccaaccgtataggcgaaggcaccagtcggcggcgacggaggcaggccggnnnnnnnnnnnnnnnnnnnnnnngcaacggcagcggcgcacaccaaccgtggaggtgatgaaaccaatcggcagcgacgaaggcggccggcggtacatgtataaaataatagatcaaataataattagtgatctgtgaattaaatctaatttatataagaaaatttagaacgataaacctggtttgtgatccaattttgattcaaggcctgtcaatggatgaaccgtagcatgcagccgtgtcatgcagccgtgtagacatgtaatcgtcggtagcacatgcatggattagtttggagaccactttgtgcatgtaatagctgatttgtctatggattaatttccttgaccacagatttgaccaggtatatttaatttgtatcctggactttgtgtcttgccgtacgtatccgagtagtattgacttggtgatgtacaggctcaaccgacggtgatcttcgcatgatttcggcggcggctgcttgctgattgcttcaaatcatgccctggtgacgaaaccgacggaccaacagacatggcagcattgtagcgacggatttgatctcactgacagaggtaaaattgacgataacaagctggttgtagatcgattcgatcggtgattaatctcctggttgattgaccagatccagatagaatttttggcgacgaagaccctgcccttttgttgagaagatcacggccaaagacaagagtagcaccgatgacgccggcacaaagttccatcgcacttctcgacggaaaactcgacgcaacccctacctggcgcgccaactgtcgaaacatgaattcggcaataataaaacggggtagcgcacgagacctaaaagtggatggatgtggagacaaaagatttagacaggttcaggccctctcgatgagaggtaataccctactcctatttggggatttgaatccgccgggtgtattatagatctgacgatctagttgtctcatgccccctagagggcttcctgcccaccttatataggatggggggcaggattacaagatagaaaccttaaccaatacggtatcagtttcctaaatctactttacaatcttatcaaaccaggactttaggccgttccataatatatagggaaacgtaatacccaagtcacgatctgttacatattccatacatatatgttatcccctattactagtcggataaccatgccgtgtggatatggggtacccataatctccacataaggcaaatagtttattgattttaatgcatatgtgacatcatcaaccacattgtctaagcaggtatgggcgttattactatcattggaggtcacacactgatcaaggtgaggttataggactattgtagaggacctttgaggatatttggcattaacgtgaaacataactggaacacaacatacctcatgccgcgtcagctgaaagggtatgaggaaataatttatgatttgattgattcattgcacttgataataaattatgccgagatgaggatggtgatggtgatggtgaggttttgcttcttaccgaggaagaatgggacatagctatacgcatgtgtaaatttgtaaagccctttcgtagaacttcagttttgctatttggaatgcactatcctacttcttgttcggtgcatgaatgtctttggaagttatcacttatctttgaagaaaaccaacatgacaaaattttagcttccattgttaaacccatgcatgaaaaattcctcaaatacttcactgctattccaccattattgctttaatttggtacttgatcttcataaaaagttgaaaatcgtggagactactttcatatcattaggtgatgcaattgatctttgattattcaaaagtttatcaacatgctagagatgagttgtttagagttttccatctgtaccaaactaagctagatgttgctcactgggtgactgaggagaccccacaaaaaagaaaagcaaatcaagtgccctcaatttgtggaagaagatcaggggtaggacaaattggaacccggatgttgtcacgtcccaaaatgactctaaaatacatcctctaaattatgcctagaataattaaaaaactgtgtgaaagcctccaacaattaaaatgtacaaggttaaaagtcaaataaggcttagaggatttttgtatatttcctaaaagcctaaaatacgtaaataaattttagtggaattttcagagcacaaataataattgttaagaaataaacaaagttaaaaaggttttataaaaagaaaaaccctaaaatccctccttctctctaatgggccaaattcggcccatctctctccccctctctctcctctccccgcggcccactcggcctctccccgcgcgcgcgccgctgacgggcgggcccgcccgccaccctcgctgacgggtggggcccacccgtcatccccgacctcccgccgctcccgccgcctcccccgcgcctagcgccgccgccgccgccgaatccgtcgcatcccgtcgtccccgcgttcaatcaataggggggaattactccccgtgatcccctctccctttccccccatttttccctctctctctcgcgttcaaacgggcggatttgcccccgcaaatctcgccggcgccattgatggcggccggacctcctgcgccggtttccttcccctccggccgctctctcccccttccaaccctatttaaaccctccccacacctcctccgtccgtttc

SEQ ID NO: 6406 - DNA, 9453 bp, Oryza sativa
accaaccgatctttagttccgggtatttgaaccgggactaaagataacgatctttagtcccggattggtagtcccggtttgaaaaccgggactacaggggggttacgaaccgggactaaaaagcacttctccaccagtgtatattcaataaaattggcacattctaattgttcttttttcaaaaaagaatacgtgacggtaacgctagctcggacggttgcgcggcttgcgccattgccatggctacgtgacgacggcatgcaagtgctatgctgtacgctggggccggctcgcgagcagaatcaccagatatggtgctcgcctatactgtgttcatcgagagtaaccgaacgaaaatgtatatatgtaactgaagttgcggcgttttgcgtgcatttttagtaaaagtcatcgagggcaaaactaccataaaagagaacgtaacaatccgcctcaccatgtcttctgcgtacacccttgctcccgttaaatttataagcacataatgatttaatttattttataaataaattatgacattgtagatgtaaactagcataaacgcatcataaaatctacacatgtaaactagacagtaaagcatgaataaatcgaatatatacaacatgttgaacacgtaccaaggataacagaagaccggtttctctgcagaaagcatgggcggacctaggggtgtgccgggttggcaccggcatacccaatttcttttgggaaaacactaggatgtatatgcaatcaaaggacagaattaaaaatagaatactctactctcagaaaatagaatataacaatgatcacagtttgtcatcttgtaatcgtcaacaaatcaaatcaggggaagagggaaggacatgaagagaaacgagaaacaatggggaaaaaagaacagctagatagattacgatatggggttgatagttctgaattttatagatttttcataaattatggaccaaatttgaatagaattttgaaaaatcggaccaaaatctgccaaaattcttccatcataattgggtgttttctttttaaaaaatatatagtgaagtgatcgctagaatgggcacacccagtgcaatttttctaggtccgccactggtaggaagtactcgcggttgcgggcgttgatgatggcgcacagcacgcaagcgaagagggagcagtcgcgcgaagcgcttccaaaaaccttattgtcaccttctcccggtgcaggacatcgaagacgaatgttccagagacctgctctcccgatcgccagtgcatgccgatgagcgggatggagtagactacgagcgacgacgtaatacagaggggaggcaaaccttagattgatttcacctgtattccgtggaggcagtgactcaacttatatagaaatatcaggacgcctgcatgatctccactccacgtaatcgaactagataagtcacgctcaacttatccagactccacgccgttttatgcaccggattattcagagtagactatgagcgacgacgcaatatagaggaggaggcaagccctagattgattccgcgtgtgttgcgtggaggcggcggctcaacttatatagaaatatcaagacacctgcacgatctccactccgcgtaaccaaacctgataagtcgcgcgtaatttatccagactctacgccattttatgcatcggattattaggagtgtttccaaaacaatcaaatccgaatttaccgcagcaaaacaaaactgcaaaagaagactgcatctgcgcaagggtgagaaaccaattttggcggacaattgcatatgtcatgcacgcaccgccacgccatgccatgccaggcgagcaactatgcgcatgttccccctcttctctccacctcacatgcctcaagtggctaggagagcatcctcccttataaggagatcttcctttactatctagaatagtcaaggtgtactaaatttcccatccatgccatctcataaggtgggcttttatgattttctaaagaattaatcttcgaatgggctaaggtctagctattaattccgacagctcctaatctcttttactttgttctcgttgttaacactggcccacctttcaccgccggctacacagcttcaattcatcgttatgctgtcgctcgcacgctgctatttcgctaagcccggaaagttaattttcccccctcacctcctatacccactcttcccattccatctgacctcaaccgcgaaccctaactgattgggtcgccatcttttcgcctgagcaagagaaggagggcatcacattcccgaatgtggtgtggatccattggcggaggattcaacgtaaatctactagcataaataaaggtcaggtttatttctttaaatgaaatagtgctacctctattttgtaaaaaaaaaaagattgaagtaattaacaaacatcatctaaataaaaatgaagggagtagtccttaatttaataaaataaacttcaccacaaagtttttttaacaatacctacgttgtattgtgtaatttaaaaaaatagaaattaatgctaagctctaaatctcgcttggccgaatccttctcagcctaattccttttcttctcttcactctactactgttcccctcagattggatgggcctaagcccatattctctccttttctttcgggaaaagtacaccgaaggtccctaaacttgtcatcgagatacaaaatcgtccttgaactacaaaaccggatacaacgcatccctcaactgacaaaaccagtgtaaactaggtccctcggctgttttgaccccggttttgaccgacgtgacagttgactcagcgtgggacccacatgtcagtctgtccacgtcatcacccatctcttttccttcttctctccgttccttctctctcttctctccttgcgacgatggtggggcgcagccttgcagccttgcggcggcggcgtgaccctgtggtgggctggtgagggataggcggcggcggcggacctgctctgcggtgcccggtgagctgcagcgccatcgacgctgtctctccccgttccccttttttttcttttatttttaacttgtttctctccctcgatgccgctgctttccatggcagctagcgtggaggttcgcgcaggcgcagcggctggatgtggccggatgcgaccggaggccaggacgacaccgcccacagccgtcaagcccccacccgccgcacacctctcccaccggccgagctcgccgccgccgtctgcaccctacaggtcgagctactcatcgccaccgtctcaatggcattaatgtctcatcgccagctgctcccggccaccgcccgcttcaccaccggttagctatcccggcattaatggcgatcgatggctaggggaaaagccgcgacgagaagggcggaaaccacggcgccctcgacctcgctgagagacttcggtggtgggcgccctagcaggcgaccgcgatgaggtgcggcgcggctgcgcgtgctacggcgtgaaggtgcgcggcttctacgcggaggatgttagcgacgaggggcgctgcagccgcgctcacgacgacggcaacgagtgacgccaaggccgcggtcacgtgggcggcgagtggtggagcgaccgcgcgaacgacgactaccaggggctccgcggccgtgcacacgatgatgacgtgggtctcctgctccgggaccgttgcggccgtgtggcgggtagtcctgacgagccgcgccgtggagacgcggcggcggtgggggcgcacgtggtagatgaggcccggcgggtggggaagagactggcggggtaaggagggagaggtcgggcagcggcgacgcgggagaaggggaggagagcgtcatggcaccggcgcacggcagtggtggaggagaaggggagcgcaggcactgctgttgtcgggagctggaacggcgggaagcatggcgtggggacgggggaggacagtcagagaggcggctcattggggacagccctcacggatgagcaagggcaggaaggacaacggcggctagggcggcgatgacagcgtgtcggccgaccaactccctcctcgctgcatcgtcgactggggggacttcgacagggcacgccgcgtcacggacgctgtgctcgccgctgcagaccctatgggcgaggagacaagggaggccatggcggtgcccaaccgcgatgtgctcctctacatgagtcgcggtggagcccggtgtggcatggcgccatccacggtgaagacgtccgcgacgcgaagacggcctcggacgcaacggccgctaacgtcgcacgcctctttgccctctacctgccagcactcacctacggcatccacaccaacctcctcctccgcctccccttctcctgcatcgccgccgccaacctcattccctcccgcctcgcgcccaccggctagctgcctagactggacagagaggaggaagggagagacatgggaaggagagagatgatgtggatagattgacatgtggggcccacgtgggtcttacgctgagttagctgccacgtcggtcaaaactggagccaaaaccgccgagggatctaatttgcataagttttataagttgggggatgtgttgtatccggttttgtggttcaaggacgattttgtatctcgacgacaagtcgagggaccttcggtgtaccttttcgttttctttcccgcaggggctaagcccatcagcctagacgcactgccctccctagtaacaaaacccatgcaccagaccaggccaatccactctctttcctctctttcctctataggcaatccaatcgacgcagacgcagacgtagaccaggccaatccactctctttcctctattggcaatccaattgcgtctgcgtcagactcaacgcggcgcggaccacggaaacggagcctgcgtctgcgtcaagccgtccacgcccgcgcgccgccaacgaaccctcgacccaaaacgctcaggaggacgccaccgccattgatggtccgagctctgatctgcttcatctcaccacatctgatcatctccatcggaggcacgaagtatggtccagtggttctttcttggaagtcctaaagaacacaatcgatctaggcgaaatcgctgttcggttggagatcggaggcggagctctaggcctccatcggtcgtcggacgccgccacaagccccacaacctgggagagtgggcgctgcttgcctgcttccattgacttcctcttcagccgcagccgcctacggtgatttaagtttcctctcatctggtctcccttcaatcggcaccaatattccgaaatataatccgaatggcctgacaaccaccaacgaacaaataaatgcatatgctaattgtgactccatgtcgtagattttcaaaattggtactctctccgttgcacaatctaagtcattttagtatttttcacattcatattgttgttaatgaatttagtcatatatatccatctagattcattaacatcaatataaatgtaagaaatgctaaaatggcttagattgtgaaacggagatattgtgaaacgaaggaagtacaatttatttgttcgtggattcagaattggcaaaaaaaaaattagtttgtggaaccttcaaaattttgtcttctgctaattatgtgtccatgggattataaaacgtgtgttaatcctttaatattacaagttaacaactgattctatgcaaaacaaattaagaaatatcatgaatcatcaaaatacttcaattatttctttgtacattgtttgaacatgacatttttctatatgttcatgcacgataaagacataatatccccttcctcaccccaaaaaaatccccaacaattaaaattttatttttctaatactttgtaatttcaatagtttattctacaccatattcactttactttcatagaaatttcattatttatattgagcaataggtggctaacttcgtaccccattcttgaaatcacatgtgtgtcattgtggtcttaggctgtgttcgctgcatgcagttgggaacatatctccagcgcacggaaaatagagcaatccattagcatgtgattaattaagtatttgctaatttctttttcaataatggatcaatatgatttttttaaagtaactttcgtataaaaactttttgtaaaaaaaataacgtttaatagtttgaaaagcgtgcgcgcagaacacgaggagatgggttgggaacccatcctgccgaacaaagccttaaacttgttccgaaaatacttctaatcggtcgtccgatccaaacataaaaatcgaatggctcttgactaacttctctaacactcgtgactacacatcagcacatgcgctgcataccaccttttgccagtgacttgctactgcatacctgttgcttctctctctcttgtctctgcactccatactacttgcatgcattcatttaataatatacaaaacgatttttctcctaaattacttatccaatatacaattcgatcacaccattgtattcgttgttattgaacctttacaacaaaatgtcacatgattatattctaataaagaatagtcatatgtttcgatctgttaacattctttgtttcatacgtaatagcgatatgtttcaatatgtcttcaacatgtttcacaaaatttccaaaactaactgcactactctctctccacctcatccatacatgcatgcatgcattttaacaagtttcaaaatattttttctcctaaactaattatccaatctacgatccgatcacactgttgtattctttgtaattaaatctttacaacaagatatcacatgattatattttgatgaaaaaaacatatgtttcaatccattaatattggttgtttcatatgtgatagcgatatgtttcaacgtgtatcttcatcatatttcataaactttttaaatgtttcagttactgattttttatttcacactaaataacttgatgtttcactcgttagttaattgaaacatttgactaactgatttcttttttttgcatgttggtggtgtgatgacgcgcagcgtccgatatttggtggaatatcggacgtccgatgcggagtcttctccaacttgttcagcagttatctattcctttcccggttcacctgtcttgattagagatcacctatgcaatattgccttgttcggtatttatctattcctttctccgttcatctacgtttcactagtgaccactgtgcgacatcgccattgttaccaggattccagctagttcttggagctcgatccgagcaattccctttgtctccacatggctagagatttgagagccgcggttgaagtcgccaatggacttaagcaggtaagcctattcacaattgttctattggacactattaaacatttttgaaagactttttgtaattaatgtgtaatattgaaagtcaaaaaatataataattatcataattggtttgtgtgtttgatgacattagtaaactttcttctttgattgagagggacttataaatttgtgaagaaaaaatatttgtaataataactaaaatcaataaattttctcaaaagaaaataggaagtgagcttttcaaaaactctatatgaatttaatgtaggctatgctataggagaaatgcctgactcacaattgaagttatcaccgtaagaatatccttcatcctcaacaatcatgttatgcattatgatgctttgcagcaatgactttaataagaaattctcatactaaaagatgagttgtatacgtacaataacaaactgagaacgtcgaacaacaaatgcacatgtgacatctttttcttgccccttctttgtcttgtgcagattacttgtccttcattcgtcggggctactctctctttttacatgaacacaattttcaagatggtgaacggtgtattcttaagaaacattttatttaaaattttctttaaaaatcaaataaatttacttgtaagtttgtcattgttaatacttgactaatcatgcgctaatgttttaattttttttccacattcagctacgccacttgagcagaaacgaatgggacctaagagtgtcacataagattaggtgatgagatagaggagagaaacatgagccacatctcttatgcaagggagaagctctatacaaacataaaaaaggtgtgaaaatattagtagtattggaatatgtgtattagagatgacatattggttcctagtcacactttgccatcactaaccgagaaaagttatcacactttgtctaaggtgggtgatcaactttctcatttaacaccggaggaattgcattacaggccaaacaagtgctcttcttgtagtcaaaatgtttcctgttcgaatccactgaaatgagtggattaaattttggattaaagtggcacgcttttcaaactgctaaacgatgtgtttcgtgcgaaaactttctatatgaaaattgttctaaaatatcagattaatccatttgtcaagtttgtaataattaaaactcaattaatcacacgttattactacctcgttatacataaaacacttaatctttatcttcatcatctttacatctttaggagattcaaaccccacctaaatcgggatcttttttatcttcctctctttggcatgtagcacagaagttgttactagatgccgaggtacgcttggtcctgcccttcaatactctggagacaagttgagctcaggctgagtcaaaacagcctgttcctctaacaatttctcaagctccagaatgtgttgtggctgttctttcaaggagagaatttgagcagtcagggaggagcattgtgttggtagtttgaactgaatggaagtctagagtaaccttggcctgcccaggcagcagactgcatagaaggaataagttcaccggaggtccctcaacttaacagcaagattttttaagatcccttaaccacgaaaccagaaatctccactcctaaactatacaaaaccgttcacttaaagcccctaggcagtatatatgggtggtttcgctgacgtgacatcttagacaacaaaaaaaaatttaaaaagtacgtggggcccatatgtcagcgggacatatttttttcatctcttttcttgtccttttcttctctcttctttcttctctcttctcttctttggtcagggaggccagcggccggcgatgggcgggcggcgggcgagaacggcagcagagcggcgacgggcgagcgcggcgggcggagcggcaccgggctgcggggcggacggtgggctctgcggccatgaccaccgcagttcctgcggcagcggcaaccatggcctctccgaatccctcctccgccgtgaccacggcagttcctgcgtccgacgacaatggctagatggaggaggagcgcggc

SEQ ID NO: 6407 - DNA, 26313 bp, Oryza sativa
aatgagaaaagtcaaactcaagttgcgaatttggcggctgcaaatgatgatggtgctccaaaatctcaatatattgatcttatccaagtaagtttactgctatattttacaatattttggtacatgttatattttataaaatacatgttagtaatcttgacagacaatccaaatggacaagtattgaaagagccacttggatgtggtattctacttattgtctgagatgtagaaatgacaaattatatcagtgctaggtctaatgcaaacaatattacaagaggatcatgcttagcattattcataaacttagtaatatagtctactaatgaccaatgagtagcaatcttagatttattttagtgtagcactaaacaatggtcatatgaactatataagagcagatgccatcatattcgtgtcagtactgttgttgaaaactacacaggatatccttataatgtttggtggtatgatcgctaacacacccttttcatttagaatgactcttacatgattggagtaacatgaatagaaagggtacaacaacctaaatattaatggggtgaaagacaatgagcttcgctctagaaagctcatgcgtttgaacgtaggctctggtttgactcgttctattctgagcaacttgtgagcctcgagtttttttgacagccctagttggactcgatccatgtgattttgagcgaagcagaaagtgcaggactctaggttgtaacaagaaggggcaggctattgttgtagccttgtaggtacagtccttattgcaacaaacatggatagtgccgggttgtcatgcagagcagctatgcatgagcatggaggtgagcttcttcggcgcataggcaataatgagaaagttcttgaaatgacttgtgataaactctgtggtggcggcaagagctggatgaagagctataatggtttcatctcatgttatgaatttgacttgcttaatgtcctaggccaaagccaaatgctaataagcataagttagctaaacgcacatactgtcaacagatgctcttatgccacaaagttggatgccataatcttatttgccgcataattgattggctttactgaaatgccacaaagttttaccacaacacgacgtgaagttccaaatttatcttgccctccgatccatctttccatgagcgtcaggtctaggccttacggctgcatgatcatgtctatgaacatgtccagacatctagtacggtgtgttgtggaatgccttgagcttctccggtctggtggcatggcactgcatcgcaggtcaatgaagcttccattgctgcttgctggcgatgagatacacggggtgccacagaacgagcttgagaaggcctcatacaactgccggtggaccttgtccttgaccacgtcgagcaccttgcccttgggcagcttgaggtcctcagaaggcatggcctagggcgtcatttggagtccaatggtgcgaatttggatagctattttatcagtttaggtttatcttctcatgtcaagtttggatagcttatttatttccttgttcctcttaactagtctctccctcccgtgcacccttccaatgcgcacttcgttcttttttgtgttctgttgcctaccatcgtaccttgctggtggctgagaggtttggggctgaggccagcaatctatcacaactacaatatttggtctttgccaggccgtgacaacttggtaccagagcaaactcctgcgtctgtagacatgtcggccgctggtggaagcgaggaaaggtttaggccagcaaatggtggtcatcctcaagaagctggagaagttggacgtcctggagtcgaagcttggtgacatcaatcaccagcaaaaagaacatcacctgatcaccttgcgatcagtcgtttgtaggccagtaaatcagcatgcaatgccgataccttctcggtgagcaaaggcatcctcctccagtcccccgactatcttcggctctgggtagaccaccagatgggcgcgttgtgctaacacaagtggtacttcccgacattcgacaggaagaccccctggcccctgacatggcttatctgctgtgagcaattcttctgtgggcagtgcacgttagaggaccatctgattgcgtaccatcgtgtctagctgaccgggaggtctgaggtttaggctggctggctatcacgactacaaatcttcggcctttgccaggctgtgacagaggttgaggaagaagaacatggcaattggtgggtgagttgaaaaggtcaaacatggtaaataagcaagtatgtggcaaatgagagtatgccatcctggcatgagggcattttttcccaacaaaagtgtcatgtacgcaagcgagccaataatttaagagcaattaagcattgtcaaataacattatttatttacagatagactttgatcctaaatgtttctttgtacatgattttagtagctgatggttaagaggaagatttagctgtgaatttaagtcttaaattattttcatatgttattgcaggttgatctgcttttaggaaaggcttattctgattggggccatatcagtgatgctgttgctgtttatgaaaatctaatcactgaacatcctgaagacttccgtggttatttggctaaggtactgatcaatcttgtgctttatatatgagctttaatgaagcctttttttggataaggcaattcattaatcactgaccttaatgatttcaatatatttggcatgctaaaccaatatatctaatttttcaataggaaaaagtccaaataaccccctagactttgattaaaatttatatggccctctaagttggtttacaaagtggtttttatttaatctgcatataagctggctgagctttgatcatgtgacatacatattggatatatatgttaaaattttcacttaaatctttcttttttatcccttgttcgctctcactaacaagaaagtactaacgtaacaatagtatgacatcactgtataaacaacctacaaatgatgatacataaatatattgtattagtaatttaaaaccgcttgtttaagatcccgaatacgcaaaaccactatccaaaacatacattgtgtattaacataattcggatttcttacataactggtaatctccatcctttttcttttatccatcttgcagggaatcatattaaaggaaaatggtaaatcaggtgaagcagagagaatgtttattcaggtattgttttgtctgtgatgtctcccatgctaaacttttaagttttaacagaagtgcaaatggactacagacctgtagggttttaaaatttgtagccttataattttttagtaaatttcataaaactgcaactttagtgacaaaactatcagcttgctgcaacattagggacatatttcagtttgttgcaacaatagcgtgggaaattatcagaaaactgcacttttacgttatatgttgctacatttgtcacctatatgtactgtaacagcatataacgtaaaagtcgcagttttgtgataatttcccaggctattattgcagcaaactgatagttttgtcactaaagttgcagttttctgaaatttactcaatttttttaagaaaaacctgaagctgtaaattctgagtaataaataaaactacagtgcttatgatattaaggatctacaaatttggttggttactctcctgctgccatcccaccagccatacatgtttatgccattttggtcttgtttggctgtgcttcaatccccgcacatccacatggataggccaagggataattaagcctatccaaacaatgtcttggacagaaaaatactctaaatgaataggggagcaatcaatagaagcaaatgttttggatcttcagacatactagcctattaagtcgcgtgtttacacgactatatataaccttcctgtctatttaatgtgtttgtatatagtttatattaattagcttaaattttaagtcaacaatgtaaatacatttttagaacatcatttgtaaggaagtttagctaaaatgttaacgaatttatcttgatttatgatttaataatactattataacacaaataatttatcatacattaccaccaccactaactttctcaatttctaaatgtgtcatacacgttttgtaataataatgtatatagccacatccattacatgttgcaaggctatcatgatctgtttgagaaatatctatatgctatttactgtaagtcttatattcctatattaaaacaactttataaactttactatgcctgtgccacatgatgtactttaggtgtagtgaagtaaccgaggccatgtgatctatagcattaggttaattagctattaaaaatactcattattattgatataatagaactactattaaataattattatatggtcaatgtgtaagggattttttttttcattctcctttctctgataccacatctcatgggatggcttgaagggttagaaacatccctattttgatagccattttttcctatgatccaatgttcctttttatccaaatcacgcatccacggttcatgtttgtttgatgatgtgcttatcctggtggtatttttggattctcttttcactacttcctccgtttcattataagtcgctttgactttatctagtcgaacttctttagttttaataaaatttatagaaagaattagcaaatccacaacacaaaattagttttatcaaatgtaacatttaatatattttgataatatgtttgctttgcgtggaaaatgttgatatatttttctataaactttgttgactaggaaaaatatcaaaacgacttataatatgaaaatgatggagtaccttatccaaatcatagatctggctgttcatgtttgtttgatgatgtggctcacctggtgacaactttggattctcttttcactaatgcagatatattgactttcctgtgcaggccaaatttttcgcacctgatgcagcgaaggcactagttgatcgatatgcacaaaggtagcgtgagacacaacagggaaattccaattcctctaatttttgtcccattattttttgtttagatagcatcgatctaagttcgtcaggaattttatcgcctgtcaattcctagattcagcacgacagaagggacacggggataatttgcttgtcaaacaatatttagatcaaggcagttatagtgtatagaaaaccttcttgtcgataatagcaaatttataggattttgagattgtgtattcttttattaatgaattgatttgaaataaaaaaaattacgaatttccgtagaactcatttaaccctacaacaaattaattttctaggctctgttttttgcaaatattcgtgcagcttatatgccgaattttttaatatataataactaatatcctatgaattaaatatatagtaaatcagatataaatttttaacaacacgatgaacgctgagggaaatagcgtccaggtctggacgtccttgtgaacagccgtacgcagacagcgtccaagcatctgtttgttgtgaaggaaggcacatgaggggagaaaagaaaaaaaacgtgactacctagttatcggcgccggcggtacgtcgtcgttgccctcgtccacgagcggggagctccacacgtcactggctggcttcgcatctcgtccaattgcccgagggcactagtcatgcgatgcgtcggccggcgcggccctccaatcacgcgcgaggctgccgcctcagctttcttcgacgcgtgcatagtatcaggtgatgcatacatgcatatatactgaactccacatgatacatacagccgtcgaatggcaaaagagatggaaccgtttgtgcatgtgggaatggaatatgtgttggattcactcatttacatgcatgcagttccgcatgatcaaccgtccaaccagcagaagtatcagcgacgacgcaggcgttcctacccacgaggtccgtctacctgcgtcatgcggtccccaaccccaaggcgcggacgaattcggcgaagcggatcgaggtagcgagtacaaactagttggtgagcaacaccagcgcttgcgagcggcagcagtcggcagagcgacgcggaagaaaattctctgcggcagtgccgcacaatgaagcccccccctcctccggatcccgggttgcgaacccaggcgtacgtgcgtcgcccagtagatcacccatactgcgataacgcagtggacaatcatcctgctccgcgtccaggttctcgtcgatgcctggtggcggtgagacgaatgtcggtgtagcgggcgttgaggccgatgccaaggtggcgggtgtcgaggcggacgacggcgtgactgcccttgacgcggaagcgcccgaagatgcagatgatggagccgaggtcgaaggcgacagtgatgtggccgttgtcaggtactcgacggtgaagtctgagcaacctccgccgccggggacggctgcagcgcccgccgcatcccagtcccacccagcgccctcgtcgaaaatcacgtcgcgcgagacctgcactcgtccagacaccggatcgaacacctcgtacgccttggctccgtcggcgtatccgatgagaaccatcggcttgctgcggtcagagagcttggggaggtgaggccgcacgtccttgacataggccaggcacccgaacgtgcgcaggtaacccaccgccggcttcttcccatgccacgcctcataaggtgtcatgttggccaagctctttgtcggcgcgcgattgagcagaaaaactgctgtcgtgacagcctccccccaatagcgtgccggcatgttcttggctttcaacaagctgcgagccatcccaaggatggtttggttgcggcgctccaccacgccattctgttggggcgagtagggcgcggagaagtggcgtgagactccctgttcggcgcagtaggtggcgaattccaccgaggtgaactcgccaccgttgtcggtgcggaggatgcgcaatttctgcttggattccgcctcggctcgcgcctgaaagcgcttgatggcatcagccgcctcgctcttgcgtcccagcagagtgatccacatgtacctgctcgcatcatcaacaagcaggaggaaatgagttttgcctccaggggttgccggcgagatgggaccacacagatcgccatgcaccagctcaaggcgatcctcagcacgaaacatggagcggcgtggaaacggggtgcgtcgctgcttagatatgacgcagctgtcgcacagctgcttgacatgatcgatgtcgggcatgccgcgcaccatgtcgcggctcgccagtcgtcgcagagcgtcgaagtggaggtggccgtagcgcgcatgccacagccaggcgcactcctgcgccttggccgcgaggcacaccggttgcccgatggtgagcttgatcaagtacaggcgattccgcgtccgccgaacgcgtgcgagcagctgggccgctgggtcccgtatcgtgcaaacaccgtggtagatacggacgtcgcacccattttcatcgagctggcccaaacttatcaagttggcgttgagtttagggatgtaatacacccccgtcaacgctcggtgctcctgattcctgcactcaaaaatgatcttgccacgaccctcaattccgacgacggagccgtcgccgaatcgcaccgagccccgcatagacaggtcgagctcagcgaaaacttcgcgaatgcccgtcatgtggtttgtggctccggtgtcgagatgccagacgccgccgttggtttgtttctccgtgagaaggtgcgcgaacacctttggctcgacgagctcgatcgtcttgtcaggctgcgatggcggcgaagaagcaggtggcgcagatgaagacgacgcagacacaggagcagcgtcgacgacatgggccatgaggagggccgactcgtcatcgtcctcatccgccagggcctggtgggcctcggcaggccgcttgggcttccggcagtccttagcccagtgccccgtgcggccgcaattgcggcacttgtcgcggtttggttcccgcccttcctgcgtgtcgcccccggcacgatctccatcgtgcgcagcagcttcagctttcttcttgccaccacgccgacgacggttgccaccgccggacttcgccttcccagaggaactttccgcggcctgtttctccttccaccgggcagtccactgctcctcagtgagaaacagtttcccaccggcagcagagctcttggcaggcagcttctcctcagcgtttcggagccggccggtgacctcctcgagcgtgagctcatcgaggtcaagcaacgtctcaatggacaaagcgatctgcgagagatgatctggaacagagttaaggaatttttcaaccacctttccttcttcaagatggactccaagcgtggcgaggttggtgacgagtccgttgaggcgcaacgagaattcctcgacggtctccccgtccttgaactccatcgcatcatactgcttctgcagcatttgcgccttcgacttgcagacacgatcgacgccaactcgcatcatcttgatcgcgtcccacgcctccttggccgagggcttgacggcgagtgaagctaacatctccggcggcaccgcccggagtatggcctccatcgccattcgatccgcctggaaatcggcgtcaccatgctcaacggcatcccacaggccgcgcgcttgcagcatgaccttcatcatgagagcccaatctccgtagttagtcttcgtcagcagtggatagttggctgagccgcccacctccttcaccacacgctggaccggaataagttcacggtcttcgccaggccgccggcgaccacgacggtgtggaggtgaacgggagatacgtcgctggtgcggttcacgggaccgcgacacacgtggcgttggagccgacatggctctgataccaaatgaagcccggcgaggtagccgccggcgagatcactggaaagcacaacacacacgcacgcgaggaagacacagttgcacacagagattgtgctgcataatacggcgcagcttttctgtttctttacttctccttttatttgcgaaatacaagagaacgtgatcgacgtgatccgcattgcccgccacacgacccagtgcgtcgtgcgccatcgcacacgatcggatcgtgcagcgggcgactcgctacattactgccacgccgtgaacatacgcacggggcttatggacgcgctcgttctaataaccgagccctgaaaacatgcaagtaaaagacaggagataaaacctaccctaacaaagcggtagaacaggtgctaacttaatcaaagtatccaacacacaaggcctctcgtgaaacaccgcgtggactggcgacgcgtgtcccgtctcttgctgtggactgactctgttctttgagccgagccgatgcccaggagtcgagttctaccgtcgctcccaaaatcctcttcgccgcctcctcccacgcctgcagcactcctcttcaccactccaaatctactcctacggcggtggcggcggcggcggcggtggctacagggctccgccctccacccatccgaacagcgccccacccaccacccagccatacgacacgctgtgagccttgaggggccccgctgccctcctcgaagcttgttcgcatcagtggtgccatctgcgttgagacagacctgaccgtggtgatgtgtttctgggcagcagaccacaacggcaaggagctaatgtcaggtttgctgaagctatactgaaggctgattcctgtgatattcaaagctgattcatggcttctctttgcaatttatcttgttggaatcggatgtggaattagtgttctttcatttgatgtgtcactaaagctctttgaaaattatagtagtaatttactgaatattactgcggacggtgacttactagacatttgctatcttaataggaaaagaaaaatgaaagctagcagtgtcaacggagaagcggagagtggagattctaatggtttgtccatggcagatagcacgacaggaccacaggagtgctgcagctaggcgcggggatgaggcggcggaaaggattttggggcggcgtcgcggcggtagaactaactctagagcctgcggcgtcggctcggctcgaaaacagactcgagttatagcaggagatgggacacgtggcaccagctcacgtggtgttgcacgagaagcattgtgcggcactgccgcatagaatttttttccaagcgacgcgcgtgtgatctggaggacgaccataggttgtttatctctcttttgctactagaacggcgtgtagacttggacgctatatacaacagcgtgcagacctggacgcttttgacaacgacgtcctaacctggacgctgcttctccccgtgtccatcctatttttgcaaatctcttctcatgtttactacttcatcccttttagcattgcccatattcatatataatgaatctagacatatatatttgcttagatttattaacatctatatgaatgtggactatgttagaaagtcttataacctaaaacggaggtagtagatattatttattatataaaatagtttgggtccagattcattgttaaacatgtggtgtgtcattctgaaataggttggccattgaccatcatgaactgtgtgtcttttgtctgttgagatcgcttctcaggaggaatggtaagaacagagtagtcgaatgccagatagaggtcttttcctttgccagaaaccaaaacaagggcattaatatagtgttacatagaccattcccatcccttaacttgcacagttcgtgagcgcaccatattaattcatgacagtcaaaatttaaattttataattgaaagatttttgaggtttttaatcatattttattttcagtattatcttttaaattaaaaagacacacatatataagttttatttataaattatttttgtccgctgataagtagtacttcctgtcttaaaataccaacatctagaaagatttatctctaagatttttctttctccgatataaaggtgtatatgccaaacgatgaggctgtcatttttgctcattatagctcacagatagatccgtttgacatgtctctgaccaatagatccgttggacatgtctttgaccaatagatccgttggacatgtctcttgctgaccacttggcacttgatagtgccatggcccatggcttttcaggtcttacggacggcaatggtgcttcaccccatcagaatgagtttccctcgtatttgctattcctataactgttaaacagaagaattagatctagttttaaagatacaaattttatctcggttttcttgcaaaagttttctatatgctttaagatattaaataaattttctaaaaatattaaaattaaaactacattagtcatgcgctagctttctcgtttagcacaacgtgtttctctctcgtccctctccttcctgcgtggcagggctagctatacgccaactcaccgcttaattaaatttgtacatataatatatatatacatagagaaattattttaggtcactgcgcactaccgaatggggagaaaaaaaaagataggaagatcgatcacatgcatgcacatctacgagaacatgagaacaaattacaacgggaaaaaaaataaaggagatggacatactgtttgatgatctcgtcgacaatttaattatagtcacatcacaatccataagcgcatgatgttgtgccgtcgctgccccaagtactgtcgtctatcgatcggcacaggacaaattcttgtgacgacgtggatccgagtaggaatttcggccgcagatgatgctcctgagtcgacaattatgcgaatacaaaattagtatgattatacatttccaaataaagatgcaataccattacatcctatacaatgtgaaggtcgagtggtctactatgcaggaatgatttggccaatcagcccctatactattatggaagtgatttttcttaacggcgaaaggtgatttttttttggcagccaaaccaattgtcgtatacttctttatatattatatacgtagtctattcttaattccacgcacagcctcttatcgtggacggcgagcaacaggatcaataagatcaatatgaatgtttttgcttgacaatgataaaggttagctcgcaccgacggatgcagacaggccacccaacagtttacaaaacaatgatcttttcaagcggacaaaactaatatttgcaaactgttgggtggcctgtcttcatcgagatgtatataaaaatctacattttttcaagtgggaggctcagccacgtgtgaaaatcactttacacgggcgatcagttatgatgcccgcctgaaaaataaaaattgctaaaaaaaagtaatccccaaaaccaaaaccctagctcccatccaccgccgtcatcgtcgacgccgtactcaacgctgctcccaatgccgacggtggcagttccaacctatcctgatgccagggacggatccgtcgtcacgcagcttgccaccaacgtcgtcgtcattgtagcccacgctgccagttatcaccacagggagcagtcatagtcatcgtcgccgaggccccgtcgttgctgaggctagcggcagtggatccatccctcctagggctaggagtggtggatcagtcgctcccgagtctgtcaccgccggttctgccctcgcgtggcttgccgctgttgtcattgcccgccctagctgcagttgtcgccgcacggcttgccatcggctggcattggatccagacgtcgcggagctagatctgatcgtcatatctaatcgttaggaggcccaatctgcctactgcaaggccaccaatgctagctcaagcccacatcgcccctcgggtgtcatcgtgaccgctcctgtcaccactgtcattgtggccgctgcggtcgctgtcaaggatgggcggtggatgagagggtgaggagaggagaggagaaggaaggagaggggcgaggagagtgtggagtgagaggagagttagattttttttaagagataagagaaaagaagatgggaggggacatggcagcttgccttgtgctaggcaggcatgttaggaggctcgtctgcaaaaattgatttttgtatcagaaaaactactctacagtattccgtgggtatggaataagtggataatgattcagtcttatccgttcccctcatgtctctttatcaactcgaaccttcgtcctcctcttccgcctcacctccttcgcccctctttttcccctcccctcctttcctcctctctgcaaagagcttctccatgtaggcatggtggcggtggagcaggtcccccaaaaatggatatctagaggcctaagctctcctcggtactggatccggcttgagtgcacgtcgacaacaaggacagtgggtggaactagtctcgtggcctcctagtacttcgtctcatgctttcgaggcatgacgacacccaatggatctagctcccatgacggaagggggcaaccaggaagaagggagactgtcgggaaggacgttgaccgatgtgggttcctcagcctcctccttcgaggcacgttgtcaatggtgatggaggggtgcgaccaatgaagcttccattggtagcgacgtgatggtgagccatcatgctccttgccggagtgtgtgcaggtaagtcgtgcgatgtatcttctacaccatgcttggtgcttgtggtatcacgcctgatacccaagtatcagacctgtcctcgcatgtacgtaccatgcttggcacttgtggtatcacagctgatactcaggtattagacccggtacccgtaggtatttgggctagtacctgtggtatgatgactgatacccacatgtatcagagttggtaccctatgtaccagggctggtacatgcaaggtatcaagtatcaagcaccaacgcttcctctcctcttatcccttcctctcgacttagccttcatacctttctactgctgccgcgacaaacatcgttgcctacgccgacacggggcgctagcttaaggcatggggaatgtgagcttgtggagtgaggttgggatgatgctagacttacgtggaggaagcagatacgtgagatgacgttagcctccataaagtatcctgttcggacggtatcccgctctctagcagccctcctttttatatacgggtcttgtccccctccctgtccaacattatcgtaggtgtacgatgttatggcctatcggcctgcctataggttagaagagggcttgtgtgagaaaattgtttttgtaatatatgcagctaccttcgctcctccactatgcttatgctttgatttttcaccatcgatgccattgccgtccttcttctcccatcaaactccaccactatctgctttttcagccgccgaatcaccggatccggtgtccacaagctcgctgctgtcagaaccggcatccttcagctcgtagtcgccggatttggccgtcccgacggcgttagtggtggcaatgctcgtcgaccataactgattctctcctttatgtgttttatttttttctcgctactttgcggtaaaaaatatctgtacaaaatttatgtagggaaattattccatgtatgtgataaatgtgcaaatcgaccgttcggtgaaagctgaaattttaatctcacccagctggtaaccacaattaaattgatctacaccacaaattaaccaaacaaaatatctttcaaacattatgtctgtgcgagcaacaaaataaaatcttatgctagccattctagataatacaaataaccaaatagttgtatgtgtatctcctaattaattcaggttaaacttggacgagagagttagatcaggttagagacgcgaacaatcaaacacaccctgtgtattccttatgcctaacatcttctttgctcaagcttttacttctttttttgttaatcgtctgttttcaccttttattttgggccgtgtattcctagctttattagatatggttttgctatttgtcagttgactgacaaatagtggttctgtcagttgattcccagaaccgtttctgatgcttgcttcaggatgcgcgcaagggtctgggctagtgggggctggagcgaggtgcatacttctaaacgtcagtcaacagacaaatgtagcactccacagtccacactatcagataatggagtttaacccagcctacatgtattcctagccagtgctaaggcagtaaattttcacctacattaaaaaaagagcctcgtgccatctgaaaatgtttggagttgcgatgatttgtacgtttaatttgaaggaggatatatgctgggctttttaattagaggatttttactatccttaaaaaggtaccaccaggtactaggtactgctaggtatcgactccatctatccatcgattcaaaaagggtatgattggaatagcgtgtttctacccctccgctcctacacctgacatcgcctccatcttcttctacctccgcatcgtgctgtccagccgtcccaaacaattccgtcccagtccgtggctccgctccaccctgccaagtgccgatgcctgaagcgctgaagcacaccgctcacgccatggctgcaaacaaagctgcgatccagctttggggcctcgtcaggacgggaatggatgagagcaggcgcgcggcgcgcacgcggtaggttcaagtgtcgcctacatctctaaggggataatctggtggcggcgaataggagagtaggagagacaacgatgattagagcttgccgacgattaggctagtggaatggaaaaggatgaagaaaagaaatagtaagtaaaaaaatgtaaaggagggctcgcatgaagtcggggaggaaaaaggaaagtttatggatccttcattgtggtgataatgtttggacgtttgggcacctagtcttgtacgtcttcaatggtgataagcataaggaggaagacaagtctgacattagggtccaacatttcagttatagcgaaaaagaaaaggatgtgagatggtacaagatcttacaaatccttaatgtgaaaaggttcatacgctttggtcagtatttgagcaaaagctaacctgatctatgcgattatgcaaatagctgctgcacaacctaacaaattcatctttgttgaaaaatctggatgggagaaacccaacatctggagttcttgacaaaataatatgtttcaattatctatactttttggtacatattattaaggtactgattagataaacttttgcttaatagactaactgttttatgatgaagctaataagcataagaccccaaatgggagatggcactgagctcgctgctgctgctggacttaattggctttgtaactgatggatgctgagccacgtccccctcctcttcactgcataactggacaactgccacggcaatggtagatggctgactttggaggtttccagagagtaaaaggaggcgacatggctcagctcggtctgaactgcggctgcagcagcgtattagcgatgtaggggagaacctggagaagcgctgaagtggagactgcgtgcgtgagagcgtgagagacagtggaagggaagacggcctgcgagagagagagagagagagagagagagctgagaggaggcgaactaggaggagggagggaacaccaaagttgtcagcgttccccaccggcccacctccctcgaggtcatcgccgcccgggaggccaccgcatcggccgcatcaagatcgtcgccgtgttttccttacccctacagctttcactcgatttgaggaggtggatagacaacactttgctctaacttgctaacttcatgcgaaagtacaaccttgccctcccaccatcaacagcatttggtacctactcttgcagacgatgtggtaccagcaggtaccgagccttcccaggccattggattgattggaatggacagctacgatatggtatctcctcccctcaagaactgctacaaaacttatagtatatgagaaattataagtaaaagattagttttggagaccgtgccaattttgaccgcgtcttatattagggatggagggagtactaaaaaaacgaacagggtaaaaaagaaaaggacatgctcatggtacatcctcaataacagaaagatgactacaccattcattttaaaaatatagcatagcatgttataaatctaaataaacacttgtttacatttatagcgaaagattattatattattatataatgtatgaagtagtatgtatatacaacagcaagttgaatttggcgtaaacaggaccatatgtacgactccaagcacgaggagggctcattccatatatatcaacaaattagtgtcatactgtcatggatctagctaggtaaacatcgtcctatctgggagaaatatgatatccatgcatcgccaattcgccataggattaggaatcgatctcgatgatcagtctccgataggccggcctgccggccccggggtagctactatacgtaccggctatagctgcggtgctatccatggatggagcagcacacacgcgcgtcagtgaatcccgggaaaccctcccggccacaagttctccggtaggcgcgcgcggggcccggccggagtttggtcgcgcgcgttcgtctctcgtcgcgtcgtcgtcgcgcgcgcccgtgaacctgctggcgtgtgtgtttgttggccgggaccgggatgatcgatcgagcgatctaccgcgcgcgccgcgctgacatgtacgcagcgacgacgatatgatcgcgcgctgctgtatgcgtgcctgctgctagcgctacccaacaagggatcttcacgggctgcccaaccttgcctcccctatatacttctctgcatctattccagctaattaaactgcagatcaattggacggatatatagagctagcgcatttcagcgcatgagttctcctgatattgcatgttgctcacggtccagattggtagtatttagttgtgtataatgtattattaggttgctgtttttttttaaacggagagagtagttatttaactaaccatgcgtacatgctggcatcaaattaattgaggttttttttttaaaaaaattatctggtcatagatattcaatgttcagcttaagatgatccatcacaattttcaattgtaatgaatataactaagtgttgtaaacgttgctacgttcttcttaactactaggtctgaattaaagaaacttgaacttgataaaatatagtacaaaacaatttataatatagaaattaatactactataagactttctagcattgcccatattcatatagatgttaatgaatctaggcacacatatatgtccagattcattaacatatatatgaatgtagataatgttagaaaatcttataatatgaaatggaggtagttaatatggaacagagggactactgcatcagaaaaaaaaaaaaaccctgcccaaatatgaacgagtgctgattgctatatttgtcctcgccaaggctggcgacaaaactgtttagcatgccaaatataatccatcaccttgttgacttctcccaagaaccaataatttgcaaactgtagggcacagttcgatcccgtaataagatagttgcaactgaaacccaaccgaaggacccattgtgaaaaaccacagactttccaggtttcaacccaaaatctcccatccgaacacgcccctataaaaacccatcccccggtcacggacaaagcatccagccatttcatactcactagagatagccaccagctagctagctccaccaggtaccaatcacctatagtcactagctagctcgatccagctcctcacctctccagcagccgacggcaatggcgaaggcggtggcgctggctgtcctcgtggtggccgtcgcggcggcgctgctggccgtggcgccggcgccggcccgcgccgtgtgcaacatgagcaacgacgagttcatgaagtgccagccggcggcggcggcgacgtcgaacccgacgacgaacccgtcggcgggctgctgctcggcgctgtcgcacgccgaccttaactgcctctgctcctacaagaactcgccgtggctcagcatctacaacatcgaccccaaccgcgccatgcagctgccagccaagtgtggcctcaccatgccggctaactgctaataagtttgctactgttttactgccaagatttgcaggcactgcaacaaaggacataacgtacgtaatatgtgtgcctcctactcctagcttgcgtttgatatagaaaattaatagcataaaatggctagaactgctacagggatagcctagctgtatgacaactgtatgttcttgtcttatgcttgtgtggaatgtgtatgtttgtctgtgagagtgttgtcatgtgtgtgtggttggccggttaatagtgcttgttgcattgatcgcatgcctaatatacttggggtttttctataatccaacgcgcgcggcatcgttgcgcgagctccctcactgtgttttcgttttcctttctttgaggcctgcttgtttttgagcttgttggatatcagcttactattcgatcggtttgcatgggattcatattttgatttgcaaattatgtatcgtcggttttcatggattttagtaattaaagggtctcgcattatgaatctctaacggattaatttgtaccctgctccgttactcgtctggtgcataatcctaatctttgggctccttttgattgaaggattttcataggaattttgaaggaatcaaatccttaggaattttttctaatttgcatgtctggaacatagtcttggaggtgagcaaattcctttgaattaattgcaatcctatatagctctaatttgcatgtctggaacatagtcttggaggtgagcaaattcctttgaattaattgcaatcctatatagctcaacacattcaaatttttgtgtattaaattcttaaaagttttaacacatggcattccaatcatgcatttttcggcctattcctatgtttttgaaatccagcattccaaaggaactactaataataataatggcgcagttaaaactataagcaaatggtaggctatatttggagaacaatcttatctattatatactaaaagtccattaaaatttctcaaaacgcttttaagtcgccatgtgacaatctagtaattagagaaaatagtagaaaatcagagaaaaaaacaaaacatctatccctaaattttcatttaaatcggtgggtccaatatataaaccgttggatatattttttttagaaaattatgagcagttatgagtctgatcgtctcaagttagcatgcgagtttttttaaaagaatttcttatacgactcttactgtattttcaaaaacgaatgaacttaaaaaccgactcaaatacggatatggattttcaaaagcgaacgaacttaaaaactgactcgtacacggatgacgtaccaaagtaccggtaaaaacatctttaatttttatttttccatgtatatagttgagacgacaattatcattacttttagtgataataatttttaaataatagttactttgcaaatattgaattatcaacatataactctttaaaaatagaaatagaagtaaataaattagtttctaatatataaaatatagtttacatcattatcttatactatataatgtacccattattttagatttttatgtaaaaatatttgtacacatattttcactaaaataggtggacctattatttagaccatcaaatctatcttttgttaaaaaaaacgaagactcggaagatgtttctccgcccctctacacaacgcacatgtgcgaaaatccacacgcgtgacaaagagtgtcgtacctaaggtacctaaaatgatcatgagttcatgacgctatagggcttctgctttgccaaggtgaagacatatcaaatcattaatggatgacgactgtttttcttaataagtgaatttttttgaagatatgatgtagagggaagaagaatcaagcaacgtaaactgaatacaactattttttctctaatgtatataaatagagcgaagctatcacatatatatcttcaacagtgtgtttctgtgtcatcatctaatatgtgttggatgattaatgtttaaaataattaagaaggttagtcatcgttccgctatatcttttataacataagtctactgattagaagtccgatggtcactagacggtccgctgaatgtgaatgaagcgaggataatgtttttagcttggttggaaaattacctaaatcgcattgtccgtggtggctgaaaatccgttgaagtgactagggatggagggaggtgtcagtgactagggacaatgacagaccgtttcctttttcagtcgagagctgggacttgggccgtgccggcatggcccatttgcccgatgggcctgttcatgccgggccagcacaagcacggcccagaacatatggagcaggggcagcccagcataggcttgctgtgtctctgccgtgttcgactcctcgccaaggatgccagccagctgccgccaccaccatggatcctcatcgaagaaatcactgcgccgccacgagttgccaccaaagcttgccaccgatccgccaccaatccgcgaggttgcaactcgcgaggaagccgtggtgtagactatcgagcatgttgagttgtgatccaaattcatttgcatttaataaaggctatcgtcatctcttttagggttccaccatatatatgcctcttgtatgccgccgtgcggcgatgtaatctcacctcagatatagtgaagatattttgctggctgacgctcgtggttttttctctctcctgttttgggagggttttccacgttaaatctcgtgtcttctgtgattgatctattgttctttatcatttgttcgcttatcgtttcacaacaagtggtatcagagcttgttcccacattagggtttcgcgatggcgtcgatgaagtatgatctaccgctgctagactacaagacgagattcttgctgtggcaagtcaagatgcgggttgttctggcgcaaacttcggatcttgatgaggcgctagaaagcttcgggaagaagaaatcgactgaatggaccgctgaggagaagcggaaagatcgtaaggctctatcgctgatccaacttcatctatctaatgatattttgcaagaagtgttgcaggaaaagattgctgcagaactttggctcaaactggaatcgatctgcatgtctaaagatctaaccagtaagatgcatatcaagatgaagttgttctcgcacaagttgtaggagagtggttctgtgttgaaccacatatcggtcttcaaggagatcgttgccgacctagtgtcgatagaggtacagtttgatgatgaagatttaggtcttttactgttatactcactgcctagttcatatgcaaattttcgtgacaccatacttttaagccgtgatgaactaaccctagcggaagtttatgaggcgctccaaaacagggaaaagatgaaagatatggttcagtctgatgcgtcgtcctctaagggcgaagcattgcaggtcagaggcagatttgagcagaaaacctacaacgacagcaatgatcgtgacaagagccagagtagaggccgttccaagtccagaggtaaaaagttctgtaagtattgcaaaaagaaaaatcacttcattgaagaatgttggaaggtgcaggataaggagaaaaggaaatctgatggtaaggcctctgttgttactagtgctgaatactctgattcaggagattgtcttgtcgtttttgctggttgtgttgctagtcatgatgaatggattcttgatactgcatattcgtttcatatctgcattaacagagattggtttagttcttacaagtctgtgcagaatggagatgttgtgcgcatgggagatgataacccacgtgagattgtgggcattggctccttacagatcaagacacatgatggcatgacacgcacgctgaaagatgtgagacacataccagggatggcaagaaatctcatctctctcagcacacttgatgtagaaggatacaaatactccggttcaggtggagttgtaaaggtatcgaaaggttctctcgtttatatgattggtgatatgaattctgtaaacttatatgtccttagaggaagtacattacatggttctgttaccgctgctgctgtttctaaagatgaacctagtaagactaacctgtggcatatgcgtcttggacatatgagtgaacgtggtatagcagaattgatgaagaggaacctgttggatggctgcactcagggtaacatgaagttctgtgagcactgtgtttttggtaagcacaagagggtaaaattcaatacctcagttcatcgcactaaaggtatacttgattatgtacatgctgatttgtgggggccttctcgtaagccctctcttggtggtgctcgttatatgcttaccattattgatgattactctagaaaagtgtggccttatttcctgaaacataaagatgatacatttgctgcttttaaagagtggaaagtcatgatagaaaggcaaactgaaaaggaggtaaaagtacttcgcactgacaatggtggtgaattctgttcggatgcttttgatgattattgcaggaaggaaggcatcgttaggcatcacaccatcccgtacactccacagcagaatggtgtggctgagcgcatgaacagaaccatcatctccaaggctcattgtatgctgtccaacgctcgcatgaacaagcgtttttgggcagaggctgctaacaccgcctgctacttgatcaacaggtcgccttctatcccacttaataagaaaactcccattgaggtatggtctggtatgcctgctgattattcacaattgagagtttttggatgtactgcttatgctcacgttgataatggaaaattagagcctagagctattaagtgtctgtttcttggttatggttcaggagtaaaaggatataaattatggaatcctgaaactaataagaccttcatgagcaggagtgttgttttcaatgaatctgttatgtttaatgatagcttgcccacagatatcataccaggtggttctgatgaggagcagcaatatgttagcgtgcaggtggagcacgtggatgatcaggaaactgaaattgttggtaatgatgttaatgatattattcagcactcacctcttgttttgcagccacaagatgaacctattgcacatcgcagaacaaagaggagttgtggagctccagtctgccttattgaggaatgtgatatggtttattatgcttttagttgtgctgaacaggtggagatttctcttgagccagccacatatactgaagctgttgtgtcacgccccgaactagtaccgaccggaactagcccttgacgctccaaattaacctgttgatcgataccagtcccaggaaacagtactggtatcacaggaagacggattatcacagcaacagaggtctctttattatagagtagaggtacagtcatgttgggctgcggacagatcccgagctcacaactgcattacataagggaaacggaagccaggacttggaccaaacaacacaggcgcgacttgggaactaggccgaaaccctaaaactcatcgtaaccggcttgctcctggaaaaactcctcatcagcaggatctgcttcatcttcatcagcaactggggggatatttatatagagcaagggtgagtacgggagtactcagcaagccaggggaaataagtgtttaatgcaggcttcaaggaaaggctgttgttttcgtaattgattttatttgaactcttttctaaaaacatctaggtgagtgcttctcaaacgacacggttgagatagtgcgtcccgaccggtcggagtatgtgcaatgtatcaatctttagatcttaaaacaaggttggcacccggccaacagcttttcaaacggccacccaggccaacaacttttcaaacggccacccgggcctagctgatcccgtcagctgctgatttttcaaacatcgaaccccttttcacaacagtaatttcacaagcagttgtcaaacaaaactacgctaggaatcacctcacatccgcccatgaccgtgggcatggctgttcgaacagtttgttaacctctgcagaggggtacactttacccacacgacattactaacccggatcacccagcccgtggggatcagccacgtcgggagacctccaagctttcatgacaaggcatttccaaagccgacacaggcttaccatatgccgacgagaggggtcccagaccaacaacaggttaggtcccagaccatactgtgccaggaagcccaggggggtcctctccgacaccaccccggcgaatccacatgtccctcggcatcatggctcccctgataagctagttactcagccaggggtgtcccattccacccatgtggtcgtacttgtcctatgttcggatgaaattccaaggaatcggtccttaagtgcgggagcgggaaaaccgtacacccggtacgttccccggtccgcggttttagaagttcatttagttcgcaagcaccgacccaggtgtcgggttttctaagtcttttgtaaaacccaagttttacccaagttgtttttcagattttaagttttgaagacgaccgtcgatactcgcacagagtgcacgaatatcgaggcgcaactgggtggttacaaggggacatggtataacaattaacaaaggaaggatcaaatgcaacaaattaggcagatccgccaatctgccttgcagacgggacaacagattaagtgcgatcctatcaatgcataatattttgcaagcaatataattaaatttcaaatataggctcaagatgttcaaaggtggcttgccttgctcgagatctggagcttgatcctcgaaatcctcgcactgtgggtcttcgggctccggaactacacgcgaaacgggacaactcaacaaacggcgaaaagtaaagccctattaatgacctctaagcgtgccatagatagatctcgagatttggggaattttggaagttgaat

SEQ ID NO: 6408 - DNA, 6929 bp, Oryza sativa
acgccgcgctcgcccgtcgccgctccgcccgccgtcgcgccgcccgtcgtcgctccgcacgccgccgcgctcgcccgtcgccgcttcgcccgccatcgcaccacccgggctcatgagtgtgcgtcgtcgcctcgtcgggtgcagcagagctcggccctcttcctcctctcccgccgtgcggccaccccctatcccgcaggcgcgggcagtcccgactcggcgcggatggtgacagagcgcggaggaggcgacgagccgacgacggtcgacggcttgggccagcgaggatgtgatgccgaataggggcggtgaggaggcggcattggcagctggggcggcgaggaagcggcctcggctagggcacgacggccttgggcgcctcgtcagggactgccggcgggaggagttcgtcaatccggtcttgtggttggagagctcgatcgggatggtcatgccgtggagcacctcgacgacggtggaggagggatccggagaagccatggtttccgccgcctcacgaattgccgcggtcgcggccgcagaccccaccgtccccaatttagcgccgcaggaaccaccgctctgcccgaagcccgccgccgcgcgctccgcccgccgacgctccgctgccgtgcgggcccgctgccgtgctcgcccatcgcagctccgctcgctggccgccggcctccctaaccaaagaagagaagagggaagagagaaaagagaagaggagaagaaaagagaagaaaaaaaaatatgtgccgctgacatgtgggtcccacataatttttttaattttttttgctgactaggatgccacgtcagcgaaaccactcactagggaccttgagtgaacagttttatatagtttaggggtggagatttctggttttgtggttaagggacctgaaaaaatctcgctgttaagttaagggacctccggtgaacttattccctgcatagaataaccttggcccaattaaattcatcgggagaaaggagcacagcagcagtgaagaaatcggcccatttatgtggtatataaactattgggccagaggaaccatctggcccagtcaacatgcttggcccacagatttgaactcaaatgccgggaagcttgtgcagcgtatctcatatttttcagataatggaataatatcaggcctttgcttccaagaaactacagccacttatattacagagtcagctaatcaaagagcaaataaaattcaggaattgaaagtgcaaagatgagcgcggatgataccggagaccaggatattatggtgggcatatgctctgtttccatggagaggtaattgggaacaatttgatctgtctgttctgctaacttgtcgtggtgatgagaacatgttgtgcgtgatgtgaaatactccctccgtcccattttaagtgtagccacgattttccatacccaattttgatcgtccgtcttatttgaaaaatttttgaaaaaaatattaaaaacataagtcgcgcataaagtattattcttattttattatttcataacagtaaaaatactaattataaaaaaattaataagacgtacaatcaaaattgggcacgaaaactcataattgcacttataataggacggagggtgtatgatgaaccatgggaaatctccacggttcagacactggttcagctaaggtaccaaattattcctgcaattgtggcatatcctggagagtggagacctgaactcctgaactgaattcgatcatggccatatgtagatctgcttaacttcagtgcaggtctaaaaatcttgcctttaggttcgtgagcgtaccagttgatttgatcctgcaatcaacaagaaataaagacaaagaaaccgcggttaaatccataaatgatagccgattggccagccaccgatgacatatcatttatcttggagccgatgtcatatgtaaatcgatcggcaatcatgaataaataagaatgaactaaatctacttgatcggttgtagatatcaacaatatataatccttatatcgatatatacttaaatcaagtgattgggatagattgatcgtcatgccgagacagtttaaatcacttagatcaaaatatatactaacaatgagattatagatgtttatagcatagccgatcaaatagatctagcatgtatcgactaatactccgataccactctatattaagatattaaagcaggaaaaatatattaaacaaaagcctaatatactctgttgtaataagatctttaacataaagggcagatctagcatatcaatcaagcacatagaatataaggctaaattaggtaagatcagctgaaaccccgatgctaccctagtcggcaaccaaaagcaggctagagattgagattctaatcacgacttataagatcaaactcaactgatgctactataagtataaaaagaaggataatatctagacaataaaacttgtttcatagagtggtagataccctgtataatctaggtcaacatggatatttaacctaatcggctgccttctaataatagatgttagccgattgaaggttagatagcgatattatcaaagattatacagaatatatgataactcgacgaattacataaataagattagagtatcataaagatgtaagcactaatcccgagaacgcaagccgccataacaagttttacctctagttgaagatcgaaaccgatgcagctcaacccgaaagcaagaactcgtcgaaacaaaacgaaagtaaaagggtggcgatgcgccgagattgtattgaacgtgtgttgttgtattacatggggctcggggtctatttatacccaagattacaaaatatatccgtgtcggacacgacacttatctctaacaaactctaagataccataagtctttgcggcagatttttgcccaaaatatctctaaggaaattacataaaataacctaattaatagatacaattgtcgtctcaggactcaatccatgcatggcaactctcatgcaatacattaactcaacccgacaatgtgtatcacgccacattgtcggtatcggctcaatcggccaaccttgcccgactcgaactctgccgatcctgatcgtagccgattcggacttttagccgattctcgctctgttcccggaacaacgtctatgtttggattctgcttcgatctatctctatctccgatacttggattactaaattttgttgttaacaccatacatgaaaggggatacctattctgaagatttactaattaagctacattgccattaattttgactacttcgtcgctgttgatctcttcctcctcttttttttatgacaggtattataatacctagctttcagaacgaaagccaaataggatacacataagtcgttttacagaaaaaaagcaatagaaaagaccagacaaaaggcatgaccagcatctgtaggatcgaaacacaacaactaagccaaccagaggggggtgaatggttggtataaccaaaaaccaaaacttttagcggaaataaaagttaccctcaaattcgatggagatcagtctgaccaagattgatctgccggtctgatcgtgcctatgccgtcggtctgaccggtgttgatctctcggtcggaccgccctggaatcgcctgtcgcccctgttgccaccgccggtctaaccgccttgcgcccgccggcctaacggccgcgatgccgccggtctgaccgccggtgtgtcgctggttagaccaccgaaacccggtgaaacacaaatcgaagaactcttgaagtggatgacgactttattgattctctctatgtttacaaagtgcaccaacagcagtcctcacaaaaatctcgaggaaactcgaaaccctgactcaactatcagctcaattgctcttaaaagcgataccgagaagtctcacgctccccctctatttataccctgaggtaggcagcctaaagccacaaaccaaactcatactagaaatcctaaacaccttaggaaactctctagtaaaagaaacaaactttgcatacccactcataccaaatttggactccttccaaattcgactccgcatcccatacgcacacaataactccatcgtatgccatatggaatcttcaccaaccacgtgtattgaactctagccttagtatcctgcatgatctccaaccaccacggatgtcgtcttatccgcaaaccgactcccggtccatcaccgcaaatactctcctgaggcatcgagtcacctacacatgaaataaacaaagaaaccatattccgagaccaagctatctccaacttgactcattgttagcaaacaacagtattacatacgcatagtatccatctagaagccataatcatgaaacaatcacggatatccaaacaaacaacccgaaaccgaaaccgacacagagtcggccggtcagaccgcgggctgcgccggtctgaccgtgcgatacacgccggtctgaccggcaaccgcagcccggtctgaccggtcacataaaataacagcacctgtaattcacctgtaaatccaatcatctccaaaaccacttcgtgaataaattccaaacatcaaaactgataatctccgatgccaattgtttatcacagaataataataaaaaacacctttaattttacagtctcccccttgatgaacactttggcaaacccataaaaaattttttggtgtttggaaaaaaacaaaagtggtaaaaaacacacttcgtacaaacgtacacatcatgctcaaaagtccaaaagaaaacttctctcacttttgaaaagaaagaagttcccaatcgaaccaaaaacaacatgctcacttttcaactcatttacttctccaaaaaatttcaccttgcgtctcccccttttgacaatgatttcatcaagcataggaattatgttcattaatgtagatgagcttagcctacatatagcatatcatgtcatgtgttgcaataaaaagaagatgaacccatctataatatagcaagcatgcatgaaagtataaccatgaaccaaagattttacaattaagcttgaatcaacaatcaaaattcatgatttcatacgatttataatgcaacaccttaacaaacacataggttgaagaataaaaactaaacacatatacctattgcattaatcactctttctcaaataacctttagcacaaaacaaccaagagaattttttactttttctttgtcttgagcctttttgctcaattttttctcttttattccgggtacgtccctgtcgtcgatactgttttcagggatgcggcacccattattttgctcacatcgaatacgtccttgtcgtcaagactgtttccaaggattcggtattcatttttttcatatttttattctcttttcacaatgagcaactaaagctatttgaggaataacaattcaataaagcatatatatagagagcatttagaaatcaaaccacatgctagcatcaacatttcatatttacttaattcaagtatagaatttaagtgtcatgcatcatcttccttaaaagcaaaatctaaatctcatgaaaagactagtatacatacaagctatgctagagacaaataaaccttcaaagtatcgctagcatgcacaagaaaataccatatgtataacacaaagctctcttttctcaatttttctcattatcatatttttgcttgataaaaccatgaggtgcaaaactccccctcaaatcatgccaaaaggatgaaatattcccaattcaccatgaagaaaaacaaagcaattagaatccaaaggtttagtgaaaatatcagcaagttgcaactttgtgtccaaaaactgcaattcaacatctcccttctcaatatgatccctcaaaaaatgaaagcgaatatcaatgtgctttgtgcgtgagtgttgaacaggattcttagcaatgttaatagcactattattatcacaaaagagaggtactttctcaaaagtaagacaataatctttcaaagtagataaaaaccaaataatctgtgaacaacaactagcagcagcaacatattcagatttagcagttgattgagcaacactagattgtttcctagaagaccatgcaatcaatgatgtaccaagaaaatgacatgttccactagtacttttcctatcaattctacaaccccaaaatcagtattggaatatccagttaagcatatagaagatgaagtagaataccaaattccaaactcaagtgtatgattcaaatacctcattattcgcttgaccgcttgacaatgtgaagcacgaggagaagcttgaaagcgcgcacacaaacacacagcaaattgtatgtctggtctagaagcagttagatacaacaaagatccaatcatacttctatactctttttgatcaacagctttaccatcttcatcaggatccaacatagccgtagaaccaattggtgttgaaattggcttgcaattctccatcttgaaccttctcaaaagatcctttgtgtacttcgtttgatgcacaaaagtaccttgaggtgtttgcttaatttgcaatcccaaaaagtacgataacttacccatcatgctcatctcaaattccctgcgcatagtctccgcaaactccacaaccaaagcgtgagttgaacaaccaaagatgatatcatccacataaatctgaataaaaagttgattatcaccatgcttaagaacaaaaagcgttttgtcaacctttcccattgtaaaacctttcgcaagcaaaaagttcttaagcctatcataccatggtctaggagcttgtttcaagccatacaaagctttagacaatttaaaaacatggttgggaaaatcaggattttcaaaacctggtggttgtttgacataaactttct

SEQ ID NO: 6409 - DNA, 72475 bp, Oryza sativa
ctgagatatcaaaatatttcgtgtacacccaaccattgaccctttgctttccttccaagttcttatgctaattatatttgttgaaatgtagtctacatgatcatttacatgtattgtatacatctttacagaagagtgagggaagtgctgttcccactccatgggctccaggaatgggtaggaacatcgaaaagtatgttttgagggaccaggtttgttcattctccgtataattattgattgacctctcttgtctatgtaaatgctaattactgtgagttctttgtcagcaagtaaatacattgtcggtagtgtgattaatcataattaacaaatatctaggcggattttaaggttctggatgtgcatatgtgatccgctttgttgtatgcacaacaaaatcatttaaatttagattgaggcagctatgcaatttagtgcaaagttagattcaggtggatgaactaatcatgggatcagattctatctgaacaagtggataggtggcgcatgtctagtccattaagagagatttgcaatgttcttaaaattagtgaactcatttgctgacatgaatgccatatttggcatgctaatagaaatctgtccaattttattgactatctcatgcattcattctatttaaaaatctgcatttctaatttacatgagcaaatcataaatttggtgcaggttgctttaagtagcttgatcactcagtgattatcaattatatatctgtcttgttgcctttggtgcttagtagcgatttgattatcaattgtttgtcttgtgatatcaggaaacccgatatcgtcaacgatatcttgatctcatggtaaaccatgaagtgaggcatattttcaagacaagatcaaaagttgtctcttttattcggaaatttcttgatggtcttgactttttagaggtgggcctgtgcaatctattctgttattcttcttttgtatattcttccagtccttcaaatctgaatattctatgtcttttctaggtggagactccaatgatgaacatgattgcaggtggagcagctgcaaggccttttgtcacacatcataatgagttaaacatgaggctttatatgcgtattgctcctgagctctatctgaaggaattggttgttggggggctggatcgtgtttatgaaattgggaagcagttcaggaatgaaggaattgacctgacgcacaatcctgaattcacaacatgtgaattttatatggcatatgcagattacaatgacttgatagagcttactgaaaccatgttatctggtgattatctcttgatgtctctgaaacatcttttttttctttttattttaggaagtaatagtatcttcatgtcaattttgtatgcaactgcaaaatgacctaaatgcattttccttgttccgtaggcaattcatgatttgctattgttctgtcatatcatttttttgccgtcctatcttgtttttactgaaatcaacatgaagcagcctgttcattttatctaatgatctgattttatggttgacaggtatggttaaggagttgacaggtggctacaagattaaatatcatgctaacggagttgagaaaccaccaatagagattgatttcacacctcccttcaggtagagacattgggatgtatttggattacatgtattgctctatatgcacttttaactggtaatgttcagttgctacaatgttactttgcctttaccttgctgcagaaagatagacatgattgaagaattagaggctatggctaaactcaatatacctaaagatctctcaagtgatgaagcaaacaagtatttgatagatgcctgtgccaaatatgatgtcaaatgcccacctccccagactacaacacggttgcttgataaggttgtttctttacccactacacattctttttacactgtattttgatatgattttcgttaggtgattttgctatcttataatatcttatttacatatatgataagctagccactttgatatgaagaagaatgtccggtgtaatcctttttgttgcttccataatgtacagtacatttctgaacattttcacattagctcacaaacaaataaaagatctggggtatattgcaaaatccaacctgaagctatttgcttaaattttaatataccttttgcttttgtttcccttttggtattccttagccaaattaataaggtatatgctctgctctaacagctagttggccatttcttggaggagacatgtgtgaatcccacgtttattatcaaccatccagagataatgagtccattggcaaagtggcataggtctcgacctggattgactgagaggtttgagctctttgttaacaagcatgaggtatatactaagtcttcattgatactttcatacttgtcctcctttctgtttccttacagtgttatgaaatccattttttaggtgtgcaatgcatatacagagttaaatgatcctgttgttcagaggcaacggtttgaggaacaactaaaggtacttgttagattttgtgaacatttgcaaattgtatatttttctttggtaccagcctgctcccaagcttcgagttatttttggtattttggaacatctaaatagctttgcatagtatataattgttggaaaccaacctactcccatatgtggtatattttggtccatcattttaaccagcgtactcattatgcttgggagttttggatccatcatatatatacacacacttgtgtttgcattgttaaaagtagtggtaagtcattggaagggtgggatatgaagtgtcaaacagacaaacagagtatggacccttacaccagtggcagatttattgttgcatggtgtttccctagcttcctatgtggcttgctgaaaaactgtacatgttcttacgtatattatgtgccaggatcgtcaatctggtgatgatgaagctatggcattggatgaaacattctgcacagcccttgagtatggcctaccaccgactggtggttggggattgggaattgatcgccttacaatgttgctgactgattctcagaatatcaaggtctaattatttcttcatttgtacttttgttcctggcattttttatttggtctttattcagttgaggtatttaaaatgctcttttgatgcaaattcaggaagttcttctattcccggctatgaagcctcaagattagatatgtccacaaagcaggaacctgtcagaagggtacgtccatatacttctatatcacaaagtaattctttatgttttttgcccttttaagcatttatgaattttcatattgtacatgttctctaaaatgttaaatatccaggacaataataaaaaccatgcacttttttagggctagtagcaatgtagcattatgcgtataacagaactttgtaaagctcagggtttcatgcgcttattcaatcagcactgattcaattgtgtcgaactatggtcataaatgaatgaaatgtgcctcactattttcaacataccattatgtcaatgtttggttgggggttgtgtcgaactatggtcataaatgaatgaaatgtgcctcactatttcaacataccattatgtcaatgtttggttgggagaaactatatttgcattggacatgatttaggatgcaagtttgtctattgaatggtatgtgaaacatttcacagtatctcgttccaaaagaacaagtactgtaaagtttttttgtcatgcatctgtagattttggaaggaaaagactggaatatccctcaactgtagaattttgcccgccctttgtcaaatgccattgtgctaactgtacttctatgctgcagattaaagcagactgaatgctgactgagaggatttcaattggccctcgagatggaggatttgaaggaaacttataattttgttttaattgtgcatgtgaggtttccatgtcctattgtactttatttttggagaacattggtggtcagttaagcaaacagttaatctcgctgcaaagatatcaagcgtaacttataagatgacttaagtttgtgcaatttctgtggccttacttgaaaatgatagcgcgttatttgcggtcttgaattttgattgattttggaatgggtggagctggaaagatgatgctacgttgttggaattttgacgcacaattccctgttcagtaaattaatgtttatttctgcaaaaccaattgatttggttggagaacattggttggccgactgaagaatgtcgaacgtctgctccggtcagggaatgtgcaaattaatcgatgtgatgctgatagcagcgacctgtagtattgcagcctctcatctttttcttatgcttatcagctaaaatttaaatttttaatcttaaatttggagttgattttgaggttgtttttatcgaagtttattttttaagcctttgcttttagacattacgaacacatataattacaaatatgttgtttagcttatttcccaaataagtggaacgtttggggctgttgatcttgccagcttctcacgtagtacactacaacatatcacgcgccaataaaaggcttaggccctgtttagatgggactaaaacttttaagtccctatcatatcggatgtttgaaaattaattataaatattaaacgtagactattaataaaacccatccataatcttggactaatttgcgagacgaatctaatgagcctaattaatccatgattagcctatgtgatgctacagtaaacattctctaattatagattaattatgcttaaaaaatttgtctcgtgaattagcttttatttatgtaattagttttgtaagtagtctatatttaatactctaaattagtgtctaaagatagggactaaagttaagtccctggatgtaaacaccaccttattaaggagaatgagaaatcatattggataaaagacccctttttaaaagattcgtgtatttattcaatatagatgtatccatgagtcgttgggttcattactgtaagataaactagattgataccccacgcattgttacaggattttatggtggtgataaacaactttgcaaatatatgcttacaaacagaattgaagaatggaaatatcaaaagtagacattcaaaaataataaagtgtaaagttggcatttgagtagtagatggtcaagggacatagcagtggcttaaaccactcacataccatgtataaaatgctaattgaagaggttctattaaagagaatgaagttagtatataacactgtgggagcttgtagcagttgcacctttaagagatgtgaataccacaaatgtactatgtataaaagatctgttaagaagaataaagttaggtatatagccctgtttgagagagtttctatcagctatagcttcttcaagaatctacatctcctcaaaccatccagatttttattcgaaacttgagaatatggagcctcaacaagacattaatttgtttttgctaatttcgaaaaagaaccccacaaaattctgaacaaaaacatttgaaatgaacctcaagatctcattccaaacttgcttgagatgctcgaaatatgtaaaatttgagtgagatctcatgaaattgtgaacgcctgatgggatgttggagagatagatgagtgcttgggtacgtggacagggaggggaaaaaaagagaggaatagttggtagttcatatggatgcgcacatcctcacccttgttgaggtggaattcacttctatgtacaattgcaattaagctctatatcctttccaattaaagatgtccaattccaatattcttaatctaaatgttctaccttttgttgagtggaacatagatgcttcatcggcagagaacaaatgctaatcttcgtatgtccaactagcaatcttttgtaatagcacctatacatggttgttgtaatttatgtcagtgatgatatactgatctccactattacaatattctagtatatatgcaaatcaggatcagtcttaatcagagtgttctaattaattaatactaggcctttttgagttaagtgaccaccctataaaaggccctcaaaccaaccaattattttactaacacatttggtttagccataaaaagtgttaactgtttagggcacccgcaatgattatctataggctctctacaagagatccatgtcagcatatttttctacttggaagagattaaatgaagagagagagcaaaactatctactaacctggagatagtctatagagaaaaacgagacaatggattagagagctatagataccgttgtagacataccattgaagtggtttactattaatctagtctattgctgagatgtacatgttttatagatagcaacttactttaccattgcgggtgctcttaggataggttattaatcataacaaattattcgtgcacattgattaccccaaagtctataattgttaatacagggaaggacttgcacttgcttttctgggcgtggggacaggagaaaggtgccaactgccaagtgtagtggccggagaagtggagatctcatttgtcggtgcagaacttgtggtgcaagctccatccgtagctagggccatagaaaaagcgttcttgtccataattcgatcccagtggcctctctgacacgcagcacattgcggattcgcggttggctctttccttcacggttacgaaggctgtctcatctcctcgtggaaaaacattattcagcgtgtgttttttggtcctattattgatcgatcatgcagctcgcatcacggtccatcaagctttgatgcctcactgtccatcaagcttgttgttgtccatgccggattgccggtcgatcgtacgggtcttgctagttgcatgcatgtgaacctaacacattcatcccgcatagagaacaagataacttttggctgcgttctttgctgggaactcccaactccccaccatcgttttctgcatgcacgcttttcaaattttattttacaaaaaagtttctatacgaaagttgcttaaaaaattatattgatctttttttaaaaaaaaatagctaatacttaattaatcacgtgttaatgtgaacatcgttttgcgtgccaaagaggaggggttcccagcccctcctcctgaacgcagcctaattactcctttcttcccataaagattttattttttgggtttttatctaacgtttggccatccatcttattttaaaaaattatgtatttttttaaaaaaataatcagcatatacttcctccgtctcatgaaaaacaaaactaaaactagaacatgttgtgacatacttcctctatttcaaaatataagacataaccacccttaacctaaagatcaagaaataattattatcacctcatcgtttagattacctaataaatagaacgcatgcacctaataaaattagagatcttgatggtggaggatttaaataataatattttagtggaaaatgtgtgctagttaatgacatgcatgcatgcatgtcttatattatgaaaacaatttttaaaagtagttgtgtcttatattatagaatgcagggagtattctagtggtaggatgtgtcacatcctgttcaaggtttgttttttttttaaacggagagggtaactagttacgtataagttaaaaataaaaatgaatcaatatgatttttcaaagcatcttttctatagaccttttttaaaaaaacatattattccacctcttagcaattgggaaaacacgcacacaaaacgagggagtagaagagtattctgaacacagccttagagtaagtttaatagtatagcccactattagctccaattcatctatagccaatgtaatagccaattaatacaatagttacttactatactattaatatatggtcccacctgtcatacacacactgcgtcttggagtccgtgctgcagctggctacaaatctatagcccactgccttctctctcatcttttatctcattaaaatatggctaatagtatgctattgtacctgctcttataagttcgtttccactacaagcagtggataaagttttggattttcgtggtacgcttttcaaactgataaacagtgtgtttcgtgcgaaaattttctatatgaaagttgttctataatatcagattaatccatttttcaagtttataataattaaaactcaattaattatatgttattaccacctcgttttacgtgaaacacttaatttttatcttcgtctttatcttcgtaagattcaaacaccaccatactagttgaaatggagcactttttatatattagtaaacgggattgtacagtaggacgcaaatcgtctgtccattaaacaacaggcccgagaagaaggatgatggggccggacggccggtccggggaagtcgcccgtcacaatccgaaaagcgcaaggaggaaaacgtgagcaagcgaaaccgaacaaccaaccaagcaagccatgcacgcgcgcccgcacgctgacgcggcgccgtgtcgtgacgcgccccccggaattagcaccagccgcgcgcgggggcgccaccaccggatcagttcccccatccgcggggcccgggcccagatcacgcgccgtgacctgacctgacctggccccgcacgccacggccacggtgggcggatatgccgcgcgcacggccgcggcaccgcccggatatgccgttttcccctctgtcgcccgcgagcagatcacgcgggagcgcggcagccaacccgaaaaggcccgggaatatgcccacggcggtggtggctatcgataaacgaggatggagaaaaggcgggggtttggtttggactttctgccaccgaccgctgctttttagtacgcgatctcgaactcgagatcccttttgcaatctcgtcgaaaacggctctcggtttcacatacacccaactagtcgtcctaccttgttataatcactactaatcaatgaacacacagggagttaattagtagtagtagtaataaactaacaaactactaacacacaacttgatgattagtagccgttcttaatcaggcacgcgtatctcgtgtggccaggaggaggaagaagagcaaaaatcgcaaatccggaaactggagtagcagcatcagcagtagcagtactaaacttgtactgcaacacatggcaagcagccagggagagagaagaagaagatagagatagggacagagagagcctgtactgcactgcactgctgcctagcctatctatccatccccatcgccacatgcctctcctgcagctgcggcctgcggccaactcgtagtactcctataaggcaaggcctcgctaccccaaccgtcccctttcgcctccgcgtttcatctcctcgcctcgtctcgcctcgcctattggccgcccgctccccgcatcctcccatctcgccgcgttatcgccttccgcctcctcctccgccgccgcctacgcttctcgccgccgccgccgccgcctacgcttatcttgttgtgctggttgcatgcgccgcggcgcaggggctgacggagaggggtgcgcgtggaattgagaggagtggcggatggaggcggtggaggagcaggtggcgccggagcaggtcatcagcacgaggggaggctcggtgctcgggaagaagaccatcctcaagagcgaccacttccccggctgccagaacaagcgcctctcgccgcaaatcgacggcgcgcccaattatcgccaggtgcgttgctcctcgttcctaatctagtaataatctggatggtttccggatcagtccgccgcgcgccgcgaattccttggtttccctggcccccccattccatgcgttcgcgacgggaatctgcagcaatttttggctccaatcttcacgaccacggaagaaacctgccttgcctgtttatgtctcttacatgttttgtgcgctgattgtctgctttatcggtaaccttgtgcagcatgaccgattcttatgtgcgcatcctatgataattttggtgttctttccggaagtgcctttacttgttttcagaatagtaaatgtaaatctcaaaataaattagtacaagaatgttaacacttaatgctatgcaaattgcatttggatttcttgatgatttttgttgatcacactgatgaacatgagcattaacacttccaatgcatatctatctgggctgtttctgctaaggcatcatagtcttcgatgatagaagatataacatttaaagaaaaacaatgtgaaggccgcatggaactttgtatgaactaaacaatccatctgacgtgtttattataaactcttgaatgaatagtcctacaaaatgtgttctccaatttgtaattttcttgtgtcctttttatccagtaaagattcagcaacagcctgggttctcaatcatctataattttctgtcatttactcactgttgccaactgtttttcaggcgggttctttacgagttcatggtgttgcaatgccgacaatgaagggaattgtaaatgtgttaaatcacattggagcacaaaagaaaggaaaacaaacccaggttctatggcatagtcttcgcgaggagccggtaagaacactggtcactgatagaaaattaagcatctctagcataagaacattaaattatgctcaccacttcaaaactacaaaaggttggaaacttggaatgaacaatggattttgaactgtctagaacatccgtttccaattctcagtaggtaggcataaataaataaaaaaacatagagaagagggtgtgtatttttcttaaaaaaatatatgaaaaggtttctaagtaatatgtacttatggaaattacataacttgacatgcatgccttaacagtatgtaaatttcaaatttcaagtgagttctggaccagtttgcttagcttgcagtaagtgtcctttgaacaggttacaccctttccttgttacaacaaatactacttctccctataataggatagagtagtaccttatatcttttttattttatgtttgacaaaaaaggaacttagtaagttgtaatttccaccaatgttgtacaggttatctacatcaatggtcgcccttttgttctgcgagatgttgaaaggcccttctcaaaccttgaatatacggtattctttgatgtttgtcttgaatttttctagtcatgcctagagtgtgtatgcagtatgtctctatgtttcttgtttttgtatgagaagtccatgaaggtgttaaaccaaaaatattttttcttgctaaacatccacagcagaagttatgatacagatgtcctgagacccaggaaaatatatagctctgtttcttaaaggaatgatgatgcattagtgctattgcagacttggaatgcttttcctgttaaatctcattttgatttgggtaattctagatatgttttcaaggctatagaaacatgaaccatattgagaaggcctatcccttcaaaacaactttgattccacatgaagttactattgttctattatcattttatttttccattttaacttttttttttggtatatgtactactactgtagggaattaaccgggaaagagtggaacagatggagtttcgcctgaaagaagatattcttcaggaagcttcacggtacgtcggctgccaatattgttttctacccgtatttactcttaagaggtttgtttgtttgttttacctgaatatttgatggagcagatatggtaataagatcctcgtcactgatgagctgccaaatggtcagatggtggaccagtgggagtcagtggtaactgatacagtcaagacccctcttgaggtaagaatagattcaaggtttggttatattgttttattatttttagtccctttgagaatttgtttcctttgtataggtatatgaggagttgcagcatcaaggataccttgtagattatgagcgtgttcctattactgatgaaaaggccccaaaagaaggagattttgacaatctggttagttctgtatgctttttttgaactgttagttctgcatgttactgttgtttccctatgtgcgagcttttatgtttagttggaaaaggtttaaactaatttgcacagttgataggatccacatttaccagggttcaatcatctatagactccttgtgattaatatggtatactgaaatttggttcatatgatagttgcataacattgaactccactgtttctaacaggtacgccgaatctcccaagttgatatagaaactgaaatcatatttaattgtcaaatggggaggggaaggacaaccactggtatggttatagcaacattgatttatctgaaccggataggatcatcaggtaagtacagactgtaatttgattggtgatattgttgcttcttctacctatatgtacaattgattgataaacagaattctccatacagactgttgcctattttgaaccatcatgtggtgattttgtatttactgagtacaaatctactaaatgcacatcatagatatcttttgcattatattcttacattttgtgcctgtaggttcgtgtttgaattttcttatattgagttgtgccgggtgctattggctgcaggtatccctaggacaagttcaatcgggaaagtcttccattctggaaatgatgtagatgactatatgcctagctcagaagaagctatcctcagaggagaatattctgtcattaggagcttggtacgagttctggaggtaatatcctggatctgttaattcatatcccttttacattagacacttagtgtggtcattttttgatttcatttgttcagggtggtgttgaaggaaaaaggcaagttgacaaagttattgataaatgtgacacgatgcaggtataccattttatgctcttcatgatactaacttaatacagctatattaatatatttgttgttatgacttgttgtgactatggcagaacttaagagaggctattgctacataccgcaatagtattcttcgacaacctgatgagatgaaacgggaggcatcactttccttctttgttgagtacttggaacgttattacttcctcatatgctttgctgtctatgttcattcagtgtgctctgctcaacaatcaaacttttcagaagaagttagtttttctgattggatgagagcaaggcctgaactgtacagcattcttcgaaggtgagccgtggcaccttactataaaaatagtaccatgtacagcttgtaagagtgtatgcaggctaaacatggttctgttttttatacatgagatgagctcttaaaaattaacatgtccattttgttttatatcactatactattcacaagtaaggtggaattcttatattcagtgtaccaatatgtacttactttccttgtaacacattctggactttcattttagatcttgttttagataagatctcaatgcttcttcaatattttgtttggactaattactagggtacacaggcattaatactaggcagcctttgtgtccaagaaatattagtcactgacatttcttgaatcaggtcatcctggtgtcaaaaccatggattgaaaaagtagtcgttggctatttcatggagctaggctcattgcctattccttttcccttctctaatatctttctcaaagtattgtgtgtgtttttgtaatcttcgataagcattaccatcatggttttatccaaattaatttgaactcacctctttatggcttggagaactggaagtaaatagtaaaagatgagctaatcttttagctcttgatcaacatgcaagttggaacaaacaattttacttaaacaacaatggtagttttattatcgagtctatatggcattgaaaatatgaatattgacatgactaactttttgaaaattggttaattcattacaaattcaactttatgaagagataatttaagcatggataaaaaggtcatactttgcacactttcgattttaacagttgtcttgatgagtgtactatgctctctttctgagtcatcatcataacttctgccgtatctcatccaagttatatgatatgatatgattgatatatgaaaatcactacagtaaccagagaccatgtttatctttgcttctcacactttgtatttattgagctcttcataacagcaagagctgtcacaaggcctcaaccttaatttgacaacccattccttgcaccacatgagaaatcacaacattggtgaagtttgtggttcaggagttagtctatagcatgcacaggattaccacattaaaagaaaacaaaatccaggagtaatttgtgaaatttatattggagatcaataagtggtatggatttatagctcaatattacagcgtatttactgtgtgtatttgaagaattaccgcgtttgttttaattaaatgtaatcagtcaatttactgtgcgaaccctaatattaaaacggttttttgtatacatgacactagagaagtgctctcatcttcgttctttgatgtgttcccatatctgtccttcaaaaataagggaggaaatgaaggataaaacagatcccttctccaacttaggcattttgcattttaccattcatcacaaggatcttctaggcatgaatataccatataaatattgggaaatggattttatgcacatagtgcatatgcacctatttaactgtaaactgaaatcttacttaaagtttaaaaggtcattgttttcatagaggacaaggtggtgtggctacatgtactggcttctatagctttgtttcatatggttgctgcttcacggaaacctgctttagccactatagcgtgtagcagcacatgagtacaaaggcatttcatgattccatatgagccatgcattgcatgtggagtcctgatgcaaatttcatgttataatcatacaatgtcaaagggtaaagagcagaaaggttatattactctatttccaccatacactctgcatgcttttaaaacactggaaagtgtgtatgatgatgcatattcaaggacaccgtataaaattatccattttagtaagagcatcagtaactttttgtcttttggcataaccagtaaactcatatttttacattttgataatttcaggctgttgaggagagatccaatgggcgctcttggttattcaagttcgaaaccctctcttgcaaaaattgttgaatatgctgatggacgccctcatgagatggatattgttgctgccatgagaaatggagaagttcttggacgccaaactgtgttaaaaagtgaccactgcccaggttgtcacaaccttcatttacccgaaagagtggagggtgcacctaattttagggaaattcctgaatttccggtttatggtgttgcaaaccctactgttgatggcattcgagctgttattcagcgtattagtacaagcaagggagggcgaccaattctgtggcataatatgagagaagaaccagttatttatataaatgggaagccatttgtactacgtgaagtggaaagaccatacaagaatatgctggagtacacggtatgcatcatgtctggttgctttgacagatttgtaacatagtggatgctcaagattatttgctctaaccctaggttaattttgcacctgatctaacatagacttgtaatttttttccttcctgatgtatcagagtgcaccaatgggaaaactctcataagttattttgaatattaatatccatagctaagctaactatatttgtttcttttaactacttaacttttaatctgaagtaactgtccaaaggacttgttctaattctggttttatgaaaactttagttctttgttcagtttttggaatttgtatacttgtctactattgtgtttcgttgtgcttaataaactaatacttgaagcatgtgctctgttgagcttattcccaaaactgttctgttggtctaaatgatacacaatgcaccaacaccagggaattgatcgtgatagggtggaacgaatggaagctcgtttgaaggaggatattttacgggaagcggaacgctatagtggggccataatggttattcatgaaactgacaatggtgagatatttgatgcatgggaaaatgtaaataatgaagctgtcctgactccattggaggtgtacaaacttctggagtctgaaggtcttccaatcaagtatgctcgagtgccaatcactgatggcaaagcccccaaaagttcagattttgacacaataaccttaaatgtggcagctgctcacaaggatactgcatttgtttttaattgccaggtactgcacttcatttgttttattagtccagaattctatgttaggcaactcttgaattatatgaaaggctacaaaggttgagtttaacttactgatttttgtagatgggcaggggaagaacaactacaggtactgtgattgcttgtctgctgagattgcgaattgatcatggcagacctattagattgccagcttgtgaatataaccatgaagatccaaatgaattgggttactcaagtggagaagaaacaacggatcacaatggtcaccttaattcaagttcaccaagacctcatactgtgacagaacaacatcctagatttggaattgatgacatacttgttttgcggaagattacaagattatttgacaacggaatcgagtgtagacaaactttggataatgttattgacaaatgctcggctttacagaatattcgccaggctgttttgcagtacacaaaagtaattaaccaacagcatgtggagcaaagagttaagagggttgcattaaatcgtggtgctgaatatttggagaggtacttgaaattagttgcattctcagcatatctttggagtgaagcatttgatggtttctgcgggcaaggagaggcaaagatgtcatttaaagcatggatacaccagaggccagagatccaaagcatgaaatggagcatacggttacgacctgggcgttttttcactgttaatgtaaatatcctcatctcttctaaccaaaaatatcatttttgcacctttgaggaaatggcaccattagttataatttactatttgtaggatgaatccaaagcatcttttcagccttcacaaggtgacgtaatgatggaagccattgtcaaagctcgtaatggttctgttttgggaaagggatcaatactcaaaatgtacttctttcctggacagaaaaggtcaagcactattaacttctgtggtgcaccacaagttttcaaggtatttttatttgtaacaaaaatttgcatttaatagttgcctattcaatgcatatgcattttttaatctagttattcatgttattgatcaattctgccaattaaactctgccattcgaactttctgacccatcataggtaattggtagtagcgaacaaatatttctgtctacactccatggtgcagttatttctgcaaaaacataattgagtcatcaatatttctgcctcagtaacaaacaggatttccaaattttggagctttgatgttgtgcctcctgcttaacactaacagtggcaaagatatttttagtatgttttgatggagcatcagctttggtggaagcatgctattgcaatagtttatttgtttgtttggccttctttatgatcttctatcattcgaccatttgatttgcaatttagtttacagacttgcaaaatgcccattctagtacatgaacttatgtagtccatgcgaataaagccaagctgcacaccatggttaattttgtggagttggacagtgattaggatgccatgcagatgtataaatgaggaagagtcataggaacatacatgttcaatcaaccgtatgataatgcatgatggttgtacaataaaatagtacattgtatagaaataattgaagaatgtatggataggaatagatgaaggacaaaaaagccaaaaacaaggagttatttgatataacatgtaacacacggtccttacatgtgcacgtgggccatgacatggcgccctaatcatcacccatttcatcaagattagctacggtatgccgttttggccttggttagttggtttgcatgcactacacttcttacaccaaaatgaacactttataagtttgtgtacttacccccacctcacaaattcagatatcgccagcgtaatttactcatgttatatcttatatgacacatgactttagtagagctttcatgtcttagtgatgtagacaaaagattagtttggtagcacctgcacttcaaagtccaaattctgggaattttcgctcttcatgcttccagtgtttaagtgttaatttatggacaatatcgttcttgttccattacttttcaccgaatcctcccagctgtaaaggtcagcttaccatcccaatcatgggtgatgtatgagttgtacaattccatttctagatgactctagagtctagagccaaagtgcaaacttttgtttgcgaaaaggaacgggatgaattttgccctggtggtttttacagcatcatgctcgtcgtaatttgtccctcctgcaccaccttgcctttgcaccatccaattccaaagccacagcatgggtcaggccaggatcatgcgatttgcttgcattcttctatgtccatccctattggctactgtttgctaaatgaacttgcatcaagctagtgcctatgcaatgctcccactagaatgtgaggctgatcctagttaacatcatgcaacaccacagttgaactgctataactgtcatggctcatttcaatggttcttgtgatgaagtaagaaaatcacttctaataaaataaatgctaccaattccaacctaatcccactgagatttgtttttattatccagtttcaaagaaatacttgtgaacagatggctattacattatctcaataaagagcgatgatgttagccaaaagattggtaatgtttgcatttcaagatgtttgatgtcagagccacatcatgaaattctggattaaacattcatttcatttacgtgcagtgggtgtgaaaacctatactatttctcacttctgtgtgctacttatactagttgtaaagaaaattagtagttgcatttcttctggcaacagaggtagtgcatgtactaaatggaagtttcacttttagaaaactgattttataataaaggattacttagtcatgtaccttattatattttttaatattcctttcaggttgatggataccctgtgtatagcatggcgacaccaactgttgatggagcaaaagaagttctgtcatatttgggctctaaagatactgggagaagcattcctcaaaaggtggttgtcacggatcttagggaggaagtggttgtttacatcaagggaacaccttttgttttgagagaactagatcagcctgttgatactcttaagcatgttggcataagtgggccaatggtgagtttcctccaataatgtaaatattattttcatggcaaaccttaaatgatcttctatgcaggttgaaaacatagaggcaagactaaaggaggatatactctccgaagttaaacaacaaggtggtcggctacttctgcaccaagaagaatttaactcgtcaacaggccaaagtagtgttgtaggtttttgggaacatataggtacggaggatgtgatgacaccggctgaagtatatagtgtactgagaaatcaggggtactgtatcgactacaaaagaatacctctcaccagggaaagagaagcattagcttctgatgtagatgcaatacaatcgtcggttgatgagtatgtgccctaatccacaacttgatatagcttgacaaattgtgttactcagttgcaggctataagaatgatttgcttctctacaggaatgctaggtactacctctttatttcacacacaggatatggtggtgttgcttatgcaatggccattacatgcctgggactgggagcagatgaaaagttcatcatggaacaaacagcagaaacacacttcatatcaacttctcttacaaaaagtgtgtctatcaaaacatcagctgatatagctctcaagcaaggtgactaccgtgacatattaaaccttacaagggtactggtacatggcccaaaatgcaaagaagaggttgacactgttattgacaggtattgtgcaggtttttacttcattcaggcatttatgtaaattaatcaatgaatcatagttatgaactaacggggaacttatattagtttagtcatagatgttactcgtgtgattattgctatgcatattctgaaaaccaatctctcatgaaggtgtgttggtgctgggcatttgcgggaggatattatgcattacagaaaggcactgcaagattgttcacttgatgatgatgagacatggtcatatctaatggatatgggcactaaagctttgaggtaattttcatataggattttctcgattacactgctttctcttcatgcttagaaaagccacagtagtttaaatgtgcacgccccttgcatttacatttgtattgagtaattgactatgcaaatttgttaatggatagagtttgtcctgcttcggcaatttattcggagtgcacactccatttcatgagaatcttctatgcatcatgcaaagtacttactgtatttactgcaattttcatagttcgtatgtagatagcataacagttatatgaacaatcacgcataaaaaattgatcacgatactttattcatatgcagtttgaatgcattagagaactcatattcagggattgaaaaaggaatctcgacttggctgatcaaaaaccaccactttctttaagtgtatttcttcaacactaagcactctgcatgcgtgcagtggatgtctacaaatatagcatagtttctaaaatttaaaaactagaaaacaaattgcacaagtattcatatttagatcaaaatagtgttagtttttgggcacccaagatatagtcacttcaggaggttgctcggtttagttaaatgctaaacagttgcttgatcaaaaagaatgacactgcacaaaattaaggggaaagcacttgtcctgtggaatgtaacaaaaaatctaagagacattttctttgaagaaatatgttgggtttttctgagctgaataaatacaagctatatgtatagcattgtgtttgggtgtagcagtatcctagacggtcggtcctacatgtttacagtatcctataggctgtgtcctaggagtatatgtttccagttccagatggtcaatctcttcccaatatgtttccaaattattaatattatgatttcaactgtttaactgcaggcggtacttcttcctgatcaccttccgatcctacctctactgttcatctttgcgtgagccaacatttgcatcatggatggaggccaggcctgaacttggccatctctgcgataatctaaaactggataaatagatatatgagttatctctccattggatcattgaacagcttgctagttcgtggacttgaggaagatagggctgaaataatttcttaggaaggaggaaacataagaaccggcagaaaggagtagttcgtaggacattttaccagacttgttggcgccaattggcaccagcaaggatgtatatataattccgaggttaaattgtagaggaacatagctgaggttactagttttgtttttctccgtttattttgcaataaatgttatgtaatttgtttatatatatgcatatccttgttctgtctgcttctttatcagtaactcaaaactgttgccacatacggatattgtaatacgagctgtattatgcaagtgtacagtacattgtaaaaaatatatataggaaaagtttcgaaaagaatatactcctatatgggtgaaccgtcatccgcacactagcataaatttaaaaattggaataatatacatccagataactaagcgtgatatattcctagatttttcttttgcacgagcaaatctatactttctattttctatatagttgtaacttaataggtctaaaatttaagatgtaaatatgctacttcatcatctacaagcaataattctacttcatcatctactagcaataattataaacaaagctcatgcatgcaacatcatctacaattcatcgaattctacaaatcaatatttaagcatatcaaataatcaccttttcatattattttcacaatattttcaacataaatatgaatgatttttataatacttaacatatatttatccatataatcaaagcgcgagatatcatatttcatctgtaatctcctatcggtcttaaatttatttctctttgaacatagtttgtgaaagggtcaattaggcctagagagggggtgaataggctaatttaaaactttatacggaagctaaaactgagttagggtcggaaagtctgatccacagtcagactatccgaaaatatcagatagtctgatgttggatcagactgtctgatccactaaagagtcacaacaagcagatctagcacacaaacaagagtatagcgcaaacagcgaatagatctatagcagcacaattaagcaaagctaaagagaagatgaagagatatcaccaacaatgaagttcacggagttgttcccggagttcaaatctttgaggggatattactctccgttgaggagctcactaagagccgggtctttgctaaccctttcctcaagaggttgcactaagcactccttcttccactaaggggtatctctttccttgtggaggtgagatccaaccttcacaaacttctcccggccaaccacacgtagatcggtggctcgggagtgacacctagccgtctaggagtcctcaacctccaagaataacaaacaccacacaactcttggtcaaaccctagtgctcaagatcgagtgaaacacacactaggccctcaaacaccaaatccacaaccaccaagatccaccacacaaagaacaaggagggatttgagtgagggaggaagagttcaaagatccaaagcaccttagcaccaagctcaaccctaaagtgaatgtgaatgaatgagttgggtaaccctagaaaagggttaggtggggggtatttatagatcccccaaaatgtggccgttgggaagggaatcttttcatcccacctcggaaagtccgaggtgacatcggataatccgatgtttttgaccccccccagcaagccaaagacagagaacgaaattctggagaatttcggacaatccgatcgatcggatagtccgatgtcatatcggatattccgttatttttgagtcatgaatttcatcctctcacatagactcaagttccattgagttttggagtctctgggtcatcggatactccgatcacatcggatagtctgatttgaaattcactcaagaggaataaaaagcaattcaaaaccgagagtgaagttctgagaaatttcagatagtccgatgtatcggatagtccgaccttatatcggatagtccgatattttatgaccaacactaagaccaaagacagagggcaaagttctgtgaaatttcggatagtctgagcatcggatagtctgatcaagatcggatagtccgacaggaataaaacaggaacacttcaaagaaaggattttgagcactagtgttctaccaattatatgcatgtggtatccctcttaatagtatggcatcccaatactcaagaacacatgatacacaaggtttagagaggtgattaccacacaaattgccacaaagctttctatgcttaagttccactcctttttcatccttgcatacatctcaacaaaaagcattagttatcctctaattgtgttgtcattaacaccaaaacaaatgaggggtcctagatgcactttcagtttggcaaactaatatccgtttcactcttagctcgattattgagtaaagtgcattggaggtccataaacttctgtgggtgtgtcatctaggtcctagaactctcaaaatacatttttgtgtccctcaacttatctcatgtgtcatataggtccaaacgggctccaacccgctccgtgtactgacgtggcatgccatggtggtgacgtggcatatgctatggtggtgcctacgtgtcagtagaaaccatatatcaatcacatatagaaaaaaattaagaacatattttttctcctctcctttttcatttatttttcaaaattaaaaacattattttctcctctctctctctctctctcactctctctcctctctttttaaattttattttttctatgtgactgacatgtggatcgcactgacacgtaagtgtcaccatggcatgccacgtcatctcacgaagtgggttagagctcgtttggacctatatggcacctaagacaagttgagggactcaaaaatagggacctaagtgacatacctgctcaagtttagtgactatccatgcacttcactctaaaaattacttagtaatttccacagcaaaatacggagaatcacctagtaagaaatacggggttgttaagatcaatgtcatttcaaaccgtaccactcttggcaaatttgttagaggtgtgctttcatttaattttttttatcgaactttgttaaataaatatataagaaatcctgccaaaaactgtaataatgcactactgcttatactggtacaatattcagtttccaaaaatcagtactcctagttaacggggaagaaggatgtgagtttaaatacaaatttgaatttcaaatattaaattcaagtttagaatcattctaagcaggactagtagctatggtaaaatccaaatccggcaacagaggccccgttcttgtgagctaacagatggttggcataccgccacacttcccaagttcctagctttacagttttcacaaaaaattttttcatcgacgtttattatgggacatttttcaactttttaatatttaatttatttatttgtgccctcaaataatatttagtttcatccattgtccaccctaactaggagccatatctttacgatgtttgagaatagcacctattgtcaaggaaaatgcctgtcatactaaaagaggagaaaatgtgtaaatgtggtacgtctatagtcattctaatggcctgatggtgaaaaagggaggagttatgaaacaagaccaatgaggcaactaatgacccagtgcaatacgggctcaatttgtagtcattttggtgaaattaatgtgtcatttagggggttgctgctaacttagcaggtggtctttgttgccaaggcaaaagaatggctgtgttgtttggctgggccttggagctattcttatagcttgctcgagagccgggtggttagttttatagtcgggtttgtggttgtggccgttttttagttgtgttcattgtcgagcttgtggcacatatggttgttataatttaataagggtgtatcttgttttgtactcggggttataccctctcttattttaatataatgataaacggatcttttgggtattcaagaaaaaaaaaaaaggtacgtctaatacatgctcgttagctgtctacaaatacgcaaccagctcacgtactgttatccaggaagacttctgaataggcctgtgaacacgttgtaggcttgtaactatgtatagatatggagttggactcaaaatcaacccatgcgtcacgtgccataataattttgaaactcaaatcaacccatgtaccaacctagctaggcgcgtttttcatctcagcaaaccgtattttttaacccacatttgtttaaattttcatgtaaatgttagaaccaaattgaaatgggctgtttgtgcaagcgtggtctagaatcgtctttttaggaaaagttaatatataccaagttttcatacgtaaatcgttttacactaaaaattaaagccgagcccgatttgaatgtgttcgagtatgtttgcacattagattcggatataaatacgttcaggaaataaaatagagattaaaatgctaaaataacagagccagtaaaaaacactaattaaatagacaacggtaaggaatcatttagcaaacctagaggaaattaacaaagaattttttttatttttttaatggaacgaattgacgaacaaaattctacccacattgtccctatttgaaacagctctagccaatattattgaagttggatattcttagatttataaatctatatctagatttgtgtttacattcataatattaatttgaatgaattattttgtttgtgaaaatataaaattctaaatcactacaaattaactaaaaaccctaacgcgttgtttgttttcttgtttagcagttgtaactttctcttttttaagcacattttcaaataaatcttttctatataatagtttttttaaaaaaattcaaataaacacaatttttaagtttgtagtaatcaatattcaattaatcataagctaatggcttacctcattttacatgcaagtggaaattaaaggtaactgctactccctccatcttaatatataactaatttttaggattcaaatttaccccatatataactatttatagctctcttttaacccatcaaccaccctattttctgtagactataagtcctacgtgcatcaatgaaggggttgtttagtatcccatgatgtagcggtttgggctgtgttgcaaagcccaactattttgttgcagcagggaacagcccatcctcctgtagccgctgtagttagtagcggatccagaaaatcgattcattggtgtcataacgtgtctatcggtgtcatagtatactaattatatttagatcacagtgttataacatatgaataagcagttttgctataggttttgccgaaaatcgtcggtgtcgcctgacaccggtcctagtactatagatccgcccctggctgtagttgtaggtgcagcgctgcagcatgttgattctccgaacaactctgaagggtgctatgattttttcgccttcactccttaatccctccaaaattatctagaaatatctatatttcggagaaaggggagtactgctcactagaactgagcttaaatccaacaaacaaagttttagaattcatcaccaatacacacttcttttagaatttgccacccaatttacttttcttttagaatacaacactaggctgcgaattttcttcattatgtgccactccatctaccagcataggttgccccatccttgttaatccgcccggtgttgccgtcgttcatccgtcggtgctgccggcgttgtccaaatttgattagcaaggaaaaagttaaagagggaaatataaaggggcgagataagaaagagaagcaatccaagcaaactaagcatgtaagatgacgtcatcagttgatgaatcaaccaatccaggtccggatggatgccaaaatccatcataggcaaacgacggcaaaagcgcacgtaggttttggttcgaggtaggcccgcaatgtagcaggaagaggacgatggtgtcctggcacaactggcgttgcagaggactatagcgacacagtgatggtggcaaacagacgatgacggtgccacagatggatggactatagcgacacagtgatggtggcaaacagacgatgacggtgccacagatggatggcgatgcagatgatggatgtcgacaacgatgacgccagcggacagagggtgactcgactgatacgagtggtgaacagacgaacaatgacttgtggcttacgcgagcgcggttggtggactaggacgacgcaaccgacgctggcggacaaagtggcgtagaacgaaaaaaattcgtatcctaaattcctaatgtcatagtctgaaaacaacggatagactgataaattctgcagggcgcattgaatgccatattttgaaatttctgcagatacggatcatacggtccagatccttctacgattctccggggattgtccccgttctttttcccgggctggtgggccgtccgttgcgctctcccagagtcccatttgccccctttctccctgtcgagcaccgcttggccgccgtgcggcgaaaccctagcgattgtagcggccggaatcagaggcggcggaagccatggcggacgacgactacaacgacatggacatggggtttgccttactctctactatctcactctctctagtcctttttccgtatgatcatgggaatccaatctagggtttcgataggcatcgcctgttctaataaatttctaatcccagaccggtcgaaccagctctctgtgtaacatgttgcgccggtaggagtctgtgctgggtgattcgttggcgctcctcatcgccatggggagcatttggggtggtgggttcgttgattcgagtcgaagctagttatggcgattgccgcgattcactcgattggtttttggaaaacgagaggtgttaatgttggatgcgtactggtcttcacgggtaaaaggtgtctttggagtttattcttggggcatgttttgatcgttgagtcgagtattattcttagggcatgtttcgttcgttgagtcgagtaatggctcttagaagttgtctgagattagtttgtcagcaacagaaggggatactgtaaagagtgatattctgtttccctgcttgtttggttatggttaggtttagcaggttctttgaaatttaggtttgcttggatgaatcaattgggttaatgcgacaatcccgctcaccaattatgggaattttcattgatgattctataccgctttgtttgagagaaaagaacattgaacgcagtcggggatggggggttctcatgcgtacctcctgcttgctcctttctatggtgacatggacatgaagggattggctagaccgatataggtcaggggagctatgcaattgatgtaataggaggcttggtgcaaatcatttatgcagcagtataaagaaaggggaaaaatatatatgcatataaggaaaacaaggagaaaaatgaaagataaaaatggaaaaaatctattacatattaagatagatggtcattgtactaatatggaatcctaactttgtcacgctagctaaaaacttagaggatctctaacatcttgcttctaattggaacaagaatgtgtggtttcattcttttctgcttaatttactgtggtggcttggcggttaaaacatatgaattagttagttatatgtccattttctcaggaatattcaattttagtgtaattactaaattacacagaccaaagttatgttcattagtgttggtagaagtgaaaattttgaatttcttttacatttcatcctagtgagatatctaccattatccttgcacaactatatgattgctgaagcactgattgttatatgtcattttaaaggattgttttgttggatattgattttggaatggcattgtattttcctctgcaggtatgaggatgagccaccagaacctgagattgaggtacacacattgctatcctcatgcagtgatgttatctgttaatggaaaagaactgatggagttctgttcaataataggaaggggctgaagaggaacctgagaataacgaggatggccctgatgaggttgtaggggcagaggctgaagataaggaacaagaaaaaactcagcgcccacgcaaaacgtcaaagtatatgacaaagtatgagcgtgcccgcatcctgggtacacgtgcattacagataaggtatgtttctatatatcatattgcacagtattgccaatttgatggctaatagtttaccatacagtattaataacccttgctgttgttttatagcatgaatgctccagttatggttgagcttgagggagaaactgatcctcttgaggtaaattctatttttccaaactatacatgcaataggtatttgttcaaacaagcgataacctctacatattcattattttgatttttgccagttccatataccaagcttatattgtacaacttaaataaccttttacaataaacatctgtttccatcatgaagaatgaaaatgaacaatggaattttcttgtttaggcatacaacacctgactgccaactaattaataaaattaacgtttgaatatataattcaacaaagtacacatgtttgatagctgtatgtaattgtgtatagacataggccagcaattcaatcaatagaatgtctttttttcgtcatggagggctgccacgccgagtcagcttgaaatctaaatatgtgactgacaataagttttcgtctgcaattatactagtatgcacaaggttgtatttgtacacatatttctttcatcaaggctctagatactattatttggtagccttgtgattctgtgatttgtttccacaatataaaaacagataggacaaatgttgacaagcaccctgacttgtctatttgaattagttcttctacccagacagaagttattagtcagggctcttatacattgtttttcatggcatttcaaatatcatgaaattgatctagtttatgtggagaacaagtggcaattgattaattctgtattatgttttagtgtttgatagtccaataccaaagattggttttgttgtaacacttgatatattatatggctgctggctggtaaatatgccactgctatccctgaagtgggactttcatacgcattagttccatccttattccaacttctagaaggtttattatatctaaatcggaagagttaaccggaggttttaaaaattctaggaaaaggaaaaggcaggtgccgggttttctttgttcatgccaaactttgttatcatgatggacagagaaaaggaagagatagaagaaatcaattcttccggaatatgaatacaatttttgttgactcccatattgttctcaatcttaaaattttgtatgtttacacgtgtccctcttcctccatgtcatgaaaaattttcacatgtttttagaattccacaagggtcttagattgcttttcccggataaaaaattattttggtatgttttaggcatggtaactgaaatattttggtagagtactcccacaaaaccaagatgagatgaatgttgactgcacttatcaacaactcattataaatactacttagatttcttctctctttctgtcagaaattgtcagttgattttattctatctttcaaattacttgctatgctaaactattgtctttgtgcaaattagattgccatgaaagagctgagagcacgcaagatcccattcacaattaggcggtacttacctgacggaaggtgagatttgaataaaagacatttatgtgtttcctgattttgtaacctcattataatagtttactgtgtgttcaaatatagctatgaggactggggcgttgacgagcttattgtggaggactcctggaaacgccaggttggaggcggctaagctgtgactgaggctactcaaaacgaacagcaatgtgctgcaagttgactttgcccttgtagtaatatggtctgtgcaactccattatgactggatgctgtatcagtgaactggcgtgatgatggcatgccatgttgccttgacatgtatgccttctttccgcagtgtaactgtgactgaaatttgcatggttgcatcagtttgcttggaccatttgcagactttgtcctgtgaatgttcaaggcttaatgcttggttttttttttcttggcctaatttggtagtcgtctagcagacatgagcgacatttttgcagtacgtagacatcagacaaacgggcggatgcctggaattgtgctggaactgaacttaaattccggttgattcgtgttctgggtccatttccacttttccagtataagtatcaaactctgaactgaaggctatatagataaatcagaaaataatttttttttctccttgtttaatcaggagttatcccgtgtttttggaacttttggtcacgtgccgacactttctttgatggtatttgtataggttgatctctattaaattcagagtagttctgtcacaaattaacaaccacatttgtatgaggcctacagttgtgtattcttttcaccaaatgcagcacacatcattccctaataccattctatcacacatctgtgctttcttgtacatcataccgtgtcgcttctttctttttacattgaacaacagtggccactaattacagcttctccttgctaataaaactcgctgagactgtagttcagttcattcctcggaatcggaatccattgggcatgatccgtcatccacggtggcgagtggatcaaacatgtgcgagtttggatccatgcaccctgacacaatgtccagcttgcagcgatctccctgccagtgccaggggatgcagcaacggttcagaactggctaggattaatcatgaatttgagataaaggttaaaagttttaccccctcttcgtagtagctgcccatctcgcagcttgtgatgacaacgttttcgtctgggaagatggctctgtcgcatgccccttctctgttcagttcgtctgctagaccctgcatcgtcgtcacagataatttttaaaataactctctttattagcacaaaaggtgcattctaaaagttaacactgatccaaagaggagtttcaacttttccagtgcataagctatcaagaaatggtaattaacaataaaattggattcaaggtacaaatcaagcttgtttgattgaaaacaacacgaactcggagcaaaattttacctcgttgaagaagctcaagggcttgttgagccatggcttggggaccctgaacttgagggtgtacggtccatcccaatccaccccgtttgtgaaggagaagacgagggtcatggctgcgagtgcaaaaccaaccagacaaaatctcactccgatgacaacatgctattacatacatacagtactagtaacgaatccatggccactcagatgacaacatgctattacatacatacagtactagtaacgatcacttgaacatatggtgtcagcatgatgcaaaagcttaatttaagttaatgagaaattgcaggcgaatcattcatatcttcaacgaaacaaaacaatcagctgctgaccatgctgcggcacacgtatcctgatggtgtatatgggaggatcagctgatcccctctcttgcagcgtcatctgcctcggctcaccaccgcacatgatcggctggttaaaaccacctgcagcaaataaagtctcagttatcaactcctgaatcagattcagatcaaaccaatttgtagcctgaatttttcccggacactgggtgggtgaaaaggagaattaagagggtgctcaattaccattaaacgcgatgccaaactgagcgttgggggtcatcttggtcgctgccgggttgtagaaaaggatcaggccctctccctggtaagaacacagcggcagcttaattagctactatttccatgatgaatctgccaggttgctagtactaccgctgttccatattataagttgcttttgactttctttttcttattattttttaaagtttgaaaatataacaaaattcttaacccaaaacaaacatattatcaaaatatatcaaatgttaattttaatgaaactaattcggtgtacatgttggtaattattttaaaaaaacatagtcaaatttttttaaaaaaatgattaggaaaaaaaaatcaaaatgatttataatataaatcagaaggagtagttgttacatgtatgatgagtgaaagtatttctttttgtgaagaaattaaacttacagccgatggaggaagaccgttcatggtcttccagtagaccggcgccttgcccagctcgaactccgcccatgtcggaagcgagcacctgcaacaaccaatttttttttttaaatcaacacaactttttcatcagccacaaattaaaggggagagctcagtttgtgagttactcactcgttggtctgcggcacggcgggcgccgtggccgcggcaggcgccgcggcggcgcctgtgcggactaccctggccgacgaggaggaggaggagctccggtggcaggtgatggtcgcagcgcttgccggccgccggggacggcgctggacggcgccgccgccggtgctcaggcggctgcaggaagagagcgtggccatcctacagtctacacttgtgaattgtgatagctgatgaaagaaagagaagagaatccgaagtgagtttgcgaaggaggcatatataaggatggatcatgatattatcgtggatggagaggtgaggtgaggtgaggggcttggctgcgcgtgtgtggtggtgaggtggcgacgacgagctggccggggcgtgtggttggattggatgagtattcttctgccttgatttttttccctctttttttttgttattttttcatttttcttgccagccgcctctgttttcttcgctatgggacaagagaacgcgaggctcaagtacattgttaggcgctttagcttttgccctgtagcgggaaagatctccttcgccgctaaaatatctggccttttgcgtacaaatatctcacaatgagagagctggttttacaacccctttcagattatattttgtgtgctttagaaaattttgaaaataatatgttcgatatatagagtatgttgtagtaagactgctttcttctagcgagtttgaagaaagattcatcgtacgcataaaaggataaaactcattaacatattattaattaatcattaatcgttataaacttaaaaaaaagattaatttcgaattttttccttcgaatccaaactttaacttacttgtttttcattagcacacttttaaactactaaatggtgtgttttttctagtaaaaaaagttttatatagaagatgtttgaacaaatcaaattaatctcttttttcaagtttataatgattaatgcttaatcatgtgtagaacttctcttactttttaacaaaatatccatttctctccacggtagctaagtgatcacagtattgcacatctatacttctatatctatactaatataaaaaagaggagttgccccctccaatcctactggtgaaatcatccgaatcaatcactaccgttcatctgcgtctctcctgatccagatcgtccgtccgccatctctcctatccgtccgcttcctcctcctcgcgcgatgagcgtgcgctgaacacgcgggactcgcgctcctccccagcgcttttgctgccgctgccatcacgcgccgattctcctcgccccaccgctgctcccgccggcgctcctcctcctccgccctcttcctcctcgcattccccgttcgccgccttcggagggtcgtccccttccggcgtcgccgccgccgccgccaacacgcgccgcttctactcgctccgcctcgatccaccacttctccatccgtcaatcggctcggtgaaatcatcggccagaaatccatcgctgcatcatccacccaaagccccatccccattctcatccccatcgccatcgtcaatctcgcctccttgatggcgcaatccccgcatcgtcgcaataactgccaaggcaagtatatcatcccctcagcccctcatgccctcgcccttcccccgccgttgtcgccttccaccacccgtatcccgcagcggcgtccgtcgccagctccccttccctgcacgcaggcgctgttggatttggatcgagagccgtcgtccttggatcaaagtcttcgcctcactgccgtcgtcgggcagtggagaagaggagatccagtgtatatgcactgctacagctgtcccaccgcctacggtaccacgtcacgtcaggtggaggaggaaccaaggccatccctcaacacctcaggcacctcatgagttcgactcccacagtgcacgccgccacgtcaggtagaggaggtggtgcttgcgtgtgaatgcaaggtcggtggtgatggcacattgcttggacaccgccatggccccgccctctctacttggtacttgcagtatatggcgatgttgccggatctagcgcatctacacgatggatgaccttgtcatgttcaggagttcaggtgatgttcctccccttctctaaagatttttatctgatgttggtggcgtatggtgtttgattaggggaattgagtggtttgcagtgtgatactgggttcaaccttcctaagaaggagaacggcagctgcggcggccagtataacttggcctcgaaaaaaggtaggtaaccatattatattcatgttgttctcaaagtttgatttattcacatcgaaggagcagccaaggcatgattatggcatttctgattctaatggtactgtgcttgttgtcaattaagattttatttggctaataaaaaaataagtgtatatgcaggtgatttgccaactccaactattcaggtggtactgcccttctctgcagtgacggaggatgaatttcagaagcagttgactcaggacaggttgtgtctcattattaatttaaatcgatctcacctcaacatcataacatcatgtaacttgcagtctgcaccctcgactaattcagacaaacctatcaagcctgatagactttttgattcccaaggatcaatccttttttggctaaattagcacaatagttggttcaagctgggtgccaacaacaatgcttaggaatatacacatctattgatcccttatgtgcaaagttgctctaatggcctcctatgtggatgtactgttgcccagtgatttgctaaagcactttctcctgttttgcacagcgaagtgagtgcttcagcttcagagccatgttcaaagagcttgtgtgttgaaagattgagcaaacgtgaagtgcagaaaaagcattaagaatttttggagtctaaaagaggaaattgtattcattttgtgtgaattgctgtaagttttttttctctgatttactttatgatgcaacatatctctggtgacactatcttctttaaacattttaaatttccctttgccgcaaaacatcacctttgtgaccatgtttttctgtacggtcaatctttttggctacacgactcagctttggcgagaggccgcatgggataaaccaatgtttctatctaaagtgttctttcaaaatcgtttttgtactgaataaaaaatgaagcttaatggatctgaagctatgtacaggaatcagaagggctatttagcagcaactgcagagtaacaacagatgattgtgcctcttctatttgtgctatttaaaaaacacttttttaacaaatttcatattgtccttttgtatagtcagccagatgcagcgtgttgcatgggacatggagcatgcatgttaccatatgcagttcaaggcatgggattagtgagctttaattgggtatcctgctaagattcatttctgaaaaaacatacaagaatgtcgttttcaatcatgctaactgtaatttttttaacaattgggttaagaccaaaataaaatgatataagcctctatttcttctatcagagatctattacaatttttttgggggacaataacgaataaaacaaactggtgaacaattttctttcccttaaatttgtacaaaatttgttgtgtctttgctgattagctgcaattgtgtgaacctggtggctaacgaggaatgatatggtgtttagagataacattgcttactcccttctaatttaactttttcaaattatttctcaactgatgtagtggaaacctctccttccccaaggagaagcagatggaggctctggtggcacgtctgaaggggcaatagcaaggctgcgaccaagatcaagagttggatgatgtttttcctaccaaaaaaagtttgaagtccgtgttaaagtaagagttgtcaatttctgctatgggagttcttacccctttttgtttagtttgtctatcctttaagtgaccctagctggtcgggatgtgtgaccatgtgagacttcccttttgctctgagctcatgtaaaccttgtaatcccagcgaacctgtcgttgtggctttcaatataagctacggggtaggtctgaggaccttcttgaaaaaacatttattcctatgttgaatgaattgtctagaattagatccacaatcttggacacaaggtttgctgctttgcttctcccgtagtaatttacatggtgcacagcttggcactccaggagtacacataacacatgctttttactagggtctatgatactctttttttacctttagaatttgtatggagtgctctatataaaaaaggtacatttattattctattttttttattgtacataataccaaaacatgccttacatgtgcacgataactagtaatctacaatgacacggtccatccatgtttgtttagaatttcttaaattgcacaaataaaattcaaaaaaaaatttgtagcttttcagataatttaattaaaattccggtttgcatcatctgcggatgaacaaagccacaagacttgttgcaaattttccacatcaaacagaatgagaaatgggagacaaaaaactagagctgtctaaggaatagactgttccaatctgtttgtacgatattgctaaaatcttcttcatctatgcgtgtctgaatggctcgatggtggtcatttacaaagtgctactaccttatcccgacagaaatctctggcagctcccttggtatctagttagaaaagagatgtagtacctagctagttagaactttctgtttttttttaatgtggtggcaaaaggacaaatccttgataaattgtacttccactattcacaaatgatcagcatatatggtttgtgtatcgataccatcacacttacacatgtcacttaaattgacatcgattaacatgcaacaccatttcttgtgtcctatatatatgcttcaagggcaatatgcgccaatgatattgcttgcatgcatgcagtcatgcaccacaattacaattagttagtacattgaacaatacatgcaactgattattttatactgcacaggaaaacaaaaagtcacatgtaggaagtaccaaatatactgatcatttctgaataacactgaaaaatttatatgatgataatttgtgaatgaagtgagtccatatcaatcttggcaaatttcccctccctctaataacacgaatattttggtgtatatctcaatgtataccaggtaagacataaatgacaaaattaagttcatttacaatcctaaatatttgttttaaaaaaatgtaataacactaaaattaactctaaaccagacaatattcaacttttaagtttcaatatcgtgcatttttcaactttggcttgaatttagattagttttagatgacatggggaatttttgtagggctgtttttttaattattataaatatagttatttacttcaaaaggactttaaaaactagaacttattttcaagagtatttttaacgtaaagatattaataagctctaataattggcccacagaagatactagtactgaaatatgaacaaaattccgctcaaagaaaacaatattttaggtgaaaactatattccacgacgcaccaaatttatctaggttttcacgaagtgagcgtatcttaactggttaggtttcttgtggtgaaactagctcaccagagttaaaatttagatttaacacgggtgctcgtatttatggctaattgttctttcagtaataggcgacaatgaggcgccggttcgtggtgactttgttaatctcaagatatgctaatccaatcttccagaagtgcttagaggtaggttatacgcgcgtgctcataggggtgagtgtacgcgcattgtggatgtctgcgtttgtattatatttctaaaaagaaaagaatttctcaatcgttcaatgcgcaaaccgtgatgattagacaagcttaaaattaccctatttgacgtttgaagcatagctgcacagagaaatagacctcgtttgacagccatttttgctgctacagattacagccgttttaaactactgcagccgcagctgctgccaaaaaaatctcttccaaacacacccatagatgaatatccatttatctttcccttttcgtacgcttggacattgccatttgccctacataaacacaccactcgtacagtgtacttgattgagttgacagtcatactctactacaacggatgaacatgtggaaatgaagacacaaatccactccctacttgctttcactgtcaagtgggccccgcacgacagtggcgagcgaaacgggagcgtgctttttccatcgtgattccttcaccgtaacgggatcatcggtagtaaggtcttaccgtgcagccaccgccaggtgggccccccgacccgccggcgccgcccactcccgtctcgtctcaaaccccacctcccctagtcccctttcccgacaatggcagcggtgagccgctgaccttgcctctccggcgaccacgatccgccgccgccggccggcgagatggcgccgtggtgccccgccgactcgaccaagccggtcttcgtcgggatctacggcgccgtcatcggcgggttcgccgtctccgcgctcttcttcctcctctcctccttctcctcgctcgccgcgcccccgctccccatccctcccgcgtccgccgccgccgccaacctctcgggcgcagtctccggtgtggcgcagccggagaccatgtacaatcggcccatctggaagcccccgccgcggagggagcggatgcccgcgccgcgcgcgttccgcctcacccgcgagatggtgggcgcccgcgcccgcggcggcgccattgtcgtcaccttcggcaaccacgccttcctcgacttcatcctcacctgggtgcgccacctcacggacctcggcgtcgacagcctcctcgtcggcgccatggacaccaagctgctccgggagctctacctcaggggcgtccccgtcttcgacatgggcagcaggatggccaccgaggacgccgtctggggctcgcccaccttccacaagatgggcagggagaaggtgctgctcatcaacgcgctcctgcccttcggctacgagctgctcatgtgcgacacggacatggtgtggctcaagaacccgctgccctacctcgcccgctaccctgacgcggatctcctcacgtccagcgaccaggtcattcccacggtcaccgatgacagcctggagaactggagggaaggtgaattatctacactttgcaataatgcaccttatctaagtcatatgttgtgacgagatagatggtgtgatgcattctctatttttcgatatttcccagtgctaatctatctacaataatcattgccctgctgtaagatcaggaaatcagaactgcacaatactgagatgaattttcttgaccttttgatactaaattctgaaagtttggaattaattttagttcaacttatgagaatagaactaatttttaaatatttacagtggaatgactctggaattggacttctgttggtgaagacaattgctgtagaatatagcttccaatatgtatcagcaatagcaaatcctagagaattagaacctgatgtgaactaatgttcttgttactgtatttttctgatgttttaaaaaatctgctccaatattttctgtttgcctgtataatattttttttccctgtttacctgtataataagattttttgttctgtttaccatcaattgcagttactatttgaacctaacatattgccttccccccccctttcttatgcacagttactggtgcatacaatatcggtattttccattggcgacccactgaaccagctaagaggctggcaaaagattggaaagacttactcttatctgatgatacgttgtgggaccagaatgcttttaatgaccttatacacaaaaaatttggatacccggttgttggagaagatgaacttgtatattcttatgatgggaaactgaagcttggagtcctaccagcaagtatattctgtagtggtcatacatattttgtgcaggtagttgctcttatttgtttgaaattggcaaattaaatatcttgcatgtcaaaatttttctttggtgagtaaattttcagttagttagcaattgcattttttatctttgttgtcctgcatatgtttggttcttgttcttttgtttcacacactttgtgcatcttgtttatactgtccctttcgtctaaaattctctgtaattttcttgggttgtttatacctgaaatgtatttttttcttgagttgccagggcatgtatcagcagcttcggctagaaccatatgctgtgcatactactttccagtatgcaggtactgtgggaaagcgtcatagattgcgtgaagcaatgcttttctttgatcagccatcatactatgactcaccaggtatgtttattctctgaccctatcatgacggaacttctttgggacagaggttcatgacttcatgtttaaagatcatgatgtgttctagtgtacaaatgccttctgattttatgtttgaagaccatgatgtaccctagtgttaaaatgtttcgtctgtatgggttatctcagaattaccaatggagcactgttaaacaaaccatgtaggctgtagccatatatgatccaagaatgaaaagatggtcacatgaaattattttcatgcatataacattattcggatttgaatcctacaatctttacttactactttttttcatcatgtccataatttacctggtattatgatgcaggaggtttcctatcatttagacccaacattcctaaaagcttgctgttagatggcgctcatactgttaaatctcattttgcattggtcaattaccaggtatctgcagctacacatatatttctgcaaatttgtggctgcacttctgttattgatggttattccttttctttttcctgattagtcatgtgcttgaaaattttcagttgaagcaaataagaactgcactcgctattgcttccctattaaagaggaccctggtcagtggaatttctattctttttctagtttgatttgaactccatgatggtagtgtgaatactacacacttactattcgtgattgtgaggtagtggacatgcagatcattaagtgtaaacatttagttgagattgatttaacctgcaattcgatttcttgaatgtgatctctttccataaactttctatatgttaaaaggttgaaatgattattaatatgttcttatcttttagatgttaattttgtctttactgatgatgtgtgcaccatcttaatttgatacaaaatttacaacttgcaaaagtgcatttatccttaaatgagtaagctgcagctaattagtgagtattgaggtgttgagtagtaatgtatggtaggtgcttcatgcttgcttttttgaggataagtttttatcttagataacttctggaggtgtttgagagcagaattacgctgttcgatgtattgtgctcaaacttgtggacacccaatttctgactactgtttgtacttttaggtaatgcctccattatggtgcaggcttgataggatgtggtttggacatcctggagttttggaaggaacaatgaccagacaacctttcctctgtccaatggatcatgtttttgaggtgattacactgggaatttttttcatttctgttatcataacattatttactatttttcatattatatgacatactattagttggttagagaaatagtttccttagttgtatgaatcatattttgtaggaaattcatcacattttttttttcaaaagtatatatggttagtgaagttaaagtaaattatataactgggatttcatgttatatgtgtcagcataccttagatttttggaaattctctgtagttttagaattttagatgtcattttttttagatgtatccaggtggcaggtggctgaagcttgccatgctttttattgtccaagctttggtggtttggagtttagaccagaccacagtgctatgtactgaaaacttcttttcaacatattattgctgatctggttactgtactgatatgcgttattcattattttgcaaccaccctcagaatgtggcaatgtgcagataaaaattgacatatcgggccattaatatttttcataaatatagcaaaagtaccaccggattaccatcacaggaataacaaatgatgtgtggtcaacttatggttttttgtgggtaaaatgagcatggatactgtgggaaatttgcatagggaagttgaaaaggacaaatatgtgaacaaagctttggtgaaatgctagatatttataagcagatagaatagtgttaatgatggcgtttcataccaactggtcagcaacacaaataaagttgtcttgtattttgcactacataataaacaggccagagaagtccacaggtggatccagtatgaagctaacattcctactacgatgatttaattctacaggtacatgttatgctaaaggacttacctaaggaggagtttggcccacacattgattttagagaatactcgtttcttgagaatccatcattgcctaaacaggtaatgttattattgtacttgttttaacaattcactatgaatatttggtagtaagaaaggtgggtttgccttctaataattattgttttgcatcttgcataggtcaaagaatcatttcttgaggttgagctctgcaatgagcatagcaccagatgctcaacaactaatagaaccaataaaggcgcgcctgttctcttaccaaggaatagcacagaacaaacggtaaatggcattgtttgcacattatgcatgcctaatttatctctcatgtggtcatgcatacaaatatacaacatttagattagaggatacttatttgtcacaacatgagggaactatactagtacccagattataggatttttagaaaaaggaaactcaagctaaagtgagaactggagcaaaaggcatatcatgcaaactcagaattaatgctgtaattttgaagttcgcaaacatgaacattttatttgagacaagactccaattttattaagaaatatgtgtgcgacaagccaacaagtcaccagacaagaggtatcatgccttgatcagctgcaattgctgctgcagctgctgcagccgcagtagttgaaagccgctgcagcaatcacatccgaacacacccgtcattaaaaatcactaaacataaaggtatatcgagacatatacacacctcagataagaggaaacggcataccctgtggaacatagagtaggattcctatactcctagtagcagccattgcctattgcaaggtctgctttatcttttggtatcttatggaaaaatcatattctgaagttgctatttttttttcagcttttggatatattcaaaccatataaggatatcaaaatcttacagttctcatctatggttaacgccttcggaggtttttctgatgcagtaagcttccagtcttcaacaattttgtgctagttctgaataaaaggatgcatagtaactttattgtttaaaccaggctgtggacacgaaatttcggaatcgagtaaagagatatgtgggcctatggtgctgtgtgcagctccgtgaaatagggcacatatattatgacatgtactgggatgagaaaccaggctggaagccccttcctccacagaccaaggtggaggaccatccaccttggttggaggtacaggaatgaggctaactacaatcacggatgttattttttgattcaaaggcaagatagattccttactacagattaactcctattatcatagcagtcactacctgttggaaatccaattgattcttcttgactgcttactgtgaaggaaatagaaatcaaatggcaatcagttttgtagctctgatctttgataggctgattcacttatggtcgatcagtgatcctttgctctgttcttacttcacacagatctctgataaaccgtggtccattcatcttgtgaagataatgttgtagataatgactttgactcagaactgttgcgctatgttcatagttcatacagacattagcttcaaaggagaagatagcttttttatgcaaaatgcctgaattgattgtttgacagttatctggctggtacagaaaaggagtaaacatgcatcattattggctgtgtacttagttagcataaaagggtattttcgttcctaactctccatactttcttgtgtgaaagttaattatttatgcgaactaatcagtagtattcagaagttccatatgtggaacacaagctgatttggagagggagaagggaccatacgtgctcccgattgccgatctatggctcagatccttcagtagttggtccctcccatcccacaaggctacttatcattttcttatctcccaagaccaagggggaaaaaaagaaaaggatcacaggcgacgggttaattgcaatgggcatagattaatctctgcctccaaatcacgagtaatcgagtggataactggatgcttcatcgcggctacattttcatctactttctcattttaaccaatcgtaacatttttcaattaaatttcatcaacttccttaatacttgtgttcaatcctaaaattctttatattttgaaatcatccatgtgctccagccttcaagcctccactctaaatggagtaggaaaacacctactacttgccacgcgttcccacgtgttcctcattgaagcttctccgctggaaggaaggggtagtggtgttgccgagccgtccttcaagtcgagctcgtggccatcagatcacctgaatccggttttccttcttttacttcccttcatctcgcactcacttgacctcgagcttcccatgattcttctttccccaccacggcgagatggctagaagaaaacaataggtcgcagtctttccttctccctgaatgccttggttgtgagaggatctgtccttcttgaaaatttgtggttttcatggggatctttgcctcttttgtgcttttccaatttgctcgccatggggattacaatcgctattggtttgccgcgaggcaggccaaagattggggtttttaaggggtttttggatttgttcatgtgtttgctgcgaggtaggccaaagattgggttttttaaagagttttttttgaatctgttcatgtgtttatgcttcaacttttgtcttttattggctttgtttattgttcttgtcttgtggtgtggtgtatccgatttgcttcattggttgtattcaagctatgaaactctaattttgggaagttcttttataagattgattattgaattattgtgttgttatcacttaatgaacacatcttgctttcctgtctccgattcagagaatgcaaaggaaacgcttcatgtggggataacgtgtgaggaaaaaacaccttgcaagtgttgggacaaacgaagggagcaaaagaggattgagacggacataagcatattagaacgatcggaaagttaccagattaagtagttaagataagcattggtcccgctattttcttttctatttttgccactttgttgacatggcactactattgcccttcttctctgactcgcttccccaacccatttccctctctataccaggatgagaaggtaggagatgaatcaatgatgatgaggggtggtgacaggccgatcatagtgggtgcgtacgctagatccatgcgacaatggaggaggtgcttgccaccttcaagcccatgccgtcactcctacacaccaccacccttaccatccttcgggtttgtgatatgagtaggggtggcccgaccttacagtgagctaaagataactattatttgagagagagaagttgatgaccaaactataatcgtactagatgttagatgttgtattgcgctttagtgactaatacatctctctatgggttgttgattttacaaaaacagatataccttgcaggggcaggcctacaacaattcaagggtattcaaattaaatacccaagaattttggcaaaaaaatagatatatatatactatatattttatatgtatattaaaaaatttaaagaaaagacatcaaacaacccatcaagcaaagaaaccatcctttttaggccgtgtcctccccttctttgttggcccattagcacaattgattcactccattttacccaaccaaaaattctatatacatgaacttatgctcaattttgtgttatatatgtcttattagtttgtgatattatataggcaaaatttgctaaaggatactcaaaaaacgtgtaattagctatgacatcgtaaaaacgtgacgcggctgatagacactacaaaaattgcgtaattagctgtaggacaccggatacaatattttataattttcgagtcaaaagaggtgagaaattttttaaaatgacaagattgcccctggcacctcacctctcctctccagctcgctcacgtacagcatggagcgcggcgggtgcgcgtccagccaggcgcggtccggaccgtataggcacacgaaatggcggtactgttccgccgccgtcctcaccgtggtgagcttgtgcagcggcccgacggcgaaggttgacttggacagcttggcctcgatcttgcccagctctgacgcctcgaaggcgttgaacatgttgaccacgaccccagacgccgaatctcgcatcgtgtcggcctgggtgctggcggcggcgggggcggggtagaggagcgtttagttgatggactgcgcgccagtgtggggccacgcgtcgacgcgcggccgcagcgcggagatgaaggacgcgtgcgccgccgtgccgcggttcgcggacgtgccggtgcggctgctcactaaccggcgcaggtgcgcgacctggacgggctgggcctcgacgccgacgcactccggctgccggcccacctcttcagcgttttcgatggccacggcaacgccgaggtaagcatgtgcttggaacgatccgaaacgtccggattggtcactggtggcgcagccaacctcaggattaatttgactgattccgtggcattgtgttgctgtgcaggtggtgaactactgccgtgaaaggatccacgtcgtgttgagcgaggagctgaggatacagatggtgccgcacggatgtaaccggagcgccgccgccagcgcccaggccgcgccgccgtcaccgacgaataggtggctcgggctgatggtgtctctgaagtagggtgtcaggaagtaggagaacttggagttgagctggctgtcgagctcgatgatgccggaggcgccgttgagcgctcccggcgcgagatcctcgtctggctaacgcagccgaaggcgagggtcaccgtcgtccccgacgacgggaacgtgaacgcgtcagtgcccagaacgctgagctctacgccggcgccgtaggttgccacgaccacgcacacgtcgtcgctgccgcgcgcgcaccttgccttctctggcgcgacgccgcacagggcgccgtcgtcgcacggcaccgcccggacggtgcgcgacagggaggagttgtagtaggggaggtaacgagggaagcagccaccggtggcgggaaggcggcaggcggagcactgcgtctagatgaggtcgctgccggtgtcgacgatggcctccgccggctgcggcgggtcgccgatgctgtagttggcgatgtactgcgttttgtcgtccatgcggatcaggtctcacacacggagcggctcgagctctggcaccgcctcatccagctgctctcctgcaggacgcaaggctaggcggaggcaaggcggaggcggtcgcgcgcgaggcggcggcggcgcttcgtgacaacggcggtagcggcaagctggcgctgtgggagcaggaggcgcccgcggtcgagaggcagcggcggcgctccgtgacaggcgagcgagctggagaggagaggtgaggtgccaggggcaatctcgccattttgaaaaatttcttacctcttttgactcggaaattataaaatattgcctccggtgtcctacagctaattacataatttttgtagtgtctatcagccgcgtcacgtttttgcgatgtctcacagccaattacacgttttttgagtgtcctgtaataaattttgcctattatataagccaattattaggatttttgagtgtagaaatatttccccctctttattttgaatacccaaccttaaaattctgggcccgcccctgataccttgttcctacaaaaaaatcgaaaaacaagcaagaacaagataaacacagtctaaattgcaaataggaattaaagctcatgacgaataaaacactcccaaaggtggtttcagaaatcgagtaactagatgatctggccaaaacacacaattacaaagaaagtagtaatgactaaactataatctaaacaaaacccgagaaaccctgaaagggtatctagctatttaaggaggtgtgaggactaccaacgagtccctagggccatacttcaccgggttaggcacactcctctggggtttcagacgaagtcataagcccgtagacccatgattggtggtacaacactttgtttcctccattacggttgagttatatgaaatttggttctaaggtggtccattgaaaagaggactccaacagatttgcatcaagtactcaaggacctaaaatagagcttgtatgtggtcattcaaagtcacaattgtcttttgtaggtcgatctagatttcataacatggcctgcttgaactctttctttgcttcagccatggatgacgtggtggcaccaaggaagacttgtataaggccgtcacttggtccccaaatcaacatttttttattttccatgcatgcttttgcacttcctttcttttcctttaatcccacttatgaaattgaaaacacacaaaaactcaagttgtagtatccttttcaaatatatggaaattaaacctaaccaaaaaaattattacctttggtatggaatcagtgagtagcccaacagctgttggtgcaagtgagatgcaggaggacgccgggtgggaagtgagcaaacagacgataccgatgggaggtggaaggaggcagccggcgatgagtgggaggttggagcaaggggcaccgggagggaggcaagaggcggcatgcgccagtgcggaccagctgcaatagagggcttgctatgaggagagattatatgaatatgtgctgagcacagctagcggaggactgcgacgatgagcaattcgtggcttgcgagctgagtcatgagaagtagaagcattgcttggcagcgtgccacgtgcgattaagggatcaatcgaaggcctagggttttcttgatacttgtatggttactcctccactgcacgggccttggtgggtttcttttggagtgaactattaactatttagagcacatttcacaattttcgggggcccacaggtgaaactttcaaccttccctcatccccccttggatttagggccccgcctcgacaaactatgggtgaggaatttgtatggcaaatagtaaaaaaaaatcctaatagagacatggaaagtactacacatctcacgtgcaactcaatacctctccaagaagaatgtgattgcaatttgcataacattaactccattagagatgaacattttgaatcgtgatatggtgtatcattagttcatcttttaggctagttctgacataaactcaaagctaatataatcctggctagtatccttgatgtggatggaggaggtctgttgttcacgtctttgtgatgagagagatccatcatccgtgtcgttatcctccaggtagatgttgtagattgataaaaagatcccattcgaggtagagaaaaggaaaatgctttttttggaccaacaaaagcatttgagccatcgatgaagaaaggatagcgcggaagtacaatgcaaatgcacacgtgacacatccatgtcctacacacacccatgtggttgtgtcctaacacttgtctaaaaaagattagcggctaagtcacataatcgattagaaattaatgatagagaaaaactaatctgaattatctcctgaacttttactcttgtagtgtaatttacctattgaattacaacaacacatatttttttactccttatattttactccatatccatgttcttaccccaaccgttgttggatcttgaattttccatcacggggctacccccttaaaataataaggtggcggagggccgtggatagggatggcaattgtgcccgtttgcccgtttacctgcgggtaaaatccctattagggttgggtttgttctccattttatacccatgggtatcttattgggtcaaaagctatgcccgatgggtaaatgggcatgggtataggtaatcactacccatgcccgctttgcccgtttatccgcgaaatctaacttacatgtaggctaggagcaaaatccactagaatacataagccacgttctttcttttctacggtttcccttttatttcccttattatttctctcctcttactctatcgctgccagaggagagacacgacaccgaggcggagaatatttgatgttttaagttcgattcgaacttagtagcttgtagactttttgttccactgcttttgttgtggcgggtaaacgggcacgtccgtgggcataaggcgcccgcgggcaatgggcatgggcaaccatccttacccgtcatgtagtaatgggtatacccacgggcacaaataatctcacaggcatgggtatggataggcacttcccgtgcccgtcgcgcccgattgccatccctaaccgtggagaatggcaagactagttgttggctcttgtagcaatcagagccaactcgcagaggactcagcgcgggtgacggtgaactcactgtggaggtagcatgggcggcttcaagctcacagtggaggccgcacgaccgatgacaagctccatgaccttacaccactagcctccgctagctccgtcgccacgcatcacctcttgtaccttggtgtcgcgctcctccactagctccgccaccatgagtcacattcactaactccacacgatcgcgtgtcctcctccccacccaccctcaacctcatcatcgcttgcctagcttgcgttccttggtgtgcaaccaccatcgagatcaagagagagagagagagagagagagaagaagaagaagaagaagaagaagaagaagaagaagaaggtcgatggtgaataggatggcaacaaactagccattgctgatctttgtgtcgaggaggccggatcgccgttggagggggagagagatggggaggaagaaggtgatgacaagtgggtgctataaatttattattattatttgactgggaattgccacattggtgccatgtgtgctaacttggaccaaaaccataaaaaaataatgctcaaggggttaaatcgtttggtgccaaaaattagagaatgatgtctgatattgaatgtagttcatggggtaaatcaaactaatgcaacaatttaatggggtaattcgaactttcactaccacaaaaaagatttttatgaacccccgtatttttaccaacgggctagaaaggcattcgtttgcaaaaatatgtaagaggtgtccggtcaaggctcacttacaaaaaatgattttcatatacggtcatcttaacaggtccgcttgtaaaagtaggcgtatttttacggcttgcttttacaagtgacactcttaagacaaccacatgtgaaaaatcatattttttaaacctaagaggcccacttaggaaatacaggaccacaacctgcccgcccgtgactacataagataaccctcaccccgtcctctcttatcccctcagttctctctccctcctcactttagtctactcaccttctctctttcgatgatggcgtcagagattggcggcgatggtagaggtaggtagctatggcattagtggtgcctctccctccgatgacaacaggagggaaaaatctgtcgaggagggccccgaccacagcgatctgtctcctgctagcccagaggtggcggatctagtgcggcctctcccccttccttgtcgttctggcgatggcggttatagggaaggtgaatccgtcgtggtggtggcaaaaggggaggtgcgatgactgcattggcaaagggagacgacacgggcctcttcagagccgcctcccggccatctcatcgcctcccagtggaggtggtggtggcagatccacctccacacctcccattgccatgcgtgtcgtcgcctcacgggggaggtggaggtggcggactggcggctccatgcggtggtggaggcagcagccggatcactacgcatggatttgtttcaagttcatgtttgtttgtgattctagttcaagttcatgttctggatgtagatgactgtatctgtgatgaagtttatgttttgttctggttctgtgtgtgatgattatcatgtggatgtggattttgactagagagctagggttatagggagcggcaaggattaggtgattttattttgagtaaattttactttgggtcgccttttatttgtttcagtttggaccattctttaataaaatattttcaatttgaaccgggtaaatttacctttgtggcactttgggccaccctcaactattttatctatctgcatcaacttgttatatgccaaagcaatagtctaagtatagctgtgggagttcatcgacaaacagaaggcgacgtactcgacatcgttcatatgcgagaagatagtcgagatggtccaaagtaaaggtaagattatccggtcccaagtgaaactatttgttagatggtggtaaaaaggaacgtcagtaataaaaaaggtaatccaaagtaaaattcactcttttatttttttcataaaaatcattaccctagtcagtcgtcttaaatagtcacctgcgaaaattgatttttcgtatgcggtcgtcatgcccacccgtgataatcatcattttcacgtaaagctactcccaggcggctggtgaatgcacctgacataattcattttaaccgtttgaaaaaattacttctgtagtgtaagtgtttatcctcagtaatacgatacaacaatgtggatgcttgattttctccaagtatacacgggattagtaatgatcgatcagttgatcacccttaccttaccttaaatggtaacctgccgtttggacaaataaatggacggggacaaatcgatcggttcttaattagcgagattaattgttagcgacagaccgatcagttgcttgcttcgctgccgagaatctgtcacgcatgcagacgcgtgctgctgttggagggagcggccagaggaattgatggctgcccctgtcgtttgccgcctgttggctacctgttcccaaattagttgtccaaccaccatttaaatttcacttatctccctaaagtactgcttgtcttactcactccgtctaattttatagagaaaatctataaaatactattgacaagcattctaattccagaaatatcatcgacaaagacaacttcctaaaaataccattgcacgaacctctttctcccaaaaatactatcacaccataagtattgttaactcatctccattaagttatatgaaaagacaatcttaccctaggcatccatttgcacacacatcatcattctatattatttgctcacacaatattattttgcattcatgcatattttttctgtccacaactaaattcacagacatcgttattttgttatcaatcaaattatttcagaattaaattcacaaaataatttcacacattttgccatcgcaattccttcagaaattttgctatcaataatcaggaaacagaaggacaactgaatcaacctactatccacgcacaaagttcatctcttgcagatttcaaattcatcaaaagaagcaaaaacaaatttaccctcctcgccggcaccaatggggctttgctcatctacggcccccgcgctgcaggctgcgaccgtcgcaccgccgtgaaccacgtcgacgtgccctgcagcgccgccgccacgggcctcctcgccgctccctgccgcgccagcgccacgggcctcctcgccgcgccctgggcctcctcgccgcaccgccgtccttggcctcctctctgcgacgccgccctgtgctcccctgccgcgccgcccccgtggaccgccggcatagcggtgccaccgccgtggaccactgccgagccgccgtcgctgagcagccgccgggcctcctcgccggatcgggatttcccctccttgccggcaaagtcttcaaatgaaatcgaacaaaaggggaaaaattcaaatcagagagttgcaccacctgctaggactgcagcctcctcggcgacctcagtgacctcagcgactttagctgtgggcctctcctccccctcgctagcgcctacggcccccgcgccacatcctgtgaccttcgcgccgccttggacctcgtcgccgtggacctcctcgcagcgccctgccccgccaccgccctgctcctccttgccgcgtcctgccgcgtcgccgccctgctcctcctcgccgcaccctgccacgccaccatcgccgtggaccttctcgcggcgccctgccgtgccgctgccctagtcttcctcgccgtgccctaccgcgccgcacccgtggaccgctagcatagagatgccacgggcaccgccaccaacccgccctcgccgagacgccgccggggattgggatcggcagaacgctggatcaggggattgggatcggtagcggtagggttaggttataattttttttctttgacagtgaactgggtatattttgcaccgagggcaaaatggtcattattaaaaaaaaataacggttctaacggtttggagttgacggtgatggcatttttgggagaaagaggcttgtgcaatggcatttctagtaagttggctttgtagatggcatttttgggattagggtgcttgtcgatgtcattttatggattttctcaattataaacgtagttatgagtttccgtgtccaactttaattgtttgttttatttgaaatttttttatgattagtatttttactattgttagatgataaaacattaataatcctttatgcatgaattatgttttgttacttttttcaaaaaaaatatcaaataagacagacgattaaagttagacacggaaactcatggctgcgcttaaaataacacgaatggagtattaatcacgtcccatttagatttcttcctattttactctcaatcacctttttattcttaatcataacttatttgataacaatattatattatagtcttttagtttaaacctagtatatgccaaacaacataaacaataagtaatttagtacagaggtaatgagtagttagtatattttagtaggaatggtgtattacttccttcgttaaaatgaataaatatagataaaatatgggggtgtttagatctaggggggtaaggttttggcgtgtcacatcggatattatatagggtgtcgcatggggtattcagacactaataaaaaaactaattacagaatccgtcagtaaaccacgagaagaatttattaagactaattaatccgttattagcaaatgtttactataacaccacattgtcaaatcatggagcaattaggcttaaaatattcgtctcgcaaattagccgcaatctgtgtaattagttattttttagcctatatttaatacttcatgcatgtgttcaaacgttcgatgtgacatggtgtaaatttttcgtgtgggaactaaacatggcctatgatacaagctttagaattggccatgtttattaataaagcaggtagaattaaatggaaagatgttgtaattggtggaaaagtgaagatgggtggaaaaagtgaatggtggagggttgtggttggttaagaaaagagtgttggtggaaagttattatattttggaacaaattctgagtattagaagttactatattttgagacggagagagtatattttagtgctattaatttaaataggaggtcatatcttatattatatttgtttatttttgagatggagggagtattctcttgcagacattattggtgatcatatccttggaacagaagacactactacaaatccggtttttccatacggtcgaatcccggttttcgcaggtggtagggcgatccgtatgcacaaatggtttgcaaaaataactatttttacgtgagggtggtggaattaaatttgaaaatatactatcatttttttttcttaaaaatattcggggttcaaattttttcacaaatataccgccggtatatacgcgagaatgacgtggcgtgatgatgtcgtgcggtcttgcacaaccaaagagcgaggtcatttttgaaaattaattagtgtttattaattggtaataattagtgattaatcatcctaattattaattaattgctaattaggataattaagcactaaataagtcatcaaatgacaagacatcgggtctcgcttgttgtcgtacaacggtctcgctctttggttgtgtgagaccgcgcgcgcgagagcgagcggactcgcgctgttgccgcacaacatcgtcagtatcgtcacgctacatcattcttgcgtatctgttgagcgataccaacggtatactgccaaaaaatttaaaccccgaatatttttaagaaaaaacaaataaacaatatattttcaaatttaatttacggtggtgcatccgcaagaaaaaaatcaaaaaaaaaaccaaaaatcaaaaatcacgtcctcgtcatcatcgtgggggcgtaggaggctaggggccgccaggtctgcccgctcctatagccgttgtcgcctcgccagagacatagccgaatcaaccgccccacgcctccccaccgcctaatcagctgacgccgtgcctccctaccacccgatccgccgccgccgtgcctccctaccaccagatctaccgctgctgaacggggggacggccgccgcgcctgatgtgaccatggctactacggatacaaccgttgctcatattatggatgagcagcacgatattaagttcaagtcctccaagtattggaatccgatttcggccacttgctacactgctgatttcaaatggccgccgaatctgcatacgacctcggtttttggctcgtgagtatttgatggaaagctctcggagtcctctttccaacggatccagcctcatccccgaattccatctcctttggccgcaattgcagaaacaaggtgctgcgtcacctatcatgggcctttgggcttgtaacttcgtttgggaccccggcccaagtggggcccatgtggggtgcgccccaagctggtggagcacgaccctaggaccctcttggtcgttctcccacatccttaaatagctaggtaccctttcagggtttcttgggttttatttagatgaaagtttagccattgcaacttccttgcagcgtgcgtgtcggctagaccgtccgtctgcttgtatttgaaaccccaacttatcgtgtgtgtgagattgcttttatcttgttattgcttgtttcttcgatttgcttgcaggaatagggttgatctgcaccggcaagatcaacaacccacggagaggtgtatcaatcgctaaggcgcaacacaacgtctagtacggttgtaggtggatcgtcaacgtttctttcaaatcgtagttatcatcaactcaccgaaagatcgggccaaacaactgccttgagtgtcgaaaggaactcagggtccattaggtggtataagagctttcgttgctcggtgagtttttatctacctataaccagaaaatagccagacaaaaaaaaattgtatcatttacctagccatattgtgccattgcattgttcttttcagtctttgctttgttgaattttgtgttgcattgtcacgacgtgttgctggtcttagcgtctagttcgtttagagtttcacgttctggtcaagttttgtaccacagtcgtcgcaaccaccgtgtctctgttgtcgtcgggacctacgaaaacagaatcggctcgctgccatggttctattttgtagtttttagaagtttttatcggtcatttttggagttgcatctaggttttgcttgagtttttggtttgcccatgaatagataggccgtgctgtttccagcgctgagaagaggaagaagaatttctaaatatgtttttggaagtgtgagtttaatctagaaggaaatagtagattagattgattgaaaatcagtttcccttttcctctcaccaaatccgaactctagtggtgccgtatccatccactcgtcgcccactaccaccgtgaggagaggtttttacctgtatgccactaaaatatgacccttgcctctgtgccactaaaaagttcgagcctccctctatgctatcgtcgaactttatcgcgccctccacaccattctgtcgctattctgttagggttcatccgtttggcagctctgacatgtgggcccgggcagaaaaaatgtccctattgccctttctttcagtttcttcctctcgctccttccccctttctcccacgcgcgagcgcacataagcggcgacggccgggcacggcggcgcctggtgcatggcgcggtggagacggccggtgcgccgacgcgggcggtgtctgattgcagtggcatgggtcgggggacgaccggggagcaccgtcgatggagcgctaggcaggaggcggtcgggcgctggatggggaggcagccgacggtgtcgctggctcgactcggcggagacgtcggcgccggtggaagagaaggccgtcgtgcaccccgacgtggccgtggaggcggttcgacgcggcggcggggggacgacactagcgggggacggccagtcgtcatctccgggtccggcagctcgggtatcggcgtcgtcgacacctcaaaccccagcggctcctcttcccagtccacccctttcccggcggtggcgtcctcgtccgtgctcctacaagcgccgatgcgtgtgggacgagacgccgcctctacgcggctgctgcgcacggtgatgagcgcctctccggtggggccttggagcgcgagctcgccggcggaggcggctccccctccgtggccgtggcgaccaggaagggcggggtggcgtggcgaggccggcgaccggcgctgtgcggcggctgggcgcaggttcgacggtggcggccgacggccgcgagggggcgtccccggactcgaggacctcgctcccgacggccacgatggagatggtcggtggcaaagagaggctagagagagcgccacagagagaggccaggagagatgtcggcggcgagcgaggggatgtcgccgttggccacgccggcgagggaggcggcgaagaggagggcgaacgccggggtgccgacggccatgtggcggcgcaggtcccaccccctggcggcgagcgaggcgacgaggagcgtggagacagcgagcccccggtggtaggcgaagtgggagacggagcgcttggagaggaggcgcgcgtacggaggaagtcgatggtcatcgccgtcgttgcgtccgccgctgctgccatctccaacccttcctttcaagtctaagggcaaataagtcatttggctgtgccgttaccaccgttagaacaaaaaaaacggatggaatggtgtggagggcgcgataaacttcgacgatggcatagagggaggctcgaactttttagtggcacagaggcaggggtcatcttttttaatggcacacaggtaaaaacctcccgtgaggaggctagtccgactctctccctctcccttttcggtttcaatacatattgtgaattgctagacactttggtgaaaatttttggagtgtcggattggagatccgtttaaaaaaatggaacctacgggacgagagcattccatttttgtataattttaattttttggtttgcacttttgtatttcagtccctgtaatttttgtatttacatttgagtccttgtaatcttgctttcaggcccttgagtcatttttgctaaaaaaaagtgagaaaaggcagaaaggtgcttacaaaattgaaaaaaaaccgcacaaaaaaatggcaaaaaaggtgcataaaaaagaaaagaaaagggcgcaccaaaaaaaagaaaagaaaggaaaggaaaagaaagaaaaaaaagaaagaagaaagaaagaaaagagaaaatattgttatgtttgagctgaacttcatatatcagagttgtgcgtgagttgtgagttatccctagtgctatcttgtggtatcgtttgtgtctaggctcgcgtctctaatacattctagcctaggaccaacacaatacttgactttgaactatcattcaactttgcattctctaatttgtgcaattgctatcatttgctacatatttaagcctacccaaagctccacagatttgattgcagccgtacaacaagtgtttgccaaggcatcgatacatccaatctccattggggtgcttggttgagtcagtgtatgccaccattccgcttgcattggtaagatcttgtaagagcttggttaaaagcttgagtgtgtgtgtgatatttgagctactactacctagtagttaataggaacgtgcatatttttgtgtatgtttcttgttttctattaacaatggcagggatacacaagatcgttggatatgaccttgctcgacaccaacattttcatcgagacatgaggaatgatcaacatgaccattatgaggtaagtgatgttctagctaagatcaaatctgcactaccttattttgaaggaaattatgatcctcgtgcttacattgattgggagctagtggttgatagagaatttaagaagcatgacttgtctgagaaacatatggttatgtgtgcctctaatgttctaattaaaaatgcttcttctgattggaaacatctttgtaggcataataaagtacctcaatcttggaaagacctgaacgacatttgagagatgtttatgttcccatgtattatgctgacattctgttcaacaaactacaatgtttaaaacaagatactaaaagtgttactttatactataatgatatgcatgcttgtttattacgttgtggtttagatgaatgcgaagaagctacagaattgaggtttttacgtgggcttaacaaagaaattcaggacattctttattgtcaaagatatacatctctttctcatttgttataacttgcttgcaatgctgaaagtaaaatagaggaggacatgaagaagcaacttgctatgtttttgccttctattactaaccatttgcaggaagtagataatcatgaaaaggaggagagagacatgaaaaagccgccagtcctattattcacactcaaagtcgaggcacctccatcatctgaagagggcatcaaaggtaaagtaaatggtgctgaaattaatcaaggtgaatgtgttgttaatgaagtaaatttttccacttttcatgctaaagtagagcaaccgttagtggaaccaaatgctgaaattcctttatcataagttaatttacttgttgttccttgtgataaagaagagttgtgtgataatgcttcacttatatcaatgccacaactagttaatgaacatgctattcctaatgttaattctgctgattttaagtatgttgttcacattgctcatgaagttcaggaacgtcaattgataacttctttaaatactttgggctatgttaactttgataatttttgtgagctcgataatttgaaagagaaattatttgctaaatctgatttgccatgtccaaccaatgctatttttcatatctttggcgaatataataatagaaaaatatatttggtgcatagagtttatatatgttcggatttagaacctcctctacatgtggataaaacttgcaagctaaagatacatgttatttctaatcatattacttccaatctctcttgttttgattggatgaaacatgttgttttaaatcgaccacgcgttgagcatcatatggaaaaaccgaggacggttttccgtaaagaaggggaggatgatgtgaccatggctactacggatacaaccgttgctcacatcatggatgaacatcacgatatcaagttcaagtcctccaagtgctggaatccgattcggcctacttctacactgctgatttcaaatggccgccgaatctgcatacaacctcggttttcggcccgtgagtatttgatggaaagctctcggagtcctcttttcaacggatccaacctcatccccgaattccatctcctttggccgcaattgcagaaacaaggtgctgcatcacctatcatgggcctttgggcttgtaacttcgtttgggaccccggcccaagtggggcccatgtggggtgcgccccaagctggtagagcacgacgttaggaccctcttggtcattctctcacatccttaaatacctaggtaccctttcagggtttcttgggttttatttagatgaaagtttagccattgctacttccttgcagtgcgtgtgtcagctagaccgtccgtctgcttgtattcgaaaccccaacttatcgtgtgtctgagattgcttttatcttgttcttgcttgtttcttcgatttgcttgcaggaatatggttgatctacaccggcaagatcaacaacccacggagaggtgtatcgatcactaaggcgcaacacgtctagtacggttgtagttggatcgtcaacgtttcttccaaatcgtagttatcaccaactcaccgaaagaccggaccaaacaactgccttgagtgtcgaaaggaactcaggatgcatcagcgcctccccatcgccggatcagccaccatagcacaggcagagggcggccaccgtcagatccgcacaatcgtgtgcctcctccgtcttgctccgctgcccgagtccctccaccgccgttaggaggaaagagaggggagagaagtgggggagaggaggaggaagccgtcgccgtcgcccttgcccttgccccccgccggagcctgctacgtgctaccgagagtaaggagaggggagaggggagaggaggtggggagagtagtgggggatatgagtgggagaaccgggagaggagaggagtggagtggagtgagggtgatgggggtgggtaaaggagtgggaatctttcggggtatttttgcatgcatgtgagttaagaacaccgcatgcgaaaatacccttatttcccttattttggtgcggatatttctaagcggttcatctagaaaaatttatttttatatatatgttttaaagagctgtatggaaaaatgaggatcgatctttacagacacggacatttatgtttcgtccgcaatatattgagatgctcgtgtagaattttttttaagcagtgagaatatcttagtgggaagacggtaaagtaggcctcgaaccactctctctctctctctccatgcatacggaggagtaatttctctctgtgctattgatgatatggggatcgagttaagaatatgctgacacgtctgatatacctgtcaggccattactaggatagggcacaccactttgtcaggcccaaaccgaatgtgctgctgcatgctatactatctgcactggatatatatctgcatgcatctctgccgccaatccatcataaagtaggagtatatacctgtatacagtatatcatcatcagagagagtagtagtagtgttatgcatgcatgggatcgatgaattaactgctacagttaccggctgcagcagatgagctgagctgaactgtgctaggctagccatgcacagatgcactcccctattaaattaccaatcactctattccactctatatattcgtccacgaatagaaaagattatacgaagccttttaaaatataaaggcctcaaaggttatccataagtttattataagtcataacaatttattagcagccaaaaataatttttgtaaagttttgtgtatgtgttcttagcgatttaaaagccaatgctataaaataaactatgctaaaaaatattttaaaatcaacttcaaaattaagtttcaaaatttaaattttgactttgactttggtgttttaggcaaccgatcgatggagctcaaacattttagaccgtctataaatatggttagaaaatgcttatattttagagcgaatgaagtatgttgttaaaatatatagcttaaggggttgaggtgaaattattttggtacttctaaaaaccttttatttaattaaaaatcacgattacccatgtaagtgagcaatttaatacaatgaggaattggaaaagtaatactctaaataagatctgttatatttaatttgtagacgagttctaaattaaaatcaaaatctctatagcttgtactcgtgtatggagcactaagcaatgtattactactatctagaggtagagggtgcatgcctgctagagctagctagcgaggttgcatgcgtaggattcccgtgacctggtctggagcgattgttgctaattatcagctagcgcgtcgatcgatcgcctatggatggatggatggatatcgatcgatcacaggaggcacttggttagattgctattagatggatggcatatgttggggggaggacggagcgaggaggggttggttggactggacaaccgatcgatcgacgcgtacagctcacacccacaggaaaccaaactcgtactgtacttgctacagctatatctcctgccattgcatgcgtcagatcgacttgctacttgcttctctccatcaaccatatgatatgagagagagagagagagagagagagagagagagagagattggggagagttaattactcagtttatcactagtactccaataagcatatcgatatgcaactggtgattaattcactgtacgaatattgttgtgcgacaagattaaggtatgtttgaggagattttaattttgagaagtaactagtaggaatccttggtgataatgtgaataagttgagaaaacatgccaacttcttgcttcaactccctctgtctcaaaatatagtcacaacaactgttagcattaggctaatctaatactaggttactatatatattttgggagacggagagagtacaactgtggcttcttagaatctagatgaaaaattaagatggattgtttgaacgagtttttattctggaaaaagctactaaacaagcccaaggagcaaggtttcttcgactaggtcaagtagttgggcttcatttgtgattgttgaactatggtgtcaggtttctttaggtgcaggatattcgatcgttccattatcttaaaaaatacagttattgtgttatgctgaatcgtcgtgttttttgtttttgtaatttgttttaaattagcaaatatattgtttcactccgaaaagttgattttcgtagaacaatcatggcgatttataatgttagacaaaatatgatacccaatataatcgttctgtcccacccagtggcaaggccaagaaatttaacatggcaaatcgaactgtgtgctaagtgtttaccgatgatcctgggcagccacccaggtcatcgggcggtggatagcgttattgcttgcaagttagattaagagatcaactcatcaaagaaaaaatgctgaaaacagttgcatgaaacgagattatttattatacaatgtacttcaacaatgtcaattaagcaaactattagcatttaattacaaaaaaacaaaatactacataaatcatactataacactttaatccatcattgatgtttagcttgcttacatgtaaattaaaaaaaaaaagtaaagtaaaaaggtaggaacaacctaggtggaacaaaatggatccacatgcatgggatttcacaacaaagctagcatggacgcaacaaaagtgaaaaagaaacagaactaagaaaacaaagaccatgacatgatacacggactttgatgtcagaatgttatgacaaatactataccacatatagtaataatataatcagttaattgattaatatctcaacccagttagctagacacaataactagttaaattactagtaatgaattagccctgcagctaagctcaattccttcggaatcagctgttaatttgaacccatccacacctccatcgccggcctagggcagcatcgcgaacgtcgagatgtcgccccacgccgggatcgcgctgccgcagttggaggtggcgttatcatcgccgccgctactccggccgccgctgttgaggttactgctggtggtggcggccacggcggcagtggcaggcggcggtggggaagggagcccgtaggagcagctgtccatgaaccacgacgtcgccgacggcatggccgcctccatgctgggaacactaccagccatgtgcatgaaggcgccaccgcctcctccggcagcatgccctgacgctgtggcttgggcgccgttgccgccaccgtcgttggcctgggcggcggcggcggcggcggaggcggagcccggcgggccgaggaacatggtggcgagcctctgctgctgcagcttccagtgcaggtcctggttgatgaagctgagcgactcgatggacgacgcgatggtgctgctcaccgcgccgtggccgccgccgccgttcaccgcgttgccgccggcaatgtcccccgagggccactccccgaacggcacgtactgatgatgcccgacgccgccgccggcgggggattggagccgcggcagcggcagcatcccgacggcgccgccctgctggaagtcggccaccgcggcggcggcgccaccgagcggcgacgtcgacgacgacatcatcatcgttgttccaccgccaagaaaccccagcctggcagcagccgccgcagcggggtcggccgctgcaccgccgataccctccaccgtcggcaggttgagcgagaggcgcgatgccgccgccgcggagcgggatcgcttgttcttgcggcagccgccgccgactgggacgttgcggagcgcgccgcccttggtccagtacctccggcacgtcttgcagaagtggcgcggctggctgaggctgtagttgttgtagtagcagaacttggtgttcggcgagtcgcaccgcgggcaccgcaacccctgctcctgcggcggcggcggcgggagcggctgctgctgctgctgctgcgccggtggcggcggcggcggcgtcgtcgtccccccacctccagctccctttcgcggcaccaccgcgtcgtccccggccgccggcgccatggcacaccgtacaacaacaacaactgtagctagctagctagctggctagctgcagggggtctaagctggctagctccgtgatggcgcgctagctctaggttggtctgggtgtgattaggtggacagggaggggtggccgtgacgccgcgtgcatataagaagaagaggagggagatcgatggtggaggagggtttcgtgcgggggagggaagaggaattgaatggcgtctcatgtgtgtgtgagggagaggaggaggatcatgcgctggggctcggatcggctgcatgcatgggattaatgggaggtaaaaaagcgacgtctcggattgccgcctgtgattgccatcaaagtgctcagctcagcaccacacctcacctctcatctcgtctcatctcagcgtctcagcccagccagcctaccagctagcccgggtaataatcacctgtgattaatcaatgttgctgcatgccttctccctagcgtagctagctctcgattgattaatcgatcgatcgatgggcccctgttcactgtgcaccctagtacaagctgtctgccgccgcctgccggcgtgtcagagtattgtctgcggcgacgaacagtacggaggcggtagccgtcctggatgttttacactttcgtccttttcaaaaacttgtttaacaaataaacccctaaaaaaacttacaccgtactagaaatggttctttttggacgtcatagtcattggcgccgtggtccaataggacggtgacatcatctcttgcaccgtccccctgccatcgtggctggccggcgctgacgtggcaggggaagcgcgccaatgataattttcttttattttattttatactttttcacatttaggagcacacaagaaccaaacatagaaaaattaaactcaaacgaatgaaatgtgacctgtagaatttttcaaagctctatcaaaaaacttctcgccttgaaaacacaatcttgcaagcagaatttcgagattctaatttcaccaaacccgggcgaaatgggggagaatcagatgtaactttttatgtagatatttgtaaatatataatttgcctttttctgtatttgttttaagaaaggtcactcgaatgtaacaaaaaaactcaacaaacactaacaaagcaatgctagtaaaaaaatgctaaagggtttataggattaaggaaatgtaatctaatattgttttggtaactttctgactataggaaaaataaaaacactgaaaacagaaagtctcttaccgataaatcttgcgtggatttgagaagagggagagagagagagcaagagcagcggcgctcgggctcgcgtagggagggcgcgggggatgggtgtgaccctcggggggagcgcaccaaggaaaaaaaagatagcattgtgggtggggggtagcatcattggcacgctcccccttccacgccagcgctggtccgccacagtggcagggagacggcgccagatatgctagccccatcctagtcccattggaccatgatgtcactgactttggcaccctaaaaatgaccatttctgggataagtttttccagaggcctatttgtgaaataagtttttaaaaaggaccaaattgtaaaagattcgggaagcatacaaaaataagggaatggattctaaactctcgagggaatatctctctgcatgtcatttaaatagttatgaaaaaaaatttaagaagatgtgttacatgtaatatatcaccacaaacatacaagtccaacttctacatgtcacaacaaaaaataaataaatttgatttttaattttttttttcattgcaatatgtagaagtttaatttgaacatgcagtttgtggagtcgatctagtaatatatcacatgttaatacatattcttaatatttttttaatttttttcataactatttgagtgacatggagacaacaagaggatatcccctcgaaagtttagaattgttttctctaaagataatactacatccatatcggaatataagtgtttttgacggtgatatatatggtcttcgaaataatactttgactgaaaaatatttataaaataagttatttcaaataaatggagtaacatattataatagtttgtttagtgataaatacatcaacatcattctcatagatcaatcttttttatgtttccctattaatagttaaagtgaaaaatgtttgacttaaaattattctaaaaatttttatattttgaaacggagggagtatcttagtattactaatcgaagcatgtacagattcataatactagtatacatgttttacatattatattttaggtaaggcagtatatactatcactggtggagaaaccgtctttggtcggtcgcccgaaatccacaatagtctcggttccactaaaaaccgggactaaaaatgatctttagtcccggttggtggctacagcggatatatttgatctttagtcccggttggtgttaccaaccgggactaaaaatgatctttagtcccggttctaaatctgtcaggccttgtcagccccccgagatctttagtcccggttggtaacaccaaccgggactaaagatagggatcttgttaccaaccgggactaaagatcaacataagctttactcccggttggagttaccaaccgggactaaagatgtatttttagtcccggttggtaataccaaccgggagtaaagattcccatgctatccccgcctttaagt

SEQ ID NO: 6410 - DNA, 19964 bp, Oryza sativa
agctgggacccagggtcgggttgccagttcggtctgaatcatcgtaggccttgggttaaggcaggttcgtgtgggttcacggccttgattaataatattgtatagctctaggaccgtgtttacaaaatagctttgagcaactaagtgtcttttagtgtagtttactgcaaaccctaaccccctatattatggctcccttgtactcccttgcatttattctgcacttgtggttttgtcttgttgagtacggtggttgtactcagtcttgctcaatttttcccaaacccagaagaggagcccctggaagataaaggcttttgtgtctagctcgtgcctgccgtcaagcgcctgtggtcgtcgccctagtcttccgctgtttttcgtttgtcttcttgtgtgctgggccttcgctgcccatgtaataaattaactatgtacgcttccgcttgtcaaactctgaattgtatcaacttttggtgtaccttgcctcctgggacaaggaataatgcacacacataaggaacgcccgttgggttatttccggtcgtgacatttgccgatgtacaatagccgatattgttatatcacccttagttgttttataattttatcaatgtttttgtcattgtaaaattaggggggcacatatatatcaaaagcatgttgacagaaaacacgaggcctgggagatctgcttaaatccagtgctggtccaaagctcgccttcgaatgtatgagcgtgccagttgatttgatcctgtaatcaacaagaaatagaagcaaagaaaccgcagttaaatctataaatgatagccgatcggctaggtgccgatgacatatcatttatctttgagccgatgtcatatatgcatcgatcggcagtcattaataaataagaagggactaaatctactcgattggctgtagatattaacaatatataatcattatatcgatatatacttaaatcaagtgattgggatagatcggtcgccatgccgagacagaataaatcacttagatcgaaatatatattaataatgagactatatacgttcatagcataaccgatcagatagatctagcatgtatcggctaatactccgataccactctatattaagatattaaagcgagtagaatatactaaacaaaagcctaatatacttaaatgcagcaagatcttaacgtaaagggcagatttaacatgtcaatcaaacatataggataaaaagtagttaaatcaggtaagatcagctgaaactccgatactaccctaatcagcaaccaagaagcgggctagagattgagattctaatcacgactcataagatcatacttaactgatgcagctataagtatgaaaagaagaacaatgtctagacaatcaagccattggatgtgtcatagagtggtagatatcctatataatctaagtcaacatcggtatttaacctaatcggctgccttctattgacggatgttagccgattgtaggttagatatcgatattgccaaggattatgtaggatatatgataactcgacgaaatacataaacaagattagagtgtcataaagatggaagcactaatcccaagaacgcaagccgccataacaagttttacctcttgttgaagatcgaaaccgatgcagctcaacccgaaagcaagaactcgtcgaaataaaactaaagcaaaaaggtagcgttgcgccgggattgtattgaacgtgtgtgttaaaagtaacataggactcgggtctatttatacccaaaaatcacaagatatgtccataacggacacgactactatctctaagaaactctaagataccataagtctgtacggcagacttttgcccaagcatatctccaaggagattacataaaacatcctaattaatagatacaattgccttctcaggactctatccatgtgcggcaatcacctcgaagcgccttaattcaacccgatatcatacatcaggttgcattgtcaaaatcggctgcatcggcttacctagcccgactcagacccagccgatcctaatcgtagccgatctggactccagccgattcctgctctatttctgaactcgatctccgcctccaactatgcttcgatctaatcttctttcccaatgccgatattacaaaatttcgttgttaacacatgccccccaagtccggaatatttgataatgtttcggatttgctgtaaatcgactctgagcaagtttcgcactttgatgttttccgaccgttactgccgtgctttaaatactaaccattaccctcgagaaatctcacaccgtcctcctccattttcaccgctgaaaccaactttgccctctttctctccagcgatctcaccgacgcacaaggcgatccctaggcaatttcgttcccgaccagatctccgcccgcggcgatgtcgtcttccaccagcccttctactgcaccatcggccgagtacgctgaggtaagtcctcaccagctagatcccttttcctcgcatgaaatcgatttctccttttctcctcatgttttccgcttcccgattcctttggatttgcagcacctttccaacctagtcgcgattcccagcctttcacacaaaaaccactattttcttggcccaatcggcaatctcaaccccactgatttcatcatcggtgaaaccaatcggatcccctttagactagccaaccctaacctgggttactggaagaatacattcaagtcttggccatctctcgaaaaacctactcctgataagagctagaccacctggtaccaacgcgtatcggctagtaagaaagttcactgggatgaaattggaatcggccaagcactcgctttcaccatagccaattctgctaaggatgaacctctgatggctgccgccacctacttctggtccaacgccatcaatgctttcttattcaaccaagggccgatgactccaactttaatcgacatcaccatgattactggattagatgtaacttcatcggctaaacctatgagtatgaacaccaagaaccaatttgacttgaagaccaaaagcataggtggctggtctggctatgtggcggcatatatgggccaagggtctgttacccctcgagagcatgtagctttcttgctgatgtggctggaaaagttcctcttttgtggatccagttgtggccctacaaccaactagcactctgtagctgaagccttagaatcaaagaaagaatttcctttgggcaaaaatccttctgggctatgtgtaccagatgttgaacaatgcatctgctaaaatagccgtcggctcaatagttggagcaggtggaccatggtggctgctgcaaacttggttaaacctgatagtcatgaacattgtcaatcgaccctctgtgacagaagctgaattcccattgccagagccgattgtggaagatgacggagaagagcgcacccatcgcagatgcatgtcatatggagaatatgcatccacatcaaccgatgctggagcgaagctatcggctgagctacaaaaggactggttctgcagcttctacgaaggttttaagaaagatgcacgaatctggtttccttatgaagactcagcagaccttgaacttccatcagactttagatttgaagacattaatcatcgaaaattccaaaaatccagagaaattcctatagctgcaatcagcccatgcatcctcccagtcggcattcaccaagggagaaacatccaagtctcctacgagttttatcacccaatgagcttggccagacgacttggattgggtcaactcccaatcggcttattctttgccgacaatattcagtgccgaggacaaatcgcatccactctaatgatggatcggctacttaacctaccaggaccccctctgggcagtattgataatattgagttggcaggatttagaagcaaaaattttgacagatggtggggtgaatggaagctgcatctatttcatcaatcggctgcaatgtatatgatagatctattcaataacgtcataccccaggtaaactttgtcattactaaattgcataaccagttagccgattcattacttgactaatctcttgctcctgttttgcaaacaacagagtcctcccctccacatcaaagtaatagtagcaagaacattgaatatgcttcaggtttaattctgaatggaggtggactatctcccactctccttcacggcctaactagggaaccagccgatgcaggcaagaaaaggaaaactagatcatcagccatgagtaacttagccttggctccaaagaaaaagaccaaattcaagaaaactcaaccacaaccaactgatatgtcgactgatgatctgcccgccttggatccatctattaaacaagctttagatgaagaagaaattggtgaagatgttgaccaagctgtagccaaaatgagtgacacagaaagaacaccatcggcttcacccaagcaaacgcctccaactccttctgcccccgttcattttacatgagtaagtacctctctttgacttcttctgaaattacctccctctttggctaattacccatagactttgtggttgcagaagaagaaaactgctgtgaagaaaaaaccagcagcaacaattgttaaatcggctccaccagtaagatgtccttaattcttttacttaaacaatctcaaccgattctatataacacttgtctatttcgcagcttcctcctccttctcctcctgtacagcaatcgtcaagtaatcagactccatcggctgtggggagtcatcacgtcgaagaggaagaacaaccagctgcttctgctatcccagtaagtttccctttgtctcaacaattagatcagctataatttacccagctcttattctttccaaaattgcctctgcaggctctagctgatctcttctcttttgacatcagagattaccttgatgaggcagaagaagacacttcaagcaaagcccaagctcccctatccgatgatgtgagaaaaacacttgaagacatcgctcatcggctagaagcctcttctttagacagtttggtagttgactgtgggtcaattaggacgcggctgcatgaagttcaagctctgattcccgaagatctggctgatgtcctaactccagccgcttatctcgagcaacatcagttcaagctggaaaaagccaagctaagactagccgaacgccgtgagcacaaagagattgaggccacaatccaagctaatcggcagcttgtgcatgaaaaaaaaaccaaacttgattagctatctgaaggtccaatcaaatccaatattgatcggctcgaagctcgcaagattgagctcttggcgcaacttgaagaatgcaatgccgagctagatatggaacacaaaaagctagccgatcttccaaaatcaattgaagaacaaaaagcaaggctcaaatcggctatcaaaaatgttgctgacctaaccaagtccctgaaagtcatctctggaactgatgctcaagatgcccatgctattgtagaagtagaacaaattaggcaaagggctattttggctatcctatgatacttgtctcaataacttttgtgtaataggacttagaaattttttgtaatcagctaagatgctctagtactttactgtcttgacaatcctttgtgccgattaatatgactttgaaattcgctcaaaaaatttgcctcaaaaaatttgcattgcattttgataatatcggctcagaaattcccctagggggcatgtttcgagtttgcttataccattaaaccgtatgcgactaataatcaagctgagtatgaggcagtgctcaaagggttgcaattactcaaggaagttgaagccgataccattgaaatcatgggggattctttgctagtaatcagtcaattggcaggagagtatgaatgcaagaatgatacattgatggtttataatgagaagtgccaacaactaatgaaggagtttcggctggttactttaaagcatgtctctcgagaacaaaatattgaagctaatgatttggcccaaggggcatcagggtataagctcatgatcaaagatgttaaggttgaaattgcagcaatgacagccgatgattggaggtatgatgtgcatcagtatttgcataatccgtctcaatcggcttctaggaaattgagatataaggcattaaagtatactctgttggatgatgagctttattatcggacgattgatggagtgttacttaagtgtttgactgccgatcaggctaaagttgcagtcagcgaagttcatgaagaaattttggtactcatcaatcggctcataagatgaagtggttacttcggcgtgcagggtatttttggccaagaatgctggaggattgttacagatattatagggggtgtcaagattgtcagaagtttggggcaattcagcgagctccggcatcgactatgaatcctattcttaagccatggccattcagaggttggggaattgatatgatcggtatgataaacccaccatcgagtaaaggacataagtttatattggtggcgactgattgtttcaccaagtgggtggaggcgattcctttgaagaaagttgattctgtggatgcaattcaattcgttcatgaacatataatctactgatttggtattctacaaactattacaactgatcaggggtcaatcttcgtgtctgacgagtttgttcagtttaccgatagcatgggtatcaaattattgaatttttcaccatattatgcacaagctaatgggcaagccgaggtgtctaataaaagtttgatcaaattgattaagcggacaatttctaattatcctcggcaatggcatactcggttggccgaagcgttgtggtcttataggatggcttgtcatggatcgatccaagtccctccttacaaacttctttatgcgcatgaggctgttttgccatgggaggttagaatcggctctcgaagaacggaattacaaaatgatttaacagcttatgagtattacaaccttatggccgatgagagggaggatctggttcagtgacgattgcgagcccttgcaaaggttaccaaggataaggaacgtattgctcggcattttaataagaaagtggtacctaaagatttttcggaaggagaacttatatggaaattgattttgccgattggtactcgtgatagtaaattcggcaagtggtcgccgaattgggaaggactgttccaaatttataaggttgtgtctaagggagcatatatgttgcatgggtttgatggtgaagtttatgggcgagcgctcaatggcaagtatttgaagaaatattacccaagtgtttgggttaacgcatgatcggctagtattgccgatgcatgacagccgatgtgtttgcatcaccttgagatggccgatatggttatatcgcccttagttgtttttcatagtgtaatcggttgtggtttgccgatgtataatttccgatattgttatatcgcccttagttgttttataattttatccatgcttttgtcattgtaaaattaggggggcacatatatatcaaaatgcaatgcaaattttttgaggcaaaattttttagcgaatttcaaagtcatattaatcggcacaaaggaatttcaggacagtaaagtactagagcatcttagctgattacaaaaaatttctgagtcctattacacaaaagttattgagacaagtatcgctggatagccaaaataggcctttgcctaatttgttctacttctacaatagcttgggcatcttgagcatcagttccagagatgactttcagggacttggttaggtcagcaacatttttgatagccgatttgagccttgctttttgttcttcaattgattttgggagatcggctagatttctgtgttccatatctagctcggcattgcattcttcaagttgcgccaagagctcaatcttgcgagcttcgagccgatcaatattggatttgattggacctccagatagctgatcaagtttggttttttcttcatgcacaagctgccaattcgcttggattatggccttaatctctttgcgctcatggcgttcggctagtcttagcttggctttttccagcttgaactgatgttgctcgagataaacggctggagttaggacatcggccagatcttcgggaatcagagcttgaacttcatgcagccgcgtcctaattgacccacagtcaactaccaaactgtctaaagaagaggcttctagccgatgagcgatgtcttcaagtgtttttctcacatcatcggataggggagcttgggctttgcttgaagtgtcttcttctgcctcatcaaggtaatctctgatgtcaaaagagaagagatcggctagagcctgcagaggcaatttcggaaagaataagagctgggtaaattatagctgatctaattgttgagacaaagggaaacttactgggatagcagaagcagctggttgttcttcctcttcgacgtgatgactccccacagccgatggagtctgattacttgacgattgctgtacaggaggagaaggaggaggaggctgcgaaatagacaagtgttatatagaatcggttgagattgattaagtaaaggaattaaggacatcttactggtggagccgatttaacaattgttgctgctggttttttcttcacagtagttttcttcttctgcaaccacaaagtctatgggtaattagccaaagagagaggtacttacttatgtaaaataaacgggggcagaaggagttggaggcgtttgcttgggtaaagccgatagtgttctttctgtgtcactcattttggctacagcttggtcaacatcttcaccaatttcttcttcatctaaagcttgtttaatagatggatccaaggcgggcagatcatcagtcgacatatcagttggttgtggttgagttttcttgaatttggtctttttctttggagccaaggctaaggtactcatggctgatgatctggttttccttttcttgcctgcatcggctggttccctagttaggccgtgaaggaaagttgaagtcttgggggcatggtagccgataaaagggggagatagtccacctccattcagaattaaacctgaagcatattcaatgttcctgcaactattactttgatgaggaggggaggactctgttgtctgcaaaacaggagcaagagattagtcaagtaatgaatcggctaactagttatgcaatttggtaatgacaaagtttacctggggtatgacgtcagggaatagatctgtcatatacattgaagccgattgataaaatagatgcatcttccatttaccccaccatctgtcaaagtttttgcttctaaatcctgccaactcaatattatcaatactgcccagagggggtcctggtaggttaagtagccgatccatcattagagtggatgtgatttgtcctcggcactgaatcttgtcggcaaagaataagccgattgggagttggcccaatccaagtgggtgataaaactcgtaggagacttggatgtttctcccatggtgaatgccgacagagaagatgcatgggctgattgcagctataagaatttctctggatttttggaatttttcatgattaatgtcttcaaatctaaagtctgatggaagttcaaggtctgctgagtcttcataaggaaaccagattcgtgcatctttcttaaaaccttcgtagaagctgcagaaccagtccttgagtagctcagccgatagcttcgctccagcatcggttggtgtggatgcatattctccatatgacatgcatctgcgatgggtgcgctcttctccgtcatcttccacaatcggctctggcaatgggaattcagcttttgtcacagagggccgattgacaaccttcatgactatcaggtttaaccaagtttgcagcagccaccatggtccacctgctccaactattgagccgacggctattttagccgatgcattgttcatcatctggtacacatagcccagaaggatttttgcccaaaggaaattctttctttgattctaaggctacagctacagattgctagttggttgtagggccacaactggatccacagaagaggaacttttccagccacatgaacaagaaagctacatgctctcgaggggtaacagacccttggcccatatatgccgccacatagccagaccagccacctatgcttttggtcttgaagtccaattggttcttggtgttcatactcatagggttagccgatgaagttacatctaatccagtaatcatggtgatgtcgattaaagttggagtcaatggcctttggttgaataagaaagcattgatggtgttggaccagaagtaggtggcggcagccatcagaggttcatccttagcagaatttgctatggtgagagcgactgcttggccgattccaattttatcccagtgaactttcttactagccgatacgcgtcggtactaggtggtccagctcttatcaggagtaggtttttcgagagatggccaagacttgaatgtattcttccagtgacccaggttagggttggctagtcgaaaggggatccgattggtttcaccgatgatgaaatcagtggggtcgagattgccgaatgggccaagaaaatagtggtttttgtgtgaaaggctaggaatcgcgactaggttggaaaggtgctgcaaatccaaaggaatcgggatgcggaaaacatgagaagaaaaggagaaatcaatttcatgagaggaaaagggatctagctggtgaggacttacctcagcgtacttgcccgatggtgcattagaagggctggtggaagacgacatcgccccgagcggagatctagtcgggaacgaaatcgcctagggatcgccttgtgcattggggagatcgccggagcgaaagagggcaaagttggtttcagcggtgaaaacggagaaggacggtgtgagatttctcgagggtaatggttagtatttaaagcacggcagtaatggtcggaaaacggcaaagtgcgaaacttgctcagagtcgatttacagcaaatccgaaaaattatcaaatattccggacttggggggcatgtgttaacaaccaaatttggtaatatcggcattgggaaagaagattagatcgaaacaaagtcggaggcggagatcgagttcagaaacagaacaggaatcggctggagtccagatcggctgggtctgagtcgagctaggtaagccaatgcagccgattccgacaatgcatactgatgtatgatatcgggttgaattaaggcgctttaaggtgattgccgcacatggatagagcctgagaaggcaattgtatctattaattaggatgatttatgtaatctccttggagatatgcttgggcaaaagtctgccgcaaagacttatggtatcttagagtttgttagagatagtagttgtatccgttatggacatatcttgtgattttcgggtataaatagacccgaaccctatgtaacttttaacatacacgttcaatacaatctcggcgcatcgccacctttttgctttagttttatttcgacgagttcttgctttctggttgagctgcatcggtttcgatcttcaacaagaggtaaaacttgttatggcggcttgagttctcaggattagtgcttccatctttatgacactctaatcttgtttatgtaattcgtcgagttatcatatatcctacataatccttggcaatatcgatatctaacctacaatcggctaacatccgtcaatagaaggcagccgattaggttaaatactgatgttgacttagattatataggatatctaccactctatgacacatccaacggcttgattgtctagacattgttcttcttttcatacttatagctgcatcagttaagtttgatcttatgagtcgtgattagaatctcaatctctagcccgctccttggttgctgattagggtagtatcggagtttcagccgatcttacctgatttaactactttttatcctatatgcttgattgacatgttaaatctgccctttacgttaagatcttgctgcattttagtatattaggcttttgtttagtatattctacttgctttcatatcttaatatagagtggtatcggagtattagccgatacatgctagatctatctgatcggttatgctatgaacgtatatagactcattattaatatatatttcgatctaagtgatttatattgtctcggcatggcgatcgatctatcccaatcacttgatttaagtatatatcaaaataatgattatatattgttaatatctacagccaatcgagtagatttagtcccttcttatttattaatgactaccgatcgatgcatatatgacatcggctcaaagataaatgatatatcatcggcacctagccaatcggctacatttatagatttaactgcggtttctttgcttctatttcttgttgattacaggatcaaatcaactggcacgctcatacattcgaaggcgagatttggacctgcactagagttaagcagatctcccaggcctcgtgttttctgtcaacacgcttttgatatatatgtgcccccctaattttacaatgacaaaagcattgataaaattataaaacaacgaagggcgatataacaatatcggccattgtacatcggcaaaccacaaccgattacaccatgaaaaacaactatgggcaatataaccatatcggccattgtacatcggcaaaccacaaccgattacaccatgaaaaacaactaagggcgatataaccatatcggccatctcaaggcgatgcaaacacatcggctgtcatgcatcggcaatactagccgatcatgcgttaactcaaacacttgggtaatatttcttcaaatacttgccattgagcgcttgcccatagacttcaccatcaagcccttgcaacatatatgctcccttagacataaccttataactggagttaagcagatctcccaggcctcatgtttttatgtcaacacgcttttggcacgcccagtgggagagattagaagtcagaaccgcaatagcattctctcatcgctaagaaaccaccagcatcgccatcttcggctggcaaaagagggtcctcccaaatctaggatcccgaagcttggtgggtccgaagttcatgaaagcaacatcgtgcccgtcactatagacaaattgacacttgaacaaaagaataatctcgaggcgatgatgcagcaaacacagaaccaattcttgaactcattcatggagacccgccaaggaacaattgtttagaggtataagatgaaattagttgctgatgttcctaggacaagttcttccaaggatggggaggtagaacaggtttcagatgctacagctcaattaggtgataaaagtgctgcagatggctcaggtgataagggtgattgttctcagggagtgaaagatgaggatctcagcccagatggtaacactgcacatatacaatttaacaacttccaagaatcagtctggggtactagtcaataccttgtcaaacatggtgaagtcgatggttgatggctcaatagctgagtatcaggctacaggaccggtttatttgccaggaggtattttcccaaactatcggcccttgatcactaataatcaaccgactgctcaaccgattgctcccaatgtgccatcagctcagccaacagcaccagtatcggctcctgcacctgctggaccatcatcggcaccaggtcaactaatcaatcctcggttgttggtgagagagcagtctcagcatagtggacaaaatgtgaatcggctaactcaagagcaagttgcagctatgtttttaccaactcagcctactgctgacccagttcaacagcagccgattcagcagacgccaccgaggcagcaagttgctcagccgattcagcagcaaggtttcctaaatgcatcggctgggttcaggacgcccgacaatcagccgaggcagcacgctgcaaatcaagttgtcccagagcatttggttcataatgtgcaaccagatcaatcggtgatacctcaagttattcccgaacatttggtgcgcaatatacagccaaactttcagaattatcacgggggcaatttgaattaccagtatcagcctccatcgccgcaagttcagtatcaacaaggaggatcgactcagcctcaattcgcttatcagtacaactcgttcgagcctgtgccacagcaagtgcagggggtgcctcaataggaaccatgggccgatatgattgcagatgtgatgagagagcaatttgggatcaagccaaaagacactggaaacttgtatcggcatcgatatcctgagtggtttgagagggttccattgcctagccggttcaaggttccggatttttcaaaattctcagggcaagacagtgtctcaacctatgaacatgctagccgattcttagctcagtgtggtaaagcatcgactgtcgacgccttgagggttaggttgtctccctagtctttgtctggatcggcttttacttggttttcttctttgccatatggatcaatcaacagttgaccgatttggagaagaattttcatagctatttttatagtggggttcatgagatgaaattgtctgatttaacagcgattaggcaaaggcatgatgagcctgtgcaagactacattcagaggtttagagagatgaggaataagtgctacaacttaagcttgactgatgttagcagatttggctttttagggtatgatagctccaatcagggagaaattctcatcccaggactttgatagtttgtcacatcttgcacaaaaggttacctacatatatggatctgatgatgatgatgatgattccgaggtagcagcagccaagtgggttaggagcaagaaggttataccatgccaatgggtgaagagttctggaaaagaagagaggtatgactttgacatcaccaaggctgataagatctttgatttgttacttcgggaaaaacatattcaacttcctgctggtcatacaattccatcggctgaggagctaggcaagaggagatattgcaagtggcataattctggatctcattctaccaatgattgtaaagtctttagacagcagatccaggcggctattgagggaggcaaaatcaagtttgatgattccaataagccgatgaaggttgatggcaatccttttcctgtcaatatggtacatacagctggtcgaacagccgatggaggaaaagctcgaggttttcaaatgaactcggctatgattatcaataagtatcagaggaaatatgattagcatcaggaaaagtattatgaggaagatgatagcggtcttgatcctcattggggttgtgagttctttagattctgttggaatgaaggtatgaggctgccatccaatgaggattgtcctaggtacagcaatattgcaggaagttcaagccgatcatataataaaggcaattggctaaggcaagcaagggttcctgttcatcaaaggttgggcccagtaaatcaagatcgtgaccaagaggacaatgaaggtaggaagacttaatggtgtccttctggtatttttacaaagaatcagaagagaagggttcaaaggttgaggaacagggaagaggttgagcaagaaatcaaccatcggctgaagaaaacgaagccgcagcaggagtggcgcgttaagaatcaagttcctacagccgatgaagccacagccgatgaagcaaaaagattggctaaagggaatagtgttgtaactgcatcggttaacatggttttcacactgcctgcagaatttggagtcaaacaagccgatgttgatgaggttgaggaagcatcggctaagttggttttatcaccagaacaagcagtttttgagaagccaaaagggacagagaattggtatctcaagccattttatgtaaacggttatgtcaatgggaagccgatgtctaagatgatggtcgatggtggggccgtggtgaatttgatgccttatgccacgtttaggaagctgggcaggaatgctgaggatctcatcaagacaaacatggtgctcaaagactttggtggcaatccatccgaaaccaaaggagttttgaatgtagagctaacagtcggcagcaagactatccctacaacgttttttgtcatcgatgggaagggttcctacagcttgttgcttggaagagattggattcatgccaattgttgtattccttcaaccatgaatcaatgcttgattcaatggcaagtcgacaagatagaaattgtaccagccgacaggtcagttaacgttgccagtgctgatttagctctttgggagatggatggcctagattgcttgtctggaaaggtttgggaaggagattttctaaatgtgtccgattgtgatatacaaccaattgaagatggagagcccaagttattattttgagggcgttgtggagggttcaaacgtctacaccaaggacacagtagatgatctcgatgacaagcaaggacagggtttcatgtcagccgattatttggaagaaattgacataggtccaggtgatcgatcgaggccgacatttatcagtaagaacttatctctagaatttagaaccaagttgatagagctcttgaaggaattcagagattgtgttgattgggagtattatgagatgtcagggctcagccgatcgattgttgaacatcggctacctatcaaaccggggtttaggccgcaccaacaacctccgagaagatgcaaagccgacatgctcgaacctgtcaaggctaagattaaacgtttatatgatgctggtttcattcgtccttgtcgatatgccaagtgggtttctagtataattccagttatcaagaaaaacggcaaagtcagggtgtgtgttgatttcagggatttaaacaaagctaccccaaaggacgagtattcaatgcagtagccgatcagctgggtgatgctgcttcagggcacaagatattgagttttatggatggaaatgcaggatacaatcagatcttcatggctgaagaagatatacataagacagcttttaggtgtcctggtgcaatcgacttgtttgaatgggttacgatgactttcggcttgaaaagtgctggagctacatatcaatgggccatgaattacatataccatgatccgatcggctggttggttgaggtctacattgatgatgtggttgttaagtctaaagagatagaggaccacatagccgatttaaggaaggtttttgagaggactaggaaatatggcttgaagatgaacccaacaaagtgtgctttcggtgtatcggctggccagtttttggaatttcttgttcatgagagggggattgagatacctcaaaggagtgttaatgcgatcaagaaaattcagtctccagaaaatagacggaattgcaggagatgatcggcaagataaattttgttagaaggtttatttctaatttgtctggaaggttagagccttttacaccattgttaagattgaaagccgaccaaaagtttacttgggaggcagtgcaacagaaggctttggatagtattaaggaatatcttagctctcctccagttttgattcctccacaaaagggattaccttttagattatatctatcagctggtgagaagtcaatcggctcagtcttgattcaggagcttgaagggaaagaaagagttgtattttatttaagtcgtcggctcttggatgcagagacgagatattcccctgtggagaagttgtgtttgtgcttgtatttttcctgtacaatgttaaggcattatatattgtccaacgaatgcactgtcatatgcaaagccgatgtcgttaagtacatgttatcggctccgattttaaaaggaaaagttggaaagtggatattttccttaacagaatttgatcgttgatcatcgtgatgattcaatcggctcggttgaggttgtgccatggtctttgttctttgatggatcagtgtgcactcatggttgtggtataggcttggttataatttttcctcggggggcaagttttgagtttgcctatactattaagccttatgcaaccaataatcaagctgagtatgaggcagttctcaaagggttacaattactcaaggaagttgaagccgatactattgaaattatgggggattctttactggtgatcagtcagttggcaggagagtatgagtgcaaaaatgatacattgatagtttatattggtggcaaccgattattttaccaagtgggtagaggcgattcctctaaagaaagttgattctggatatgctatacaatttattcaagagtatataatttatcgatttggtattcctcaaactattacaaccgatcaagggtcaatcttcgtgtccgatgagtttgttcagtttgccggtagcatggggataaaattgttgaattctcaccttattatgcacaagctaatgggcaagccgaggcgtctaacaagagtttgatcaaattgattaagagagagatttccgattatcctcggcagtggcatactcgattggccgaagcattatggtcctattggatggcttgtcatggatcgattcaagtccctccttataaacttgtttatggacatgaggttgttttgccatgagaagttagaatcggctcaagaagaacggagttgcaaaatgatttgacagccgatgagtattataatcttatggccgatgagagggaagacttggttcaatctagattcagagcccttgcaaaagttgctaaggataaggaacgggttgctcgacattacaacaagaaagtggtagccaagtctttttcggaggtagaacttgtatggaaattgattttgccgattggcactcgggatagcaaattcggcaagtagtcgccgaattgggaaggaccgtttcaaatctataaagttgtgtctaaaggaggttatatgttgcaaggactcgatggagaagtttatggacgagcgctcaatggaaaatacttgaagaaatattacccaagtgtttgggttaatgcatgatcggctggtactactgatacataatagccgatgtgtttgcattgccttgggatggccgatatggttatatcgcccttagttattttcctattgtaatcggttgtggtttgccgatgtacaaatggccgatattgttatattgcccttagttcaagatataatttcatcaatgccttcgacattgtaaaattaggggggcacatatatatgcaaaagttgcaaaatttttgagcaaattcttgagcaaaaacatggagttatattaatcggcataaatcaagacaagttaactacaagtgccagagtatcttagccgattacaaaaatttactacatcctattatagaatatcactgagacaagtagcgctagatcgccgatatagctctttgcctaatgtgttctacttcttcaatagcttgggtatcttgagcatcggttccagagatgacttttagggacttggtcatatcagcattgcattcttggagttgtgccaagagctcaatcttacgagcttcaagctgatcaatattagacttgatcgggccctcagatagctgatcaagcttggacttctcttcatgcacgagttgccgattggcctggattgtggcttcaatatccctgcgctcccgacgttcggctaatctcagcttggccttctccagtttgaattgatattgttcaagataagcagctggagtgaggacgtcggcatgttcttccgggatc

SEQ ID NO: 6411 - DNA, 1715 bp, Oryza sativa
aaaaaccagaggacaaaaagaaacgggtgagtgaaaacttgccttgggagatgggagaatgaatacggccgcagtgggcgcggggacgaacctgcgaggaggtcggctaaacgaccaccttgggggagagataaggtttccccggcgtggttcggtctcccccatcttgcggcgccgcttcttctttcgctccccctcgggctgcgacgtcggcacggcaccatccaggcgcctgctgctggcacgcgccgccccgccccctcggggaggagatggggaaggggtaccctcctgcttcctcttcccccgggcgtcggcagggtggctgcaccccgggcccccatcgtggggcccagaagcatgaccccctcccagggtagattgttcccccctgcggctcccgcccgcgccatcgtgacctcgaggagcccgctcctccgacgccccgaccgcctacatgatggtcaggatgttggcgcgatctggatcgctgcagagggggaggactccttgggggatgagggatgcctccacggagctgagattcagcacccgttggaccaccatcttgaagtcctcaggggcccagtcccatctgcccccctggtgggtcctcatgtagtcctcggacccggtgtactcccaggcgccccgggcgcgccgctggagcggcgcaatctgacgatgaaggtagtcgccgtacaccatggcccctgtgagcccctgggatcgcaggcctgccaggcggtcaagaacggcgtcgtagccgtctcccagatctaccggcgcccgccagctgaaggcctgcgccgggggctggctcggaagtcggaggcgcgcttcgtcggcgaggggagtgtagaaccagtcgctcttccagtcgtcccactttttgcggagggcgcagggatgtagcggttcagcaccggcccccgtggctggaagtagcagccaccgactaccgatggcggcgacaccgactgcacggtgaagaaccaccggaacagccgaagagatgggcgcaccccaatgaacatctcgcacagatgcgcgaagatggccaatgtcatcaccgcgttgggggtgaggtgcgccatctggagatcgtagaactccagaacatccatgaagaaagaagaaaatggtggaaccagccctgccattgcaaaggggagaaagaagacagaccgctccgggtagtctggcgccgggcgtccctcgcccagcgtgactatctcccggccggtggcagattccggcatgaagcggcgcggcagcccagcctgcctctcgctcacgatacgggaaggcggcagcacgctaccatcgagcagagcggaaccccgtgccatggcgccggaggaagagaagattaagagcgagcgcgtgtggcgaaggtagggcacaggaaagaaggagttagggcgcaagcggcgaagacaaggggaataatggcgaaaggaaggaaacaaatcccttcctcagtgcctttatactcttgccaacgctgtgcccggctactcgcttctcgcgcccactatttcgccccctcgtttctcgcgcccacgcttccactaatcccattcgcccgcttgcggcgcatgaggtggatatgcggttgtggcagtcgagatagatcatatcgtgcgcgcgttaattacgctcgccgaccgaagcgacgttaccatatctccagacgaaacgaatcgccatgt

SEQ ID NO: 6412 - DNA, 3472 bp, Oryza sativa
ttggcgcgggagcagaggaattggtggcggcagagggaaatcggtatggcgggaatgggttttgggagggtgaatcggggatttcgcgctacggtttcgacgcgagggcgaggctacgccgcccacaacgcgcgctacccgggtcttctcctcgctgcgcgtcctggatttcgcgaggttttgcgtcgctcacctaggggacgaggaacctagtttaggcgcgggtccaagtgacacggcggcaaaaatccaacgtggcgcgacgaggtcccggtccagctcaccacactgtgagagcactgtgagaggcctcatgtcgtgcatacacaagtactgtctagagtttgtcttcttggagaagacccagaaaaaccaacctttgtatacaaaaatgcttaatagacatagtataagacacccttggatactatcccatcgtcatgtgaagtagcaaactatgttatgatccccttgatcttgtttacgcctttggatttaagatatgtacttaactttttagattagatagttttacctttgtgttactttggataccataactctttatcaagtaatattgattacatcggctatcgcacaccaatgacctcaaaaagtaatatgtagatcacacattcaatatagggtaagttgtatgtgaatggataatagagttggaataattcatagtactagtatgtatcgctccataagttattttgttgtaaatgctcacttacctaacttaggtactatttgtttcagcttaagattattgtaatctcttattaaatcagattactctaaactagattataataagctgacatagaataagctgccaattgtttggtttctctggattattagaggcatctaaggccttgtttctttcagcttggaattattataatccagattattgggagtaagctgaaagaaacatacaacttattgaagtagcttattataatctggtgcccagcttattataatatgataaactcatttaggtgagctttttccagattattgggtgaaaaattacccaccatgccaccccactccctctttagacttgcaaacccaataatctaggctctaataatctaggaaagaaacaactaaccgcttattctactacagattataacaatctagtttatagtaatctgactcaataatctagaatataataatcttaagctgaaagaaacagggcctaagagtagtgggtctttagccactcaataatttggaaaaagctcctctagtgaagatttatcaaatattctggacttggggggcatgtgttaacaaccaaatttggtaatatcggcatcaggaaagaagattagatcgaagcaaagtcggaggcggagatcgagttcggaaacagagcaggaatcggctagagtccagatcggttacgattagaatcggctgggtctgagtcgggctaggtaagccgatgcagccgattctgacaatgcaactcgatgtatgacatcgggttgaattgaggtgcttcaaggtgattgccgcacatggatagagtcctgagaagtcaattgtatctattaattaggatgttttatataatttccttagagatatgcttgggcaaaagtctgccgcaaagacttatggtatcttggagtttgttagagatagttgtcgtgtctgttatggacatatcttgtaattttcgggtataaatagacccgagcactatgtatcttttaacacacacgttcaatacaatctcggtgcatcgccaccttttttgctttagttttatttcgacgagttcttgctttcgggttgagctgcatcggtttcgatcttcaacaagaggtaaaacttgttatggcggcttgcgttcttgggattagtgcttccatctttatgacactctaatcttgtttatgtaattcgtcgagttatcatatatcctacataatccttggcaatatcgatatccaacctacaatcggctaacatccgtcaatagaaggcagccgattaggttaaataccgatgttgacttagattatataggatatctaccactctatggcacatccaatggcttgattgtctagatacggcttgacttaagtttgaccttataagtcgtgattagaatctcaatctctagcccgcttcttggttgctgattagggtagtatcggagtttcagccgatcttacctaatttaactgctttttatcctatatgcttgattgacatgttaaatctgtcctttacgttaagatcttgctgcatttaaatatattaggcttgtgtttagtatattctacttgctttaatatcttaatatagagtagtatcggagtattagccgatacatgctagatctatctgatcggctatgctatgaacgtatatagtctcattattaatatatatttcgatctaagtgatttatactgtctcggcatagcgaccgatctatcccaatcacttgatttaagtacgtattgatataaagattatatattggtaatatctgcagccgatcgagtagattcagtcctttcttatttattaatgactgccgatcgatgcatatacgacatcggctgaaagataaatgatatgtcatcggcacctagccgatcggctatcatttatagatttaactgcggtttctttgcttctatttcttgttgattacaggatcaaatcaactggcacgctcatacattcgaaggtgagctttggacctgcactggagttaagcagatctccaaggcctcgtgttttctgtcaacaagattataataatctagcataataatctatttgtttgtttcagcttactcctaataattcagattataataatcctaagctgaatcaagcggggtcttagtttgttgaaaaaccacccattacgtatatgcttaactgaatcaacatgtattttaaagtgtcagcgttaatgtggtctttaccaaaattaaatacctatagtcttgatacttttttgggtaagattccacaaacaaaattactgacaagagcttaaacgttctctcattgagttttgctatatgcacaaaaaaaagttcaattaaatatgaaaataagtctaatgtaagcacttggataaggttgaataggcttagcttagcctgtggtaactctacatcagtgctaacaggttaattcagttaagcacgtacgtagtgagatggttttgcaacaaaattaagtaggggtagatatttgcataaaatgatttattatgggggtagaatgtcatatgagatgattttggaatttttctctattatattttagagcggagggacatgagatttaattaaacacatccactataaaactcataggcaacaatgagatttaattaaacacattcactaaacacatccactatcaaaagcaaaacacccaccttgtgacacaaacccaggggctactg

SEQ ID NO: 6413 - DNA, 21929 bp, Oryza sativa
caacaaatttttggggccatgcatgtatgatgtatggcagcagcaaggcacgtgcatttacccttgatcgctggagtttgttcatagacggtcccacatttgtgcaacaaatcgcatcgggactgtgaaattcaaggcggtacatatactggaaaagatgaacagctacaggagttccatagagaaaataaagtaaaagaactaaaaagacaacacaaaaaggttacttcgtaccactgttatttgacatcgccataacagtgaagcattctctaaatagccaagggcatccacaatataagctactcctaaagtgtcctcactaactaaggacacacgtaggaaaactcaactcgcaatggaggacacccctgaatgggctcctcaaaatcccaacctataaagccacaagtattgttttcctcttctacccctctcttcaaactaaggaatttgaagacatgaagcattcagaatacacgaatatattcaacacagtaattttcaatcaagagtaacctatatattataatctaattaagcaatagaatactagtattttctatcacactctcaagtactacttcaccacatcatctgtactactctatcttatcctcttcgttcatagccattcaccgcatcatctgtactactctatctcatctttttccccaatcttccatcgagagcagcaaaccgatgccaagatcggtggatggcatagcgagctcgcatacgcggccgagctgggtaccgggcggagcaagcaaggcggcagtcggctgacgagctcactcgcgcggccgagctgggtaccgggcgaagcaagcgaggcggagcaatcgaagcggacgcacggcaggagcgagctgccaccatggtcagcacaagctcaagctgcgtggtttgcgactttgccccaccgcgccgccgtctactccgccacacagcgccgcccgtgagctcccttcagctcgagctcgaggggaacgggagagagaggggagaggggtggaaggagaatatggaggtggagcacccgttgcccgaggcacccgtcgccgcagcgcgtgcctcgagcccatcccctggccgaaaaggaggagccgcatcgcccagacgggagtcgcgtggcgtcgttgggggacggtgcgaacgaaaaagtaaacggagatggacggaaggagctagggacacgcccctgaggctacccattgctgatggcctaaacatccataattttttaaaaagtaaaaaattcacgccagcagaatgccaaaacatagagaaggaagttaacttttcaggaaacaaatatcaggcgatgtccaacgtggaagagggaagacctccacgtacgattggatataactactggaaactaatctttgctcggtcgccccaaaaccacaatagtcccggttacaaaaagaaccgggactaaagatgatctttagtcctggtttaaaaccccacagccattctacgatctttagtccctaaagatcatctttagtcccagttcatccctatcagtcccttgtcagaggggcggggatctttagtccctgttggtgtcacaaaccgggcttaaagatcacctagatcaccactttagtccagactaaagatctcctctttactccctataacaaacggaactaacatcacgcgtagtatataatccctattccctatcctctccaccacaaccggcctcaatctcctcaacaaccggcctctcctctcctcagatccatctccctctcctcccatcctagccctctcctcccctcctcccttcctatccgatgcccagcgagggccgcctcctccccctcctgccttcccgtgcccagcgcctcctccccctcctcccttaccgtgccaagtggggccgcacgcggcaggtggccggcgaggccgcatgcagcaggcggctgagcacaggccgagtagcgagcgggcggcgctaccggcatccattctttattttttttacaatttgtgattcactgagatgtataattttgtgatttgttgtatagatttgagatgtataatatgtgatgtatttggtttgtgtgtaatttttttaggatttgtgatgtatttgatttgtgtgtacaagtaacttaagatttgtgatgtgaatgttttggaatattactttgatttcggaatatgcatccaactcgatttgggagaaaatacaggattaaactctggctaaaaaacaatgaaaaaaaaagaaaaagagacctaattggactgccactaccctctctttagtctcagttgatatcacaccaaccgggactaaaatccatctttagttcgggttatttcaatcgggactaaagatgcgccggattgctagtcccggttgaaaaacgccggattgctagtcccggttggaaaaccgccggttgaaaaaccgggactaaatgggttaccaaccgggagtataaatggtttctggttgctgagccgccatcaaacctaggcgagatgaaccatatatatataatatccgatggagttgatgaatcggccggcaaatcacatgatgcattgatacattaatgcatttatatttaatgaagatgaaaataaattaggacattggcagtttatattaagaagatgaatagctatggcgtttcaagcagcagctttcaagttttgctttattgttggactgcaaacatgaatagtcaaggatcctagggggcaccgcccacatcgagctgagccatccaatgggcttgtctaagattttctgcaaatttgagcttcacatgaatgaaagcaaattcatctcagtgccgcggccgcacccgcgctgtccaccacgcctaagccgaggccggggccgcgccgtgcgcacgcacgatgcgccgttccgcgcatccgccgcactgcgtcgtgccaccacggagatgatgccctgccgcgccgcgtgcttgtcaccgggccgaccaccacgcacgaagaacaaagaaaggaagaagaacaagaaaagaaaaatgaaaaaaaaaagagggtgcgccatcggccgtcgccccggcgccgacagcattggcgcccgaccgccgaccgcgcctgcagcaccgccgccgcacggccacgcctgtggcgtccggccgttccccgttacccggcatccgcatatggcaaggaacaatcgggggagaaaaatgaaagaacgaaaaaaaaggggaaaaggcgacgaacagcaccagatggccgagccgccgtcgccggccgcccaccacaaatagcacgccatgccacgccacccttcggctcgccgcgccgcccccctggccgctgcaaccacgcatgaacgaggtcgacgccgctgccgtgcccgcgccggcctaatccggccgcgtcgccttgcccggccacgaccgccgcgacgggcgtgctcgcggcgccggtcgcccgcccgcacccgcgccgccgcttacgtatggccgcgctgtcgccgacctagccgcgccgcgccacgctgcatccgcatggccgctccaccgttccccggccgccgccccgcgccgcccccgccggtcgccgaccgagtcacgccatcggccgcccccacatggaaaggaaccatcggtggaaaggaaaagaaggaaagaagaagaaagggaaagagaagtggaaaggaccgatgctcatgtgattttgcaaatggacccttgcattttttggaaattaagtgcatattcctctgcaaaggaaatttaccttttaaatcctaatgttttaagaaaacacacaaataacctctgcatttgggatatttgtttgaaaagcatttgaaatttgcaaatatcactaaaatcatattcacgcataaaaagggtccatcggacattgcatttcgaccttgactttgtatttaaggtatcttttattgctgatgtttatgattatgaaatttatttatcgcatatatgattattgattatttatgatgcttttattacttttaattgatatcattgcagtaaatatatagaatagcatataatatattgaaattatttgcggcaattttgtgtaccatcgcattgcaacatttgtgtatttgttaacgaccaaatttggtaatatcagcatcggaaaaggagattagatcaaggtggagttgaaggcggagattgatcctagaacagagcaagaatcggctgaagtccagatcggctacgattaggatcggctgggtctgagtcggactaggtgagccgattcagccgattctgatagtataatttggtgtatgacattgggttgaatcgaggtgcttcaagatgattgccgcacattgatagagtcctgagaaggcaattgtatctattaattacgatgttttatgtaactttcttagagatatgtttgggcaaaagtctgccgcaaagacttatggtatcttagagcttgttagagatagtggtcgtgtccggtatggacatatcttgtaattctcgggtataaatagacctcgagccctatgtaattggtaacacacacgttcaatacaatttcggcgcatcgccacttttttgctttagttttgtttcgacgagttcttgctttcgggttgagctgcattggtttcgatcttcaacaagaggtaaaacttgttatgacgacttgcgttctcgagattagtgcttccatctttatgacactctaatcttgtctatataattcgtcaagttatcatatatcctacataatctttggcaatatcgtcatctaacctacaatcggctaatatctgttaatagaaggcagccgattaggttaaatagcgacgttgtcctagattatataagatatctaccactttatgaaacacccagcggcttgattgtctagatattgttcttcttttcatacttaatgctgcatcagttgagtttgatctattaagtcgtgcttagaatatcaatctctagcctgtcctctggttgccgattagggtagcatcggagtttcagccgatattatctgatttaaccatattcaatctatatgcttcaatgacatgttaaatctgccatttatgtcaggatcttattgcatttaagtatattaagcttttgtttggtatattatatttgttttgatatctttatataaagtagtatcggagtattagcggatacatgctagatctatctgattggctatgctataaacatatataatcctgttattaatatatatttcgatcgaagtgatttattctgtctcggcatggtggccgatctaccccaatcacttgatttaagtatatattaatataagaactatatatcgttaatatatacagccgatcgaatagatttagtttcttactatctatttataaccgccgatcgattcacatatgacatcggctcaaagataaatgatgtcatcggcacctagccaatcggctatcatttatagatttaaccacgaattctttgtctctatttcttgttgattacaggatcaaatcaactggcacgctcatacattcgaaggcgagctttggacctgcactggagttaagcagatctcccaggcctcatgttttctatcaacacgcttttggcacgcccggtgggacaaattagaagtcagcaagcaattcttcctcatggccgagaagccaccgctatcgccatcctcggctagcccaagcactgttaaataaaagatccagaagttggggttgactcgtgcccatcgatccagagaaattcacacctgagcagaagaaggattttgaagcaatgttgcagcaagcccaggatcaggtcttgaactcattcatgcagccccgcaagggaacattggttcagaagtataaagtaaaggtagttgcggatgaccctgggaccagttcttccaaaggtgaagacgggaaataagctccaaatggctcggctcaactgagtgacaaaggtgctaccgacggttctctaggaagtcaaggtgacaactctcaaggggtgcatggagttcaaggtgatggtgctcaggggttacaagagggaaatcttaatcagaatagtgatgcggcacaagatttttttaataatttccaagaccgggtcgactatgttgtgcaccatgctttgatcaatcagtctggggtgttagtcaataccttatcaaacatgacgaagtcaatagcagatggatcaatagctgagcatcaggctgcaagcaattcttcctcatggccgagaagccaccgcagtcgccatcctcggctagcccaagcactgttaaataaaagatccagaagttggggttgactgatgtcaatgaaggaaacgtcgtgcccatcaatccagagaaattcacacctgagcagaaggattttgaagcagtgttgtagcaagcccgggatcaggtcttgaactcattcatgcagacccgcaagggaacattggttcagaagtataaagtaaaggtagttgccgatgaccctgggaccagttcttccaaaggtgaagacgggaaacaagctccaaatggcttggctcaactgagtgacaaagctgctaccgacggttctctaggaagtcaagctgacaactctcaaggggtgcatggagttcaaggtgatggtgctcaggggttgcaacgtggaaatcttaatcagaatagtgatgcggcacaagattttttcaataatttccaagaccgggtcgactatgttgtgcaccatgctttgatcaatcagtctggggtgttagtcaataccttatcaaacatgacgaagtcaatagccgatggatcaatagctgagcatcaggctgcaggcccagtttatttgcaaggaggtgtctttccaaattatcggcctttgattactgatgcccaaccatctatttaggcagttccccccgtcgcaccatcagctcagccgacggcgacggcatcgactcccttacctgctccgtcagcattggcaccaggccagctggtgaaccctcagttgttaatgagagagcagccacaacatagtgggcaggttgtgaatcggccgacgcaagatcaggttgctgccatgtttctgccgcctcaacctgctgttgatccaatacagcattagccgattcaacagacactcccgagtcagcaggttgtacaaccaatccagcaacaagttgtgtaaccagtccagcaaacgccaccaaggcaacagcctccgcggccgattcagcgaacgccattaagatagcaaatcattcagccgattcagcaccaaggctcaatgagcgcatcggccaggtttgtgacgcctggtggacaacctgtacaacaatttttaaatcaagtcgtcccagaacacttgtttcaccccgtgcagccggatggcacagtaatgcctcaagttgttcccgagcatttggcacgtaatattcagccgaaccttcataattaccagggggcagcttgaattatcaatatcagcctccttccccgcaagcccaatatcagtcagggggactggctcaacctcagtttgcgtctcaatacggtcagttcgagcccatgcaacaatagtcacagggagcagctcagcaacgaccgtgggccgatgtgattgctgatgtaatgagggaacagtttgggcttaaaccaaaagagactggaagcttgtatcggctgccttaccctgagtggtttgagagagttcctctcaacattcagttcaaagttccggacttctccaaatttttgggacaagatggtgtgtcaacttatgagcacattagccgatttttagctcagtgcggtaaagcatcggttgtggacgctctgagggttaggttgttccagttatctttgtttggatcggcttttacttggttttcttctttgccatatgggttcatcaatagttgggccgatttggagaagcaattccacagctatttctacagtggggttcatgagatgaagttatccgacttaacggcgattaagcagcggcatgatgactctgagatagctgcagccgaatgggtgaggagtaaaaaggtcataccgtgccaatgggtgaatagttctagaaaggaagagaagtatgattttgatattactaaagctgacaagatttttgatctgctactccgagagaagcaaattcaactccctgctggtcaaacgattccatcggctgaggaattaagtaaaaagagatattgcaaatggtataattctgggtctcattctactatcgattgcaaggtgtttagacaacagattcaggtggccattgagggaggcaagattaagtttgatgattccaaaaagccgatgagggtcgatggtaacccatttcccgttaacatggtacacacagctagccgaacaactgatacggggcgcatgaggggttatcaagtaagttcggctagaattataaacaaatatcaaaggaaatacgacaagcaacaggaaaagcatcatgaagaagataatggtagctctgatcctcattggggctgtgagttcttcaggttctgttggaatgaaggtatgaggttaccatctatcgaggattgtcctggatgcagtgatgttgcagggggttcaagccgattgtacgatggaggcaattggccaaaacagacaagagtacttgttcatcagagattgggcccagtaaaccaacgtggtgattcgaaagatgatgaaaataagaagactgaatggtgtcctcttagtatttttacgaagaatcagaaaagaagggttcaaagattgaggagtagggaatgcttccagcaggtcgaacaagaaattaatcatcggctgaagaaagcaaaatcgaggcaggagtggtgtgttaagaatcaggctcctgtagccgatgatgttgcagctgatgaggcaaagaggttggcaaaaggaaagagtgttgtgacggcaccagttaacatggtttttaccttgccagccgaattcgggatcgatcaagccgatgtcgacgaggtggaagaggaatcggctaagttggttctatcaccagaacaggcggtgttcgagaagcctgaggggacagagaatcgacatcttaaaccattgtatataaatggctatgtcaatgggaagccgatgtcgaaaatttgatgccttatgctacgttcaggaagttgggtagaaatgccgaggatcttatcaagacaaatatagtgctcaaggactttggtggcaatccatcggaaaccaaaggtgttctaaatgtggagctgacagtcggcagtaagactattcctaccacgtttttttgtcatcgatgggaagggttcttacagcttgttgcttggaagggattggattcacgccaattgttgtattccttcaactatgcatcaatgcttgattcaatggcaaggcgacaaaatagagatcgtactagccgacaggtcagttaatgttgccagtgccgatttagctctttgggagatggatggccttgattgtttatctggaaaagtttggaatggagattttctaaaagtgtccgattctgatatacagccagttgaagttggagaacccaagctattattttgagggcgttgtggagggttcaagtgtctacactaaggatacggtagatgatctcgatgacaagcaaggtgaaggttttatgtcagccgatgatttggaagaaatagatataggtccaggtgatcggccaaggccgacatttattagtaagaatttgtctctagaatttagaaccaagctgatagagctcttaaaagagtttagagattgcttcgcttgggagtattatgagatgcctggactcagccaatcaattgtagaacatcggctacctatcaaaccaggggttaggccgcaccagcagcctccgaggagatgtaaagccaatatgcttgaacctatcaaagctgagattaagagtttatatgatgctggttttattcgtccttgccaatatgctgagtgggtttctagcatagttcctgtcatcaagaagaacggcaaggtgagggtatgcattgattttagagatctgaataaagctacaccgaaagatgaatatccaatgccagtagccgatcagctggttgatgccgtgttagggaacaaaattttgagttttatggatggaaacgcagggtataatcaaatttttatggctgaagaagatatccataagacagcttttagatgttctggtgcaatcggcttatttgaatgggttgttttgactttcggcttgaagagtgctggagctacatatcaacgggccatgaattatatttatcatgatctaatcgactggctggttgaggtctatattgatgatgtggttgttaaatctaaggaaataaaagagcacatagccgatttaagaaaagttttcgagaggcccaggaaatatggcttgaagatgaatccgacaaagtgtgcttttggtgtatcggatgggcagttcttgggatttcttgtccacgagaggggaattgagataactcagagaagtatcaatgcgatcaaaaagattaagcccccggaaaacaagaccgaattggaagaaatgatcggcaagattaattttgttcgaaggtttatttctaatttgtccggaaaattaaaaccttttacaccattgttaagattgaaggccgatcagcattttacttgggggcagagcagcaaaaggctttggataatattaaaggatacctgagttcccctcctattttgattcctccacagaaagggataacttttagattgtatctgtcggtcggtgagaactcaatcggctcaatcttgattcaggagttggatggaaaagaacgagttgtattttatcgcagtcgtcggttcttagatgcagagactagatgttctcctgtggagaagttatgcttatgtttatatttttcaagcacaaggttaaggcattatttactgtccaatgaatgtactattatatgcaaggccaacattgttagatatatgttatcggctccaatattgaaaggaagggttggaaagtggatattttccttaactgagtttgatcttcggtatgagtcaccgaaggcgattaagggacaagctatagccgattttattgtggaacatcgtgatgattcaatcggctcggttgaaatggtgccatggagtttattctttgatggatcggtgtgtaatcatggttgtggtatcggcctagttataatttcccctaggggcatattttgagtttgcttatactattaaaccttatgcgactaataatcaagctgagtgtgaagcagtgcttaaagggttgcaattgctcaaagaagttgaagccgatgctactgaaatcatgggggattctttactggtaatcaatcaattggcaggggagtatgaatgcaggaatgatacgttaatagtttataatgagaagtgccaagaactgatgaaggaactttggctggttactttaaagcatgtatctcgagaacaaaatattgaagctaatgatctggcccaaggggcatcagggtataagccgatgatcaaagatgttaaggttgaaattgcagcaataacagccgatgattggaggtatgatgtgcatcaatatttacataatccatctcaatcggcttctaggaaattaagatataaggcgttgaagtacacactattggatgatgagctttattatcatacgattgatggagtgttactaagtgtttgagtgccgatcaggctaaagttgctatcggcgaggttcatgaaggaatttgtggcactcaccaatcggcccataagatgaagtggttacttcggcgtgcagggtatttttggcccacaatgttggaggattgcttcagatattataaggggtgttaagattgtcagaagtttggggcaattcaacgagcgccgacgtcggctatgaatcctattattaaaccgtggccatttagaggttggggaattgatatgatcggtatgataaacccaccatcaagtaaagggtataagtttatattggtggcgactgattatttcaccaagtgggtggaggccattcctttgaagaaagttgattctggggatacaactcaatttgttcaagaacatataatctaccgatttggtattccttaaactattatgactgatcaaggttcaatcttcatgtccgatgagtttgttcagtttgccgacagcgtgggtatcaaattgttgaattcttcaccatattatgcacaagctaatgggcaggccgaggcatctaacaagagcttgatctaattaattaagcagaagatttcttattatcctcggcaatggcatacccggttggccgaagcattgtggtcttatcggatggcttgtcatggatcaattcaagttcctccttataagcttgtttatagacatgaagctgttttgccatgggaagttagaatcggctatagaaggatagaattgcaagacggtttgacagtcgatgagtattataatcttatggccgatgagagggaggacttggttcaatcgcgtttatgagcccttgctaaggttaccaaagataaggaacgagttgctaggcattataacaagaaagtagtgcctaaggattttttggaaggtgaacttgtatggaagttgattttgtcgattggaactcgggataacaagttcggcaagtggtcaccaaattgggaaggaccgtttcaaatctataaggttgtgtctaaaggggcatatatgttgcaagggcttgatggtgaggtttgtggacgagcgctcaatggcaaatacttgaagaagtattacccaagtgtttgggttgacgcatgatcgactcgtgttgctgatgcatgacagccgatgtgttttacatcgtcttgagatggctgatattgttatatcgcccttagtcgtttttccaattgtaatcggttatggtttgccgatatataacggccgatattgtatcgcccttagttgtttttctaattttatcaatgctgttgacattataaaattggggggcacatatataccaaaaatgaaagtgaaaattagaagttatgttaatcggcacaaaggattgttaaaacaacagggtattaacgtatcttagccgattacaagaatttttaagtcctattacacaaaagttattgagacaagtactgctggatagccgaaatagctctttgcctaatttgttcgacttcttcaatggcttgggcatcttgagtgtcacgaccggaagtaacccaacgggcgttccttacgtgcgtgtattatttcttgtcccaggaggcaaggtacaccaaaagttgatacatttcagagtttaccaagcggaagcgtaaataattaatttattacatgggcggcgaaggcccagcacacacaaagacaaacgggaaacagcggaagactagggcgacgaccacaggcgcttgacggcaggcacgagctaaacaccaacgccttcatcttccaggaactcctcttctgggtttgggaaaaaattaagcaagactgagtacaaccaccgtactcaacaagacacacccacaagtgcagaataaatgcaagggagtacaagggggttataatataagggttagggtttgcagtaaacagcattaaaagacacttagttgcccaaagatattttgtaaatacgatcctagagttatacaatgttattaatcaaggccgtgaacccacacgaacctgccttaacccaaggcctacgatgattcagaccgaactagcaacccgaccctgggtcccagctcgtcccaagccaacccaggccaaccgttccatattttagttgttaagcaggttttaagaattaaaacactaacttgggtacattgctcggcttgcccataaccgagggcgcgactattcgaatagattatactctgatcagaggtgtacatctttacccacaagacacatcttcctcacgtgtaaccacgtgccacataccaccacggtatacggacggaagacgtgacatagtttccaacccatcctagccatagacaagagtaccgacccaaccccacctacggccggaacccccgggacaggtaggcaggactgagcccctagcagcaggacaccagccctgtgccatgacatctcgactaccgagccgcagctcgtgtagccttcatttgccctagagatgtccatcgacccccgacttcgtccatctccatccgtgtacttttgtttataaccagactgagccacaaactaagccttacccactagacatgtggaagtacggtagtgctttgcaacagaggcccgaagaccggtccttatatggccgaggtgctactatcaaaaccatgcaccccgagcccagcctaaaaccattttgaggattttgaatagagggggaggtgtgaatccaattccataataatccatccattccatgttcaggtgatgagaatattcccaaagtgtagagttgtaaaaccacctaatgttgcctaattaaccagcgaagcatctacctaaattcatactagtggttaccatgagtagagtgcccactagttggggttttgtttattctagggtgaacaaggtattaatatcaataacaataataataaggtcataacaaaggtaaataggcatggctaaataaaacagtgataacgcgggaatttaagtaaagtggtaatgcaataatttaaatcaaaataattttataaactgggattcaatatgctcaaggatgatgtgacttgccttgctcactttcccaaacgtcggcttcaacctccacgaagagcggatcttccgaagctgcagcatctacacgaccatcggaaaagaaaatgattttactctaataaactccatataactagcaagaacaaagcacaaaaatgggttcttgacttcttaaggaaaaattagagacttaaatgatccaattccgagttcaaatggccaagttatggccatttgaagtttatatgctctttaaatgaatatttgcgaatttcttcatttaaattttaatttaaaaagggtttattgcgtcagccgagggggaggggcgcgcggaccgggtccacgggagtggggcccatgcggcagcctcacgatccacggtggatcgggtgcacccgggctcacaccggccggcgccgtgggccccacgcgtcagccgcacccgagggcgcgggcggctgacggccgggccccacgcggtccacggtggcggcacggctcggctcaccctaggtcgatggcgacgatgaaaaaggcggccggagcggaggaaggtggcggcacggctcgggtcgacggggacggcggcgctccggcggtcggcgagatcgacgagggggtggacggggacggcgacggtacacaaacttatctgtgtataaaatcctcgtccaggaatcagccgaggtacacaaactgacaatttaatatacaaatccatcataataataacgttacacacttacaaaagaaaagaaaacagcagcggaataacggtctagcgatggcttcagctccactcccacaggcagctcaactggggtataagccaaacgtcttctccttcgcaacttgtcttcaactgaggttgattgattattgcaagaatgagcatatgacatactcaacaagccacacagcaaatatgcaaatacacaaggataccaaaggatggcacaatatagtctcatttgcgaaagcagcatttagcaaagagttaagagtagtaaaacagtagagtaattaatcagaaactttaatcaacactgaacaacacacccatgctgcacaggcccaaccatcctgaacaaccatacccggctgtacagatctaactccaaaccaggagctaaacaaattattaccagttatagcatcaataattattgtgagaggtgtgagactaatcacgaaaaacattgctcaacccgcccataacttgggcacggctattcgaatagttttactctggccagaggtgtaccactgtacccacaagacacagcctcaacatcatgtctaccatgcatcgcgatactagaaagtacccgaatagaggctgtgacaataccctctgcacaacacaactcaccatagtgcaccattcctggatcataatcacccccttataaaacaaggcttggactccccagtgacccccgtgggcttatctccgccacttctcagtctggtgctccgcaatgaaccatgctatacaaaaggtaaagccgttgcccacgctggcttgtggttggcacggttaatgtttcacaacagtagctcgcgaaccggtccttaattgccatgagtacgaccttcaaaaccatgtgctcacaacccaccattaatcatattttaattaccaattaattatcataacacgattaaccatcgtgagataccattaaatataaccataaataataatgtagtatatatgattcatcccattagtgagctaatgtttctaagcatggctaagcaattatatctaacatctagttgaaccaatatatataaagctcaactagtcaaattataatatcccaaggtatcaaggaatagagtaatcaatgcaaacaggccataacaaaggaatagattcacaccacctagtgacattcgaaaataaatgcacacttgaaatacatagagaatttaaatataggatcaacatgctcaaaggattgtgtttaggatctgtgtgacttgccttgcaataatcggtcttcaattaatcttctgaacactcccgacgcactcacgaaccttcgcaacgacagaaacgacaagctaacacacaaaacgaagaaaaaaactaataaaaccaaataaacagtacaaaaacaagcataaacagtacatgtggatatttttaacatgtagatctcgattttagatgaatttagcaacttgaaccagtcgaatacaagttacgatgatttagttatgaatttccgaagatttaatctattagataaaaaggaaaaagaaaaacgatgatgacgtcatgatgacctcatcaatggccggaccaagatggcgacctcgccggagattggatggtcggctgcgactttggaggacatgtacacgtagaggacgacgagacgaacccaacggtactcaccctcgaaccaaacgacgaacgacgacggccggcgacgaggtctagccgcggcgcggcttcggtcgacggcggcgacggggctccggtgaccggcgacagcggggagggagcggccgagcttgcccacacctcggcgcaccttacggcggtgacggagaccgacggcaacggcggaggcgacggcgcgacacggccgaagttcggccggcggcggcggcgaacttggcggcggcggcggagaggatacggggcacgggagaccacgggagaggggcaaacgaaagaggaggactagggggtcctatttatagccttggattgaagagattggactcctcccgcaagaaatcgatccgggaaatcaaaaactcggttttggagataaactcgaaaacgagttcgattcggataagatactcaacgattagctccgatttttggggtaaagatagaggaggataagaggaatatttcccctcaactaaattggaaaaaggagcaacggggaggcgagatttggaaggaggatgcggcggcactgtgcacggcacggctggctcaggctctgcctgagctggaagatgaacagtagcgcagggacgaaaagtagacttttccggctgggctgagaggagaggaggcggctcaggttgggccagcgtgggctgcacagcacgcgcgcgaggagggagagaagaggaaggaatggaatgggccgattcagcctaagacaagggaggagaattttattacttttccaattaaaataatcacttaaatgatctttgaattgttaaaaatacttccaatgctcaaataatttcaagaaaaatcctgaaaatacttggacactcaaagtacttaaaaaaattataattagaccatttaatgattaatttaatatgtgggtaattactgaaatgctctttgtatgattaaaaattaggaattgagctccgaaaaatccgagaatattccagagagtataattaaccatggataatttaataaaaaataaatccatccatgctttatatttaggaaattttatttcccacatttaacttcacttgtaaattaatgaacatttaatataaattctaataataatttataaatcctgaaacaaaaatcaggatgtgacatgagaggtgaattggcttccccgatcagatacaattttcttaggaacgccatggagactcacgatcctagcgaagtagagttcaactaatttgttccctccataggtggtcttcagaggaataaaccgagctaccttggttagtcggtccacgactacccatatagaatcatatccgccttgggtttttggaagtccggtgatgaaatccatcccaatttcatcccatttccattctggtacttggagaggttggagaagtccggccggtcgttggtgctctgctttgacacgctggcacacatcacaaagggccacgaactctgcaatttaccgcttcatactaacccaccagtatttctctttcaagtctaagtacatcttcgtgctgccagggtggatggaataaggactttcgtgagcttcctgaagtatcaaccgtttaagttccttgtcgtccggtacgcatacacgatttccgttccatagggttccgtgttcatcttctgtgaaaccagcagctttacgctgtttcatattcttgaggatcccatgtatatctggatcattcttctgagcctcgcggattcgatcgagcaaggtaggcttggcttccagcgtagccaagaatccacgaccaactatgcttaggttcagggcttccatctgttgattaagttccggtggaatgccacggatgccaagagtgttgcaatggctttttcgacttagagtgtcggcgaccacgttggccttaccaggatgatagtggattcccacatcataatccttgatgagctctaaccaccttctttgccgaagattcagatccgactgagtgaagatgtatttcaaactcttatgatcggtatatatttcgcagcgatttccaatgagatactgccgccggatttttagagcatgaaccacagcggctaactccaaatcatgggtaggatagttgccttcatagggccgtagctggcgtgaggcataggctaccacatgacctttctgcattaatacgcaccccaatccttggcgcgaagcgtcacagtacaccaggaagtccttgcgagtatccggtaagattaacactagcaaggaaaccagcttttctttgagagtttggaatgctttctcgcattgagggctccacacaaatttttcttccttcttcagcaactgcatcatgggtctggcaattttggagaaattctcgatgaatcttcggtagtatcctgccaaacccaaaaaactgcgaacctaagtgactgtcttgggttgcttccaatcagtgacggcggtcaccgtttcgggatccacaacaactcctttagcagatatcacgtgccctaagaacttgacttcgggcaaccagaactcacacttgctgagcttggcatacaattggtgttcccggagctttcccaacactaaacggagatgctgctgatggtcttcctctgattgtgagtacaccagtatgtcgtcaataaagaccacaacaaacttatccaggtattccatgaacactttgttcattaagttcatgaagaaggcaggagcattggttagaccgaacaacattaccgtgaattcatacagtccgtattgcgtggtgaatgcggtcttcgggatatcctcttcacggatgcgcaactggtgatatccggaacgaagatcaatcttggagaatacagtggcacctttaagctgatcgaacagatcatcgatccggggaagagggtacttctttttgatagtaacttcattgagagctctgtagtcgacacacatcctctttgtcttctctttcttctccacaaaaatcacgggagcaccccagggggaagtgctcggctgtatataccccttttctttcaactcttccaactatctcttgacttcggccagttcatttgccgccatacggtagggtcgcttgtacagaggagcggttcctggagcaagatctatctggaactcaatctctcgcttgggcggcataccgggtagttcttccggaaacacatctccgaactcactgacgatgggtatttctggcaatcctagctgatgaagtactgaactgccggcggaagttgggggtgcaaagaaaacaaccggttgatcagggccccgatacacagtgacagtgcgccttgcgcaatccactactccttggaattgagccaaccaattcatcccgaggatcacatccaagttcttggtgtctagaagaatcaaatccgaggggaaagcaattccctggatttctataggaacggcagggctataatactttgctgtcataacccctccaggggtggtgatgagcagagggttcctaagcctttctacccccagctgatttctccccatgaatggcacagatataaacgagtgggaagctccagagtcgaacaaaatggtagcagggatggaatgaatgaggaacgtaccaacgatgatgtctggagttctcagcacatcctcggcagtcacgtggttcacacggccccgagtgacatccttaccaccgttgttggggcggggaggcgcttggccttgctgtcgcctcggctttgggcatttatccgcaaagtgcccgggcttgaagcagttgaagcacagacactgttgaccttgagcatccctgcggccttgtccaggctgcacggctggtgcaggagggcggggtgcatgggccccttgctgattctgctgctgctgcggctgtgggacgcgcaccacgaattgaggtcggagcgcggagcggggttgctgctgcggctgcgaggaggatccccctggatagggattggtgtagcggatcctttggttagccccctgttggttgcggaaattcgccaagcgacgcttgtgcgactccaattccttgtgcttggcttccaggcggatgctcttgtccaccagggctggaaatcaggatagtccccggagaccaaacgaacagatagctcagggtccatccctgccaggaatttctcctgcttctcctcatcttcacgaacatcctctggggcgtaccgggccaaattattgaactcgtgcaaatactccatcacggagcggttgccttgtttcaactcccgaaattccctcttcttaagggccatgactccggcgggcacatgggtcctccggaaggcggcggtgaaatgggcccaggtgataggctgtccctctggctgcgtagctggaagtggtcccaccatagagatgctgtcacgtcccaaaacgaccctaaaatatatcctctaaattatgcctagaataattaaaatccgtgtgaaagcctccaacaattaaaatgtgcaaagttaaaagtcaaataaggcttagaggatttttgtatatttcctaaaagcctaaaatgtgtaaataaattttagtggaattttcagagcacaaataataattattaagaaataaacaaagttaaaatgattttataaaaagaaaaaccctaaaatccctccttctctctaatgggccgagttcgacccatctccctccccctctctctctcct

SEQ ID NO: 6414 - DNA, 2676 bp, Oryza sativa
ccctttttaaaattaaaaatttaaataaagaaattcgcaaatattcatttaaagagcatataaacttcaaatggccataacttggccatttgaactcggaattggaccgttcatgtctctaatttttccttaagaagtcaagaacctatttttgtgctttgtttcagcttgttatatggagtttattagagtaaaagccttttcttttccgttggtcgtgtagacgctgcagcttcggacgatccgctcttcgtggaagttgaagccaacgtttgggaaagcgagcaaggcaagtcacatcatccttgaacatattgaatcccagtttataaaattattttgatttaaattattgcactatcgctttatttaaattcccgcgttatcactgttttatctagccgtgcctatttacctttgttatgaccttcttattgttattgttattatttccttgttcaccctagcataaacaaaaccccaactagtggacactctactcatggtaccactagtatgattttaggtagatgcttcgctggttaattaggcaacattaggtggttttacaactctagactgtgggattttctcatcacctggacactatggaatggttggattattgtggaattggattcacaccgccccctctattcaaaatccccaaaatggttttaggctgggttcggggtgcatggttttgatagtagcacctcggccatataaggaccggtcttcgggcctctattgcaaagcactaccatacttccacatgtctagtgggtaaggcttagtttgtggctcagtctggttataaacaaaagtacacggatggagatggacgaagtcgggggtcgatggacatctctaggacaaatgaaggctacacgagctgcggcccggtagtcgagatgtcatggcacagggccggtgtcctgctgctaggggctcagtcgtgcctacctgtcccgggggttccggtcgtaggtggggttgggtcggtactcttgtctatgactaggatgggttggaaactatgtcacgtcttccgtccgtataccgtggtggtatgtggcacgtggctacacgtgaggaagatgtgtcttgtgggtaaagatgtacacctctgatcagagtataatctattcgaatagccgcgccctcggttatgggcaagcctagcaatgtacccaagttagtgttttaattcttaaaacatgcttaacaactaaaatgtggaatggttggcctgggttggcttgggacgagctgggacccagggtcgggttgccagttcggtccaaatcatcgtaggccttgggttaaggcaggttcgtgtgggttcacggcccttattaattatcttgtatagctctaggagcatatttacaaaatagctttcagcaactaagtgtcttttaatgctgtttactgcaaaccctaaccccctatattataactcccttgtactcccatgcatttattctgcacttgtgggtgtgtcttgttgagtacggtggttgtacttagtcttgctcattttttcccaaacccagaaaaggagttcctggatgatgaaggctttggtttctagctcgtgcctgccgtcaagcgcctgtggtcgtcgccctagtcttccgctgtttttcgtttgtcttcttgtgtgctgggccttcgccgcccatgtaataaattatctatttacgcttccgcttgttaaactctgaattgtatcaacttttggtgtaccttggctcctgggacaaggaataatacacgcacgtaaggaacgcccgttgggttatttccggtcgtgacatgccacgtttctgccgcctcaacctattgttgatccaatacagcagcagccgattcagcagacacccccaattcagcaggttgtgcagccaatccagcaacaggtcatgcaaccagttcagcaaacaccaccaaggcagcagcctctgcagccgattcagcagacgccgttaagacagcaaatcgttcagccggtccagcaccaaggttcaataggtgcatcggccgggtttgcaacgcctggtggtcagcctgtacaacaatttttaaatcaagttgtcccagaacacttggttcaccacgtacagccggatggcacagtaatacctcaagttgttcctgagcatttggtacgtaatatccagccgaaccttcataattaccaagggggtaacttgaattaccaatatcagcctccttccccgcaagcccaatatcagctagggggattggctcaacctcagtttgcgcctcaatatggtcagttcgagcccatgcagcaacagtcacaaggggtagctcagcagcgaccatgggccgatgtgattgctgacgtaatgagggaacagtttgggcttaaaccaaaagagactggaagcttgtatcggcagccttaccctgagtggtttgaaagagttcctcttcccaatcggttcaaagttccggacttctccaaattttcgagacaagatggtgtgtcaacttatgagtacattagccgattcttagctcagtgtggtgaagcatcggctgtggacgctctgaaggttaggttatttcggttatctttgtctggatcggcttttacttggttttcctctttgccgtattggtcgatcaatagctgggccgatt

SEQ ID NO: 6415 - DNA, 852 bp, Oryza sativa
tcccgccggcgccattgatggagcccgagagcgccgcgccggtttccttccaaccctatttgaaccctccccgcacctcctccgtccgtttccgcctctcggcgcccttcctcctcgccggatttgagctcgcgacgttgctctctctctccgcctcgccgccgagctccggtccgtctcccacctcggcgccgcctccttcggcttcgccgcatcctcgccgacctcgtccacctctccgtttcggtcgccgaccgccggagcgccgccgtacccgtcgacccgagccgcgccaccgcctccctccgctccggctgcctcctccgtcgccgccgtcgccctggggtgagccgtggaccgtcgcctcctttcccccttccctcccctctctcggccgccgctccaccgcgccggtggtcagcggcggcgaccatcggggcgcgggcgcgccgcctcccgccgaccgcgccagcgtggccgccctcgtgcgcgccgagtggctgccgcgtggggcccggccgtcagccgcccgcgcccttgggtgcggctgacacgtgggacccacggcgccggctggtgcgagcccaggtgcgcccggtccactgtgggccgtgaggctgccgcgtgggccccactcccgtggacccggtccgcgcgtcccctcccccttggctgacgcaataaacccctttttaaattaaaatttaaatgaagaaattcgcaaatattcatttaaagagcatataaacttcaaatggccataacttggccatttgaactcggaattggaccgttcaagtctctaatttttccttaagaagtcaagaacccatttttgtgctttgttcctgc

SEQ ID NO: 6416 - DNA, 4968 bp, Oryza sativa
cagagatggcacgttagtcctggtcagatatatgccaggcttcatcctaaccattacaggcaagatgttgtgtgaagaagggtgagcatgtaggttgctaagctgacacgtggtggacaagaatgaccgacgtgactggtctgataccggtcatgtcgtcagcagacagccacgattccacgtcgtgcctgcttccggcggaagtggaggtaggtatgggccgtcccatcagaaggtcattcggacggcaaccatacaagtctccgtctgtttatgaaaaggtggggtaagtcccccacaaaaaagagagaaatggtgcatgtggtatccccttaagatataaaaggaggaccttgcccactgagatgtggaactggatttttccagattagaaacccagaacaagggagaggctggctcatactttgtagctcctttatacacagatctcccaaaacacaggagtagggtattacgcttctcagcggcccgaacctgtatacatcgcccgtgtcttgtgtgtttctggtctcgcgagccttccacatacagagagcttagaatctctccctgagtccccggccgaaccggcaaaggggggcctgtgcggtctcccggtgaggagccccacgctccgtcatctggcgcgccaggtaggggactctgcgagggattttctgagctctcgcactctttcgtgtgcgccaagcttttcctgttcagcccaatggccgagccagcaaaggcgcacgacctctccccgagtatgagcggtgacgacggggagccaaacccacgtcgtcgagctcgtactccaccgccacctccacgccaaagtcctaggcgggagaaggcacttgagagggccgaaggatccgcgacttcgacatccacaggaggtggagaagggcggcgagatgaggagcgtcgcctcctcgtctacggcaacggcagcacgccccagggcgcgctccaagctgcgggcgcgctcctacgtcacccgcccgtcgcccatgacccggagtctccagcccaacgttggctggacgatgtggccaaattggtcatgactgcacggcagcgcctagatgctggtgggcagtcctccgccaccaaggcctctggtgctgctgccaccggctccgcatcgtcaagacggagggcgcggcgagcggcagccgctgttcgccattcggccgccactccttcgtcaatggctccgacccgggaagatctgcgtggggaaccggatgcccgcatcagtatcgagcgtcggcgtaatggccgacgtgctccccacgcaaaggagggcgcctcctcgtccggagtgtcgcctcaccacggacgcggggatcagccctccgtgcccccggttggtggtgtcggctgtagagcctttgtggcgagccttcggaatgtccgttggcccccaaggttccggcccaccatcgccgaaaaatatgacgggagcgtcaaccccgccgagtttctccaggtctacacgaccgggatcgaggccgccgggggtgacgacagggtcatggcgaatttctttctcatggccctgaaaggacaggcgcggggttggctaatgaacttgccacccgcgtctgtccactcttgggaggatttgtgccaacagttcaccatgaactttcaaggcacatatccgcgcccaggtgaggaagcggacttgcacgcagtacagcgaagggatgatgagtcacttcgctcgtacattcagcggttctgtcaagtccgcaacaccataccatgcatccctgcgcacgcggtgatttacgcgttcagggggggtgtgcggcacaaccgcatgcttgaaaagatcgcctccaaggagccccaaactaccgcggagctttttcagctcgcggaccgagtggctcgtaaggaggaggcatggacctggaacccctccggttccggtgtggcagcttcggccgcccccggatccgccgctcagatagggcggcgtgacaggaggaggaagaagaggtcagcccataccgacgacgagggtcatgtcctcgccgtcgagggcgcttcgcgggccacccgaaaggggaggcctgcgggaggcaaaaaggacgaggccggcgctcccaacagggaacgcccaaccggcaagtggtgcaccgtccacaatacttcccttcacgacctcgcggactgccgtgcagtcaaaagtttggctgagcggacgaggaagtgggaggaggagaggaggcaggagcgccgagagggcaaatccccggcggttccttccggtaatcggcgaagtgaggccaagcagaaggcccccgccgaggacatcgatgacggcaatgatgacctaggtttccaagagcctggggccaccattgctaccgtcgatgggggagcgtgtgctcacgtttctcgccggagcttcaaggccatgaagcgagagcttctggccacggcccctactcatgaggcgacgcgccgggcgcggtggtcggaggttgccctcaccttcgaccagaccgaccacccaccgtgcgttgcccggggagggcagattgcgatggtggtttctcccaccgtttgcaacgtgaagttggggcgtgtcctcattgatgggggagcggccctcaacatcctttcccctgcggcctttgaagccatcaaggccccggggatggtgctccggccgtcccagccaattatcggtgtgacgccggggcacacgtggccgttaggtcacatcgacctaccggtcaccttcggtggatccgccaacttccgcacggagcgggtgaacttcgatgtggcggacctcagtctgccctacaacgcggtcctggggagacccgcgttggtgaagttcatggcggcggtccactacgcctacctacagatgaagatgtcgggccccggtggccccatcactgtccatggcgacctcaaagtcgcgctcgcttgtctggagcagcgcacggaccacctcgccgctgcatccgagcccgagggtggcgacaagaggcttggcgcctccgcccccgccaccccgaggcagcggatgatcacaggcaacgaggtcccggtcaaggaggttgccctgggcgacggcccgtccaagaccacgcgctcgtctccttcctgcgggcaaacgctgacgtcttcgcatggagaccggcggatatgcccggggtccccagggaggtgattgagcaccgtctcgccgtgcggccgggcgcaaggccggtccggcagaaagtgcggcggcaggccccggaacgtcaagccttcatccgcgaggaggtggcgcgacttctggaagccggattcatccgtgaggtcatccatccggagtggctggcgaacccggtggtcgttcccaaggcgaacggcaagcttcggatgtgcatcgactacaccgaccttaacaaggcatgtcctaaggatccttaccccctgcctcgcatagatcagattgtcgactccactgcggggtgcgaccttttgtgttttctatatgcatactctggttaccatcagattcgcatggctagggaggatgaggaaaaaactgcgttcattacccccataggaacctattgttatacgacaatgcccttcgggttaaagaatgcaggtcctacttttcaacgtactactcgaatttctttgggtagccaattaggacgtaatgttgaggcttatgtcgatgacatggttgtgaagacgcgcaaccaggaaatgttactctcagatctagcggaaactttcgagagtctccgctccgcccgcataaagctgaaccccgacaagtgcgtgttcggtgtacctacgggcaagcttctcgggttcttggtcactgcccgaggcatcgaggccaaccccgagaagatacgaggctatagagcgtatgcgcccccccagcaaacttagggatgtgcaatgcgtcaccggttgcatggccgccataagtcggttcatatcgaggctgggaaataaggcgttacccctatttaagctcctcaaatgttccgggccgtttacttggacggaggaggctgaacgggccctcactcagttgaaggcgtacctcagttctcccccggtcctggtcgccccgaaaccagatgaaccgttgctactttacctagcggcaaccccgcaggtggtcagcgcggcgttggtcgtggagcgcgacgaggacaaccctcgctccgcgcacccccaccctgtatcgactcgacccgggagagagcaaggaggagagggccccgagccgaacggcggcccgaggcccccgacggccggagctggccctctgcccgcttgtctgacggtgccaggcgcccccgaccctcaggatggccccggggccactgcgggaaggccgcgcttgtcgccctctgaccccgaggtcgtcggcacagaagccgagtgcgccccgcgcggcctctcggacgaagagcaccctgtatcgactcgacccgggagagagcagggaggagaggccccgagccgaacggcggcccaaggcccccgacgaccggagctggccctctgcccgcttgttcgacggtgccaggagcccccgacccccaggatggccccggggccactgcgggaaggccgcgcctgtcgccctccgaccccgaggtcgtcgacacagaagccgagtgcgcctcgcgcggcctctcggacgaaaagcaccctggagatgcggctggcgaagaggatcgccccccccgaaaggtgcagcggcccgtctacttcgttagtgaggccctccgggacgccaagacccgataccctcaggcccagaagatgctttacgctattctgatggcttcgaggaagttgcgccattatttccaggcgcatcgggtcacagtggttacgtcttaccccctcggccaaatcttgcataaccgagagggtactggacgggtggtgaaatgggcaatcgaactctct

SEQ ID NO: 6417 - DNA, 6023 bp, Oryza sativa
acgccggctccactagggacgagtgtcaagaggctctcatcattcgaacgggacggggcgaggcgtgtaccaggccgcctgctgccaccataacccgcgatctgaccggtctgtgaccggtcacacactgcgaccggtcacggaccggatatgcgtgcgccgtgctgcattaaatgcggcgtggcgcgcttgtccattccgcaataaaagtggtttggtgagcgccgctgtgcccacctaacccacacccgtggcgccaataccacagggggtcggggcgccccagccctcggggccgaaacaggagcggctcgacccctcggggagacagaggagggggtgggcacgtccccctcgggcccgaccctcccgagggggttaggccacgtgggtgaccgcagctgcccaagcctctagtcatgatactcccggtcccatgtcaccgacagtagcccccggcgttatgccagggcgatcgcccccctcgagggaagcgctcgggcgtgacgccactctttagacctggtgacaggtggggccgctctctacaggcgggcaggaacccagcggtcgcaaatcgcgtgcatcggctagggaaaaacgaccgataacaatgagtggcctcttcaagaccgttacattactcgagtagcgcgcgaatcgggacgagcaggttcatttcgcctggagatatgatgatggcgcttcggtcggcgagcgtagttaacacgcgcacgatatgtcccatcttgactgccacggccgcacatccgcctcgtgcgccgcaaacggacgagtaggattagtggaggcgtgggcgcgagaaacgagggggcgagatagtgggcgcgagaaacgaggagccgggcataacgttggcaagggtataaaggcgccaaggaagagattcgtttccttcctctcgccattattccccttgccttagccgcttgcgccctaactccttgtttcctgtgccctacccttgccgcactcactcgttctcaagctcctcctccgccggcgtcatggtacggggctccgcaccgctcgacggtagcgtgctgacgccttcccgcatcgtgagcgagaggcaggccgggctgccgtgccgattcatgccggaatctgccaccggccgggaggtggtcgcgctgggtgagggacgcccggcgccacactacccggggcggtccgtcttcttcctctctttcgcaatggcaggactggttccaccattctcttctttcttcatggatgttctggaactttacgatctccagatggcgcacctcacccccaacgcggtaatgacattggccatcttcgcgcacctgtgcgagatgttcatcggggtgcgcccatctctccggctgttccggtggttcttcaccgtacagccggtgtcgccgccgtcggtagtcggtggctgctacttccagccacgggggccggtgctgaaccgctacattccctgcgccctccgcaagaagtgggacgactggaagagcgactggttctacactcccctcgccgatgaaacgcgcctccgacttccgagccagcccccggcgcaggcctccagctggcgggcgccggtagatctgggggatggctatgacgccgttcttgaccgcctggcaggtctgcgatcccaggggctcacaggggccatggtgtacggcgactaccttcgtcgtcagatcgcgccgctccagcgacgcgctcggggcgcctgggagtacaccgggtccgaggactacatgaggacccaccaggggggcagatgggattgggctcctgaggacttcaagatattggtccaacgggtgctgaatctcaactccgtagaggcggccctcattccccaaggaatcctccccctctgcagcgttccagaccgcgcctccatcctgaccattatgatggcggtcggggcctcagaggagcgagctccaaagggccacgacggcgcaggcgggagccgcaggggggaacaatttaccccgagagggggtcgtgcttctgggtcccgcgacaggggcccggggagcagccgccctgccgacgcccgggggaagaggaagcagggaggaacacctcctccatctcctccccgagggggcggggcggcgcgtgtcagcagcaggcgcccggagggggccgcgccaacatcgcagcccgagggggagcgcaagaagaagcggccccgtaagatgggggagacagaaccatctcggggaaacctcatttcccctccaaagtggtcgtttaaccgaccccctcgcaggttcgtctctcacccatcgtgactgtattctcttaacgcgagttttcactcacccatcttgttcgtcttctggttttttcttttgtttcagcgagatcccgtcgcgtccctcccgccattccaagtccggccagtctgaggccgaggatccggcggccgtagaggccctcaggcgggaatctgaccggcgagaggccgcggatcgcctacgggaagccgaggaggccgcccaggaggccgcccgggctcgccaggccgaggaaaccgctcgggaggaggccgcccgggcccgccaggccggggaagccgctcgggaggaagtcggatttcgccaggacgaggcgatggcgacttctgaggcagctcgcgacgaggccgcgggcgcgtcgcttgggcccactccctcgggcgacgctcaggcgacaacttctggggcagctggcgacgaggctgcgggcgcgtcgcttgggcccactccctcgggcgacgctcaggaccaaccgggtccgggggacatccccgagtccggcacttctatcggcggcccgaaccgcgtggcatcctctccaaggcggctctgccccacgccttctatcgccccactgaacgcagagccccttctgcaggccttggctgccgcaaacaccacggtgttggatgggttaagcgcccaggtggaggtcttgcaggcagagcgggcggagctcgacgccgcgtgggcgcgtgtcgaagaggggcgacgctcggtggaggccatggtggaggtgggccgtaaggctcaccgccggcacgtctcggagcttgaaacccgtaagaaggtgctggcggagatcgccaaggaagtggaggaggagcggggggctgccctcattgccaccaccgtgatgaacgaggcgcaggacaccctccgccttcaatatgggagctgggaggcggagctaaggaagaagctcgacgccgcccagggggtgcttgatgctgctgctgcccgagaacagcggcggcggagaccgaagcggcgtcccggcagcgtgaagaggcccttgaggcgcgcgccatggcgctggaagagcgcgcctgcgtcgtggagagggatctggcggaccgcgaggccgccgttaccatccgggaagcaacgctggcggcgcacgaggctgcttgcgccgaagaagagttcacactccgcctccgcgaggacgcgctcaccgagcgggagcgagctctcgagggggccgaggccgcggcgcaacagctggcggttagcctgtccctccgcgaggcagcgcaggaggaggaggcacgccacaatctggaaggtgcccgcgccgagagggccgtactgaaccaacgggccgctgagctcgaggcgcgggcgaaggagctggacgcgagggcgcgcagcggcagggcggccacgggcgaaagcgacttagccgcccgcctcgcagctgccgaacgcaccatcgccgatctgcagggcgcgctggacttgtccgccggggaggtcgaagccctccgcttggcaggcgaggtagggcccggcatgctttgggacgctgtctcccgcctagattgcgccagtcggcaagtgggcctctggagagggcggaccgtaaagtacgccgacaaccagggaggcctcgcccagcgcctctagaagatggccggggctctccaacggctccccgaggagctcgagaagacaattaagtcatcctcgagggccctcgcccaaggagcggtggagctcgtcctggcgagttaccaggccagggaccccaatttctctccatggatggcgctggatgagttccctcctgggaccaaggaccgcgcgcgcgcgcaggtccgggattcctccgaccatatcgtcgacagcttcgagggctcggcccctcggcttgcgtttgcccccaactccgacgaggagggcaatgccggtggtgcagacgacagtgacgtcgaggccggcgatccgggcgcatcggattgagcccccagacccccgccattcttcagttttttcttcttttctttcttctaaggccttcgggcctcttttttgtatagatcaacttaatctgtaatcaaaaatgaagaaatttttgtgttaatttcatcttgctgtgagtatgagatgaggatgatctgtgccgtggtccttttgtgtcttagcttgaataagggctcgtgcccaggttctggtcctcaaaaggcgcgggtcggggctagtgcctggggagatccacatgtcgagactggccaggccgggaacgtggtgaccgagggttatgggtgacccgattgtgggtttttgccgattccccccccggagttcaccacgcctcggggcacggctcggttctgggccccgttcggcgattttagccgacccgagcccccgagggcaggattgagcacgagtgacctatttcaagtcaagattcttcaaaaggaaaaaacagtacagatacagcctttaggaaattgaaactgcttttattgaaatacagatgtaagagaaataagaatatgcatatgttgtaggccccggccaaccctgcacgcccgaggggggtgcggggttggcccgagcccgaaacctgacacccgaccccccctcaggggtagaagcgacgaaggtgttcgatgttccacgggttaggcagctcagtgccgtcgcccgtggccagccgtatggagcccggccgggggacgccgaccactcgatacggaccctcccacattggtgaaagcttgctcaatccagcacgcgtttggacgcggcgtaggacgaggtcgtcgacgcagagtgatcgggcccggacgtggcgctgatggtagcgccgcaggctctgctggtagcgcgcggctcggagggccgcgcgccgccttcgctcttccaagtagtcgaggtcatctctgcgaagctgattttgatcagcctcgcaatacatggtagcccgaggagacctcagggtgagctcggatgggagaaccgcttccgcgccgtagacgaggaagaaaggcatttccccggttgctcggcttggtgtagttcggtttgcccagagcaccgctggcaactcctcgatccatgaatcgccatacttcttgactatgttgaaggtcttggttttaaggcctttgaggatttccgcattggcgcgctccacttggccattgcttctggggtgggcaggtgaggcgaagcagagcttgatgcccatgtcttcgcagtagtcgccgaagagttcactagtgaattgggtgccattatccgtaataatacggttaggcactccaaaccgggccgtgatgcccttaaagaatttaagtgcggagtgcttatcgatcttgacgaccggataagcctcgggccacttagtgaacctgtcgatcgcgacatacagatactcaaacccgcccggggcccgcctaaacggtcccaggatatcgagtccccaagacagcaaatggccacgaaaggggtatggtctgcagggcctgggccggctgatagatttgcttggcgtggaattgacacgctctacatcgccggaccaggtcgaccgcgtcattaagagctgtggggccataaaaacccttgcgaaaagctttaccaaccaacgttgccgaggcggaatgggctccccattccccttcattgatatcggcaagaaagcacaacacctttgttcccgaggaatgcacttctaggaggattccatta

SEQ ID NO: 6418 - DNA, 4686 bp, Oryza sativa
tgcatgtagtttatttagctgtcgttctagcataggcgtccacgccatatcgatgttgtaaagtctgatcctttagtcataagttgcttttttttaatagaaaaaggtcagagacctggcttctattgaaagcccgaaggttgtgctgggaaatccagacattagtttacaacatagggagggcgagacctctaacaaagtgcaaaaggactcgagcaagctaccacctctaagaccaactctaagacaaaagagacagtagggactgctgctaaacatagcagacatcagataagaaacacacaaccaagacaaaccaagacagaagacaggcagaactgtggcaaccaagacaactctaaaaacaaggaatcaacctatccccaatctattacttccagtattagcagcaacgatcttcatcttctcttctaaatccatcatcctgtcagcttcttcagcacgccctaaaatcttccactgcagtgaataagaagcaattcgaaaaggaagcattaggggagagtaaaccaactggaagatataactttgactgcataattctttgtataaattgaaaaaaatgttatacaagtaatttatatatttaaatgtagcaaatttccaaaactacatgacatatgtatcgcaaaattactgatttaagttccactgttacaaaactacgtatttaaggtacaatatagcatacaactaaagattcgattgtcaatttagctatgagagaaccgcatattttagatattagatctttggcattgttgttcttatggaacttttagaatatatatgtagttttgtgaaaaaaatatcactaattaaatatgtagtttctttaaccaatattttcatgtgtagtcttgttataaatttacttttaaagatatggttttgtgatagacattcttctaagtttgtagttttacgataaatttgcttctaaaatactcccttcctttcatattataaagcatttgactttttacctagtcaaaccaaacttatagaaaaatgtagtatttttcaatacaagacaaacttatgaaagtatagtcaatgttagatttaataaaattaatttgatattttagattcttctataaacttttttttgagaattacacagtacaatgcagacactcacaacgcacgcacactcacccctatgaacgcacgcaaactctacccctatgagtatcttcgaagactgggccggcaaatccatcctatagattgataaagtcaacacagacgccttgctgtcgacgggtacatcgcctaccactgaaaacacaaagccgttaaagccaattcgttttcatggggagtcgaacacaggacaatcaaatatgtacattatagattatgtcaatatcctaaatgatacgtaaaaagagaataggagagtatatacgttatactacattttcgtcataaacatttgtgtttggaacaaaatttggtcaaaattgtaaaacttaacatccaattttatatcagaataagcttataaagtttaataagttgtgttagtattcttcaacacaaatttatgcgcatattttctattaaaactacgccatttgagaaagtactaattatcaaagtttcaaattttaaatcaaatcttaatcatctaatgtttatgactagctaataacatgagttctttcacacagtacctacaagtcccaacaattggcaccatcgagtactagtacccaaggtttaataaaccgttttagatggggttacgaccaccccgcggtttggcggttatcattggcaccatcaagaactataacacagggcttaataaaccgttttggatagggttaccgtcacctcacggtttgacggttatcacggtaaccgcgaaaaccacacggttatcgtgaagtataccgtggctttaaaaactgaaaagattatcacatataataaccacagtgaccgtacggttttgttaaccttgctagtaccactatactacgacctacaacactcagatcttcagtaaatacaactatatatcaatcgataatctgtcatcgatttttgccgacaacggtgtattgaagatcttttcagcagattgagtagcgccatttttatttttatttttaccgtcagaaaacaaccttcttctattaggtgttgtggtgtaatatgcctcttatactcaccgataatgacccaaaaactttatttcctttcatccatcaaatctaacataaaggagagtccaacgttggacgtaacgcacgaggcaggttgcttgggcgttggcttccacaatgcatcaggagggggcaatgggagtattccgttgagaaatgtggacagatttgagatcagatcatgcacgcagcatcagttgctgcaggttgtaactcaagcagattcgactttcgatccacgagaagattgccagcgtacggtatgattaagtatagctttagtggaccattcgatatttcgattggtagtgctgttagtgtgtatctggttgtccagcctaagcctccgtaaatatccataacctgtcttccacttaattctccccctccccccccccccccccttttgttttttatctctactattataaaaattgaaaattgaagatgtttttaccggtattttgatacgtcatctatgagtcggtttttaagttcgtttgcttttgaaaatacatatccgtatttgagtcaatttataagatattcacttttggtaatacagaaggaatcatataagaaatctatttaaaaaaactagtatgctaacttgaaacgatcagactcctaactgcagctcatgattttctaaaaatatatatatccaagagatctcacagtgaatttcatcttaactaaactatataacaataataagattaaaatagatttcacccgttacaacgcacgggcattttttctagtaatattaaataaaagaacgttgtcagctttggctcttatgtttcccaaaacaattcagattatattaaataaggggaccaaaacaatgcagattatattaaataaggggagaatataaccctattaaaacatgggaagaaaataaggcctgccacctgccaaatatagaaagaaagaaagggcattgcaagatatatgggctgatgagcagatttcaatgttagccaactccgccacatgcaaaaatatgctaacaagaatcgggcattattttcatcctccaatagaatacaaaacaggcataataagggattattcggtaaataggattttcatataaaaataagaaaaataaagatagaatgtcacgtgcactccattccttatgagttttcccaagaggttttacttcatgttaagaatcatatgaacttagtttgtaagactacaatccttaggaatttgggtggatccattactatgaaacgaattatacatatagaaaaaaaatcctaaggattcaattcctataataatcttatgaaaatcctctaaaccgaatgagcactaaaacttcgtccttacttgaggtaaatatgaaatatgcatgattttgagagttaaggggacaatacatagcccaaattaattgcaggaatgaaaaaaagacgtaatagaaaaaacacatgattctgataggaatggaaatgtaaaacaaaggattataaaaaaaggaaaaaaacacaacacaagaatgaacgtttgattggaccacagaaaaaacataggaatcggataagagagataaactccaaggaaaatttccaagatcctttgtataaactaggtttgacccaacccaatccataccgtccctccaaccaaacacatgcttacagtttcatggttgagtaaaaaaacgaactaaagcctgggtgttctttctttctctttcctttgtataaaggtagactactaaaatgcctaaatataccagttcgtggcactaacgtactaaaaggcataagcaacaaagctaaccgactttaaatcctacaaatctaggctacgatgaaatgggacgctagtcatccagcatcattgtctaaactcaccattactgagtaatttttgtccatggcataaaaccgtatgcaatagcacttcttcaatcgcattttgcccaggacagactatagagcaccagggatcaacaacaaggggtactctagtcgttcggtccacaaggacacagttcacgacgctacgagcaatatccacacaattacgaactaaagtatgcgcacatgccccccttgaaccgtgtttctttttctctgctcttggtccagtggagtcatccccaattcctaagtacaaattccgcatacttcccagaataacaggtgtgtagcaactaggaagggtatttcacaacccgctggactaactaaacaaatgccttcacaggagcaaatcatggatcgtacgttcttacattgcatttacagtaccggtgttcttcctgggtgaagcacagtcactccattttagtctcacattaatgctgcaacaagataaaaagaaattgagttagctatgaatgatgaggttgaagaaaacttcagtcatgaaaaatactggtttggttcagaaattcgttgcttgaactaacagagtgtaactacttctacgaggatgcaattttgataaaatttac

SEQ ID NO: 6419 - DNA, 11521 bp, Oryza sativa
caagcgggggcggggcggcgccggcgccggcgcggcggcggtgctcggggcgctcgggctcgggggcttcgcggggcttcgaccttccaccgcgcggcgcccgcgggcgaggccgagctcgagcagctcgccgcggcgtacgaccgcgcctcgggccgcatttccgtctccatccgcggcgcgggcgtctccgcctcgcccgcggacctcgcggccgccctcgggctgccgctcggcccggccgcgctgggccccgaggtggacgcgtccgtgttccgctccgaggaggcgatcgccgccgcgagggggttcctccgcgatcgcgtgctgctgggaggcggtggtggtggtggccgggagttgccgggggaggctgcggtggcgctgcggctggtggaggaggggaaggcttacgcggtggattggtgccggttgttttgggagttgctgaagatggatttggtgagcgggaagccacggcgctacgcgccgcacctcctccgtctgatcgagtaccaaaggcccgagcttttcgccgaggttgatgggagttcgcctcttgggaaaagaaggaaaagcgcggcgttttcgcggcaatgccagtgggaagatgaaaaggagacggacttgattgacgcagagtgtggagattctcgtacccaggcggctgaagcagaggtggagaggagcagccagagcattggagacttggaggagatgccagttttggagagcgcaagcaattcaatgctgttgatcttgtgggttacaaaagttcaattgttggattgggggaatggatccatggagtgaacgagggaaatgcggagcttggatctcagaaaagcttgccttcagaaatcgaggtttcgggctgtgagatgggaggtaatgctgctgctggtttgaccgccaaagatcagagctcgaatgattcgtctctccttagccttcttcgcacaatggatgagcaagatgactcctcaagccatcagaatgtgatctccggggccaagccccaaccagggccaaatcagcagagcataattgagatcgaagatgaagaggatgacgatgatgatcaggtgggtgttggtcatgtccctcccaacattcaaaatggacattttggcctcaacaattattttgtgcaacagagggcaacagaaggctttcaaaatgatcaaacgcttccatctttccttgcctgcacacagcaaattaaagcttgcatggatgacaacttcttggataagatgaaggctctcatggatgctcgagctgctaaccagcgcatgattaacatgataacacaaaaggattatatgattgcagccaccaagagggacatactggaggatcttggagcaaggcacgttatgatcagtcaattcgaacatgacattgaattgatgcgtctcaccattcaacaataccgaaagttgtttgagaacacttctgctgcatatctagagtataggaacaggatgtcacgtgaggagggtgatggttcatctctggaagttattggcatagctgatgagacggagcaatttgttaggatgcagcaactggacatttatcagaggcttaataagtttcaaaagctttggctcacgaaatattcagatcttgttgggcatttgacaagagtagcagaatgcatgacatacctcagtaatggactgcaaagactgaaagattcaacaacaattcccgaccttaacaatggcaagcctcaactatgaattatgtcttcatatttccattatcctaaaaactttagtaaaccaactcatttttgttctacccgcaggcttggaaggcgaagaattgggcaaagaattgctgagtaagacaaaagatgcagagcgggaaggtgaaggggatcattgcagtagcgctgtagtggtgagtttaggtcttgtgctgctgaattttaaagtacattgaacgattgctgtttgagcaatttgtttagccaacgcaacaaatatttgccacgacttggaaatttgccataaaattgcttgctacttccatcaaaagtagatggccctgaggttttttatccaatatgacactctagctaattgcactgaagcttcgaagcccaattactatcaaccccctcgtttagcctcagcttataagcataagcgcagatttaaattttaaaacttaattttagagttgattttagggttttccgtataaattatttttaatggctaataagccatttcgctaatattaagttagtataagccaaacgtgtgtttcgtatctttcttcagtttttctttggcacaatgccggagcataacatgtcatgatgctacggtgctggaaggaaagcagacatattcagatcctgacattgcacttactttgcagatagatgaattagcacaacctgatcagaggaatgataaggagagcatgattgtcaatggagtttctggaatctgcaacgaagatgaggtgtagcttcacagggcacaagttagacaagaatgttctgttgatgggtttaacctagagtcagttaattgtctagggtttggtcatgtgggcctcaacagttgccctaattaattactatgttaaaatggtttagccgtggatattggatggtactgtgactatggtcaacaactttgtgcatgaatgacttctggcaccttgctatttttatctgtttcgagtcctatggacaagttcctctgcatgctggataaacacgcacgccgttgatttttctgtccctaggaatcactgtgggatctcttcgaaacctcataaacagtcactcttgtcttgctcggtgattcctttataagatattttctcttaggctattcacagtgtaagcaccggtggtagggtcttagtccaaaaaattagcctaaagacaccattccccacggtacaaggatcctattttacgtgacctagttggatttagacactgtacaaggaaaccggcacccacaacgctcgtgacctggtggagggtagcgaggggaccgaaggaaattaatttcctctcctacccccgtcttctcctctctttctcctcctccttcgtcttcttcgctgcctcctcccactccgcctcagcgcctccttctcctctcccacgccgcctcctcctatcgtcccaagcagtagttggcggcgtggtcttccagagttgcggcggtcgtcggtggcgacttcggtggtcttccggaggctcgccggcacctcctctccctcgatcttggcggcggctcgccggtgcgcgagcggccgccggttcttggcggcgcagggacgccggtgcgcgggcggccgccggttcttggctcgtccggatccgagttgtggtggcggttgtcggcacggggccccggattcgccgccggatttaggggtcgtggtggcggatgtggtggccgcggcgggggcagcggcaggagcggacgtcgcgacgccgacgggaagccgcggcgaggaggaagcgggcacgcggcggcgagattgttgattgttgtttttgtgcatgtgagatgtgatgcttcttggtgattcctcttgtgttcttgggacggatcgagttcttttttctgcgttcttgcttgaggtgtttcggtggcgggaagaatcatgggcgaatcagggttttctccactcgatgcggcgcgagggcacagcgcggccaagaaccacaccccacagcgtgcgcgcctcgtgtcttcctctccttctcgcaccctcgttttggcgaggtttcgcgcggctctacttgggggcgaggaggtttgctagggtgcgattccttctgccacgtatgcttcaatccgagctggcactgtgtagcaccggtccagctcaccgcactgtgagaggccttacactgcaggcagtagtatcaattggttgactatggaagaaaaccgtcttcttcagacgtcaatggcctgcctgtggttccattcatgcgggaccccttgtaggcctgtatcttcttacttctccctccattccctaatataagatattttgatattttgtttgcacggtttgactactcgtcttattaaaaaaaatggaattattatttattttatttgtgacttactttattatccaaagtactttaagtacaacttttcgttttctatatttgtataaattttttgaataagaggagtggtcaaacgttaaaaaaaatagtaaatatcccttatattagaggacggaggtagtacgagttgctgatacaccagatgagatgaggatcatgttctctgtaaagagaaaacgagcatacctggtttggaaaatggcatgaattttgatgtcatccattgggcataccttttttaaaaaagaacaagcctaatcatatcagatttttttgaataagtttactttaggttacttaatttatcgtcaagactaaaattcgtccataaaccgtgatacctgatatgacacgttctcaaaatcaatgcaaatgaggtcgcaaggcagttttgacggcaatttcgattgacgtgatgcctatgtggtgctgacaaaatcagaaaaaatcataggacccacatgttagtgagtgtttggctaaaaataaaaaattacaatgtgacccatgtcatcaaccctctacagagaaatatgtcatgacatgggtctgactgtaattttttttatttttaatcgaatactccttgacatgtgagtcccatgtttttttttctgaatttatcaacaccacgtagacatcacgttagctaaaaccggcttaagatcttattgcggtttatagacgaacttattcctttttttcccccttgcaagggttaccgggaaaaaatgttggactgggctttggcatcagcttcaactggcggcttgggcctggcctgtgcttaggttggcatgcattttggcaaaattttgagcaaggttccatttgatattttggtgattcatttcttgcgatgaatcttatgactttgtttgatagctaattttaaatcttttcagtttggctaattgtttttcttcaattgtaggttgaaatgatgtcaacattgtgtttgaaaaacatgaaactactgtgagagaattaacagttagataacatataatgtgatgtctaaagataatttgatttcttaaataagttattatactccgtaatgattacaaattcatttttcaacaactttagaaataaacaaatcacaacacaacatgataattgccaactaggcccaagtgcccaagttgaattttggattctctggcccactttttccaatatacatttggattctctgtcttgcaagaggcgagtcaaagaagcatgatagggtaactctcagctaatcttggccatccaattaaagatgaacggacaagataatactcctctgtgttcaggtgcataaccagcaggagatagtagaatcaatatatatcgaatacttttcttgtcaaatgtatcacgtctatttgtagtattatctataaacaattgattattgatagtagaaacattttttttctactagcagtagaattataataaatacctcaaatcatttttttactggtgatagtaccatagtagaatattactaacatggatcactgtaaaagtactacggtcattcttgttaaaattaagtacccgcttaaggattgtatgtggtcagactttttagacctgcgctacaacaactttataaatatgtaaactatacttatcaaatgatatgttagccgtctgaactttcgtaggaaaaagtgcgtgtacgagcgtgttcgcttgatgcaaacattgcctctggatagggagtgaggggttatccagaatcagatcatcgcccatagataagcaaatctcttctgattgtgaaaaagatgtctgaaaggacctagtcggctactccaaatgtggtactatcattatcctcaaccatgctatcctatggcttcgtagcagtagcactgattaatcacgcgatgcttctatcgaataaccttatcctgttgcttttgatcatccacctatgggcgaatcaattccctctaaagtcctattgcctagtgccctcgattggcccaagctgcagcatcttagtataatcatgatcatagttgggagcatgtttggtaaggttctgcactcactcctgatgcccctgaaacttgtataatccacaaagctcaattaccagccatccaatttaatatgtgagtgcgatgctagcgacatcggcatgtttatctcgcccccaacacatggatttgggactaccctatattcaaaggcactgggggaggtcataagcacttatatgcacacatgtaactcgagctgaatcgcctgtctctcgggttggtgcttgcttgctcatccatggccggagtcaggcagcgatccaaccaaccaccgctcggttaatcagtcggctcgacggattgctagcttgtgtgtgtatgtgtgtgtgcacgatctttttccggccatccaaccggattcgccaggccggccggtacggcaggcgtcaccggcgactttccaagtcacagatcgctgctttcgagttggagaacaaatctgtgctcccacttttccaagcttttgagtcggaagaccactcactctctccctcccctcgcgcgctctgctcccttttgttttctttctttctttctttctttcttggcagcgtgactgcgcaaagaggcgaggcgggaagaaccgatgcgctcctgcaatgcaagacctggcacgatcgcgatggcgacgccagcgagagcgagaccttgactgtaaatatatactactatatatttcctctccttgcgccagtggagtagctagctggagcagtggagtgtggagctgactggtgcttgcatttgactcgcgcgcttcgggtgcgtgcgtgcgtaactgagcagtgaagagcactgttgttgttctctgcgttgattgggagcacttgcgatcgccacggcgcactggtaccacgttgaaatttgaaatagtagagaaatgtttgggtattgatcggttgacttggagatgcagatgcatgccatgccacccatacgcatatgtagtgcactagtgcgtacagcgtacctaccgtgacccaaaaatgtttgttcgtccgaaaatgacatgttagagcttgtaaaaatcgctgtagtccaaaaatgtgtgattttgttcctgttggtatttatgaacatggtaattggggtagaatattgtagcagaagtcaatagactggcccatttgatctgtatgaaaagtataagaaatttaaagaatttccatcctatagaagaaaatcttaagaaatctttgaaataaaggattaaatcatattctccccattgaaaacaagcaagagactctaccacgtattttcatcttcttatggttgttaattcctatgttactcctacgtgtttatcaaactactactacaatacaattttaaagcttttctgtgtttttaattttatttctagagttttttcaattcttatgttttttacaactatgtgtttcgaagagggtttaaaactaaaatgcggggaaacgtcttttagtctaaaaatcataaagatgtcaatgacaaagaaaatataaactttgcactcttttcagtgtcccaaaagataaaggtattcccaggtccaactttgtaaatctgggagtactttatcttttcagtgccgtcttgtttgctcgtcctcttctctcatctccctaaatgacaggattacctagtgtaattaaggcgtcgtcaccgtgatcatgctgtttgcagttcaaaaatatactactaggatttgtctcccttaaattgagtgaacagccgttgaactacaaaatcctagttaaatcatcctcatccaaacaagcactgaaaaggggaacacttgggcaaaaaaaaatctatgggtctcaaccgcaactcccactttgcctagagaaattccatcagagctttatccactttcccttctttgtacaaatacaagagacgggtctgctcctttcctttgacagctacaagcaccaaacacctaatggagaactttcgttctcctaataaagaaaaacacttacacacttatgtagttcatactgaaccaacatggaacgcttgatgtataaacgaagcgaaaaatgaaacaaaaaatggcttaaaaatggccgctgattattcgccgcatatgctactgctgttgcggccgcggcagctggctttccaagtcttccatttccacggcgtggactcccggctgcctcctcggcgacggtctctccctgctcagcatcttcattagcgacgcgccgagcacccgcaccggcgccgagctaccggcggccgcctcctccttctccgcgtcctgcttctcgtgcacgcacctcgccgccgccgttgacggaggcggcggcggcggctccaccccggcgcggcagaccgggcacgacgagctggacgcgagccacttgtcgatgcaggcgacgtggaacacgtggcggcaggccggcagcacgcgcaccgcgtccgcctcctgcatggcgccgaggcagatggcgcactcggtggtgccgcccgccgcgtcgccgcccgccaccttcccgtacgccgcggtcggcagcgccgcgatggccgacgggtccagcccgacctgcttgggcggcgcccccgcgttcacggtcgccagcgcggccgcttccgccgcgcgcctgcggttccggcggcgtacgtggcagacgtagaggtggaggaacagggccagcccgagcacggacacgaacgcggcgacggcggtggcgatgagccgcacgttgcgccccggcccggccgacgagctcctctcgccgccgccgaaccacgcggaccccgggtcgctcactctccccggcacggctgacgtccgatccatcgatcgatactccgcttatccgctacacgcgagcgcgagctagttggcggagctaagcttctcccttggtttggtgagatggcgcgcggtttgggtgtgctaagctgagtagtactatctggtctctttataagctaagcagccgcgcctgcttggccttggctaatgatttgatttgggagggtttagtggtggcaggtttaggtttataggcctcggacgtgtgcgactgaccgtgacgctcgcgttgggcgcagcgggttggtgagtgctcgtccggttcgtgtgcctgtcaggttcgcggttgtgggggcaaaggcggggcctcgacggtgcgggtgtttgagtttcctacgtggccattagtcccccatgtccccacgacaagatgcgacttgatggcgactcgaatcgccgcggaacacgtcggttgctcggtgcggattttccccgggatttcttagccccggagggaagcgcgcgtcgcgcgagtgcggcacggcacggcagccgcgggccatgcagccaggtgttggccctgtaggcggccgacggtgcgccgacgcagcaaatagcccccgcgatggagagacaaaggaagaggatttcatgcgagatcttgcgctggttggttggtggtgacactcggcagctgtttggttggctgtttcgtgaaggtttgtttattcattgttcacgatggttacgggagtaatcgcagcagggtgaactgagcttttgtgaactgattaattggctctccttgtatggcaacacggctgtcaagtgcctctatgtcttgtcaactgtcaagttcgttgatgtggaggagtagtacttgattggagtacactttacttctgtactaaggttggatcaacagaacacatatccgtattccaaaggcttgttcacttgtttcgagtggattcattcacggcctgatacgaaattcaaggcttcggcgccgtaccgacgagtacgaaggaatccaccagtgagcagtcgtaggatggtgccccaggtggcccatggccaggtaggataggagtatgcctcagttgatgccaatttctggcgtcgagagcactagtagagcagtgatgaaaacctgctctcattcatccagagtccgcggacgagtccgaaggatgactgtgtgagtgagcctgggatggcatgcatgcagcatggcagtgctgcagtggcaatgccctcctttttggctcaaactacagagatggagtactcctagtagtacgttcagaattgaagacaccgtacactaaagttggtgctgctgccgcagagctgcttgtatagttaagcggcagaagattcttcggctacaatactcgacaacaaatttcatcgggtatatctgcaccttgattgcctcaaaactctagcgggaatggccaaattgtttgagctcccttttatcaggtgtaaagaccggagagatcgagccagagaggtgcatgcacttgcactttctttagtttccccgttgttgatgcttagccaaaggaatgacaacgatatctgtttctcgaacttatagcatgcgaacgactgaacgagacatggctgtactgtctggcccaatgtttaacttaagaattaagcttttaattactatagttggcccaaggtatagctttgcagggttattctttgatttggcccatatacaagtatacaacatcgcgtggtccaagcaaactccatctggtcggcttagcttcgtttaattaggcccgacaatcgccctgcctgctgggccgaataacggcacaggcgccgcctcaggcctcacccaaactaaaccagcatgtttcatcacgggcaggcatcgatacagcatgattcagttctcaacaacaacaacaataacaaaaaaaggatacagcatgattcttcgcaaaggggagagaagaggaagcaatgccgcatgatcgcgggaatgccatcttttggcgcctttggcacgagcatccgtcatgcatggactccatcgtcgacatgcgccgtcttggcgatcgacgttgcaggcgcgcgctcatctccgtgtacgtacgtgttgcgaatcccccaaaacgacgcgatgcgatcgatctggtcggtagctggttagaataaggtgcaggtttcctctcgtctcggaatggctataaactggcttggccgctagggcgaaccggcgaaggatcgatctaacctagcgcgtcgcccatgtcttgtatagtcatcgtggccacaggcgcgcgggcgcgcgcaacgcggacatacggtgacggctgggacaagctgaggtgatcgagagaccggccggacgcgcgcgcgcgaggggagaagcacagatacgtttttgcggcgacggggcgaacgcgacgtgtgctgcagggcgcggcttttctcatcgcgttggacgagcaaagcaaaggataccaatgagggaggcgacaaagattttgcctctttgaagtaggctagatctgcggcggcgcgggggcgccgcggggggggggggggggggggggg

SEQ ID NO: 6420 - DNA, 31428 bp, Oryza sativa
  unsure (1)..(31428): unsure at all n locations
tgacgacgacgagaggatgccggcgggagaggcggtcggcgcgaagacatcaccggcgacaagaggcggagggaataagtaggaaggaggtggtggcggctagaaagggcgaggcagcgagagcagatggatcttcatctatgggcggcagcgacggagctttattgccgcgagcaccccgttgagaccaacggcgccccacagccgaccctcggcctactttggcttcgtcgtcgacgccgcccccacatgccaccctagatctgccttgcctggaccacctagggaccttcaccaccacctcatcaaccaccccaccgtcggcacagccctccactgaccccgttgcctagcagccaacccacctccgtcgtctccatctcagactcctcccggcgcgagctcgcgctggcctcggccctccactgtcggccgctccactccgccgctctctcggccctcctctctcgccagcgtggccggccgcctctcccctcgccagctgctctgcccaccgccgccctcacaactgaggatgaacaacgttgtggccgacccaacggtggacgttgggcggggtggcagcgggcgagcgcggcagcgggcggcgatagagggggagagaggcggccgcagtggcgtgtgtgcgtcggtgtggcagtgacagtggagctcggctcggctcgccagccgcctcactcccgtctgccgccgacaaccaccgttgaagagaagagtagaaagaaaagagtaagaagagatgtggcccccacatttttccttctcacttaacttacatgtgggatccacatattatttttattttttttggctgactaggatgccacgtcagcgaaagcacccatatatactgccataggaccttgacctcgagtgcacggtttatgtgagtttagagctacacatttctagttttgtggttaagagacttcaaacaatctcgctgttaagttgagggacctccggcgaacttattccaaacagaaaacacgcatggcctgcttggcaaatgataacgaacaaatggcccagaaactttcacagttgcttggttgctgcttccgcttgtagcttccatcatatagatagtgagatgttatgatctcaacttaatgaaatgaatggattggccaattatattgtattgtatactgcatggttaccgtcacaaaagatgcgtgatccgctgatccgcatcatccagagttatataatgggagaccaaatggaccctgaacaggtaaaaggaagcatgtcgggagctgcacaatatttcttctctttcgttctcaagcgcaatacacatccgatttgtgctctaccacttacatcaatcatgcacacattcatacgcgaaaaggaaggaattgcttcgacgagcttgaacatgcctatattattctcgtcacacaaacacaaaagtcaatcatagcgccaccggaacaacgaggagccggataagatgacttcttcatcatttcataatagcaaacaggacgccagccaggcaacgtcaaagaaataaaaaacaggagcagacaatatcgtgcatgcatgtcactttcagttttggcaagcaggcaggcaagtattccagccttccttatttctcttcgaccacaaaaacaagctcaggtaaccgaagctagcaagcaacagacccctgatatttcctcccttttataaaagcattcgcacaattattcctcgttgcagccggagaaaaacggggccagaaaaatatcagccgcgctacggtacaaaccggcccaggcccggcggccgcgagagagggtgacggccgcgtgacgcgctcccgcgtacggaacggagcacgcgtgcgcgaagtttcctcctcatctcatccaccccctctcgcaactctcgcaagttgcgtgcggcggcctcgcgtcgtctcggtacccatctctcgtccgtcctggaacacagcgcggtgatgtgaaatctgggccttttgtctccacctgcagccgaagcttcggtcgctacacggctcacacgcgcacgcgcacgcgctgcaaagctaccagttgggggggctcgcgcgggcgcggcgcctgtcgcctttgcgggcggtggagtttttgtcatcaacttgagcgtcgtagcagcgacttctcggcttgggattcggcggggacgggaaatcattggagttccctgaatttgtcctggcaatggcaacgcgagggcgctgactactactactacgaaggggatgaatcaaggatcgctcgctccgataaggaaaaaaaaacttcctgtttgatcactatcatgtcaacctcttttttcatgtacatgtgcgccgtaggctgtagcttaagatctaagtaggcgcatcgtttcaacgccgcatgccgtttgtcaaagctgcgtagttcagcaagaggagagatattgttttcttagagcaggtttaatagatcctaatcagccggcgctagcacgcttcgcgtcagccaaatctgacgtggaggagtgagaagagaaggaaaagaatggagcgggcgttccgtttatcgttcggctgaagcgcaacacacgagaaaaaactgctttcttccaaccaaatgcgaggagatcaggtgtacatgcgaatattaaatatgtaaatcttcaatagaggtaaataaacagctaacctaatagccagcctattatattagtgatggctataggtgacatggtactaatacagaaccggcagctggctatattattatcattgctcttagaagtctccctcctgatcagcgaggaggaggcggaggaggatgaacgggtcatcaatcgtaaactagcgctaataattcgagggccgtgacgcgaattaaagaggcgcctgatccatgacagcctcccgaaaacaatttttttttgacaagccgaaacaattatttttatcgcgaatgattgagatcgatggatggatcgaacggccggtcgatcgataccgacgcgcgcggctgctcttctccgattcgtcgtcgtttttcgcctctaatcccatcgcgaaatccggagcaagaaacggtctacgcatatttggcaccggcattctcatggtagcttgcttgcattagccgttgcatttgttgatagaactgctcccgccacgcacatgacatcgttaatctggccagcacccgcagtgtcttagtactccctccgtttcaaaatgtttatcaccgttgactttttaatacgtgtttgattattcgtcttattcaaaaaatttaagtaattattcattgttaaatatactttcatgtacacatataattttacatatttcacaaagttttttttaataagacgaacggtcaaacatgtgctaaaaagtcaactgtgtcaaacatcttgaaccggagggagtactatataatcagattagttaacagttaacaacacgaatcacgaggctttggcacgttggtgctggccgaaaccaaggcgagggggagctttgctttgggttaaaacataaaagtactccagtagtaggaactttgatgctactggtactatttagttagtgatccggatcagtacttcagtaggccccgcgtgacggatcgaagaagataaggtgaagcaggtccctgctgcctcgactgactaattaaagaatttggcgtttggttcgtgattaagggtttggttacaccgtgtcccgctcacggataggctgcttaattctcttttttaaaaaaggttttagctagatgcgctggtgctgctgctgctgcttccagaatccaaactcatgagcttgaccaactgaaaagccaatccgtatcatctcaattactactccttacaagtactactagtactaaatatgtactgctgttagtagtactgctaaaaagtctaaagtagcacaaaatcagaacacacattttcagtattgcaggagataatgtttccagctaaaacacagcttcatcctcaagaagcttgttgcgccaaaatagcattattgggcacaagttagcgactagtgagccccctgaaaaggagcccaaaatagcgttctatagatacctttttaatttcatcctcccgtttggacaaaaggaaacaggtcttggattggagcacatcatgatcaacatctcaaatcagtgatgccgagatttctgcacgtggggaacgtatttctattcgtcagaacaaaaatgaaaaaaaaataaatccagctcgcacacaatacagggaccacttctcagtagcccaccacaaaaaaatctagtactagtatatggatcgatcgatgcccgcatctttcgtgcttgctgtactcagttaatcatacgggctgctagcattacaatatccagatgaagaagttaatgtataacaccatttgtgtcagacagagatatcaaaaatattagagcggtgtaaattaagctagataccgtgcatgagccactgacagcatttatactagtataagatcgaaacaactaattaacaagtaccccaaacaaagccatcgtctatgttttttattttcaagtgaggcacatggaccattgatggttggacacctatagctcgcaattgaggggaaaaaaataaggagcgcttcgatacaacttgcaccggctgtaccctctcccaggaggccggcttcttgagcaccacatggaaaagcttaactgccgtagtttcagatcgggtttgtacacctgtacgtgaacccacgtgagatgcgagtgattcgtgaggtagtatcatcgatccaagctatctcacgtgtacacctgtagtagcgtatcctccgccgtttgatcgagatccaacgcaccagacggattgctaacaaacaatacataatcttctatttttttgttgttgagatatatatgatcacgtcacagggcggcactggttctggaggttcgtctgtgaattaaaccacgctaaagtacagggtatccgtatagtattccttctcatgtacgatctggtgtgtattgtgtttccacggggatagcagcagaagcacggggatgattggccagatcgggttagggagggggtcgccatcgccgcctgcactagattaatcgctcgccccggcccagaacgtcgctctctccgtccgtccccggctcgccaccatctcctcctccaagacgcaacaacgagagtgagagagagagagaatcgagagatccaatccagtttgcgcaacgagtggcatggcatgcaaccgatctagaacgtcaaataaaaacaacgccatgcgtacatacacgttcatgtgccgcgcgccggtgtagcgcagcgtagagagagagagagagagagagagagagagagtatggtagtcttcctacgctcggtcagtgacagcgtcgctgcgcataaagaaaggcatccactagcaggagccagcatacgctgccgcatatacaaacacgcatgtagccaaggcgaggagagagagagagagagaaagggagatcattgaaagctgcacccatccgtttgttcgccaccatttccatcccctccatcatgagctccaattagccgcacaccgatcccctcctcttcttcccccccttctcctctctcctctttttttcctcatccgtgcgcgatactgcgcttagtttgtgggtggggggagtgatcatcaccaaagccacaaagggggcgcggagagatattatatattctttgggaaagcgttggattagtttttctcgctttgggctttttatccggagttggagtgtgtgtgcgccgggagtggtggtggtgatggcggccggagaggaggtgatggatcggtcgacgtcggccgaggacgggtactgcagcgccggcacggactcgccgcgggcggagtccgtcgacgagcaaggggccgccgaggagtcgtcgccccggggagggcagaagcgggagctcccctcgccgtcggcttcgccgtcgtccccgctgccacctgccgcgaagcgcaggtacggataatattatggctcggtctgcgattgattaaagccctaggtaggatttagggatagaggattgattggtgtttggttggtttgagcagccggaggtcagtggagaagcgggtggtgtccgtgccgatcgcggagtgcggcgaccggccgaagggcgccggggaggggccgccgccgtcggactcgtgggcctggcgcaagtacggccagaagcccatcaagggctctccctacccaaggtaattaggctttatattcagtttggttgatattcttgagcctgttgattagttaccgtgctgattaatcactgcaattagatcagttaaacggttgttgaagtggcaagatttaatttgggtttgttgcttgtgtttattatgctcagggggtactacaggtgcagtagctccaaggggtgtccggcgaggaagcaggtggagcgcagccgcgccgaccccaccgtgctgctcgtcacctactccttcgagcacaaccacccgtggccgcagcccaagagcagcagctgccacgcgagcaagtcgtctccccggtcgacggcgccaaagcctgagccggtggctgacggacagcaccccgagccagcggagaacgaatcgtcggcgtcggcggagctggaggtaccggagccggagccggagcaggaatctgagccggttgtgaagcaggaggaggagcagaaggaggaacagaaggctgtggttgagccggcggcggtcacaaccacggtggcgccggcgccggcggtcgaggaggaggatgagaacttcgacttcggatggatcgaccagtaccacccgacgtggcaccggtcgtacgcgccgctgctgccgccggaggagtgggagcgcgagctgcaaggggacgacgcgctgttcgcggggctcggcgagctcccggagtgcgccgtcgtgttcggccgccggcgcgagctcggcctggcggccaccgcgccgtgctcctgatgatcacctcctcttttctttttcctccccttttacaatttcccttttttttttttgcttttctttagttctccttggagtaatttggattggaggttagtacatagcttgggtgatcaatgggagtgagtggcttaactgttcaagagagcctcctattcccactctccaaattgcgtcgcgtgttcgtcatccaaagcccgtcgtgccgtttccgaagtggttggcgacgtgattccaacgacaaaaaagcagcgaaaggtgggcattttcaggcgtttttcctcgccgtctgtgtcgaatagacgcgcacatcgatcgctccaaggcccatcccgccgagtgagtgatgagtgagttaggtttctccgcacgcacgcacgcacgtccccaccggctgcggcttgcaagtgggggcctctcgtctcgtccgatgcggaatccaacggtaagcggcactggcattagccgggcaagcgttttcggcgtggtagttggaacttggaaggatgcgcgcgcacgaggccacatgcccgggtagtgtggcgctgccacggatccacccgcgggacgcgtgccgcgccttcccgccttgccggccacggcccacggccggctgccgccgccccggtccgcttggcgctacgcctacgcgcgagcgggggcgggcggagcaaaacctcggcgcagcaaaaaccgctttcccgctagccggctgccggccggaggcgcgaggctagcccggctacgctacatgtatgtacgcgcgctgccgcttgggacgtcgccgaattggtccctatcgcggcgcggtgcgtcgtgttcgtgccgtgtcgcgacaccgtccctgttactacgagagataggggcaaacggatcgttcggctcagggttccatgtatctagccggccggctgttccggctcgcgttctgcgtgtgtatgcatgtatcctgcgaggcaggggtgggggaagcgaattcgcggatttcggaattcctcgagtggtgtactagtactgttggtgttcggagaggagcttttgtttaattcgtttccagaagtaaatacaaggggacgatgctagattcgtgatgccatcttctccatgtggcgattaatttagaaccatcttatctcagcagcagttaagcactactacgtatgtataggcacctcttttaactgctctagatcatgaacacactttttttcaggagagattctcacgttgtgcttgaaataaatatttcaactttccaccaatgacacgactaggaagtaggtaccaaagtttcgtcacatttttgcttaagcaattactagaacatttatttattcgtctgttagcttcgatgctaagagacaagctatacagatgaaaaaaaaaagcttgcaggactttccgatataatttccccatgacaatagaggggatagctaggactaaaaggtagaggtcgtagaaaaacgcatgatcagccaactttacaaacaaaagataaaacatgtgactttactagcctatttggagtcattatccacagtcggacatttcacaatctgaccacgtaagagtagatgataggaatcaaatcggcaggaaaagacaaaagagttgttgtcagtttgtcactgacgtaagggtggcatccatgacaaacctggcttttgggcttggctatggctacttgcatgtacttggaccaggccttgtttgctgatctattttagacaatgaatggataaggccttgtttgctgatgagtttctgagtttacataacagagcacacctgcaggaaattttagcatccatcaggaaggacacgcaacatgaacttaagatgggaggcctacattactactgttgcatgtgccactctttttttttttagaaaatggattaaaatccggcctctacatccacagtggatgtacacagtccaacatgtgccactctaaaggatgcagttaagcaactcagcacaagccatactgtcaaaaactctaattgttcagaaggctgtcagaatgccccgaaatattgccaggttcccactgtaaacaaatgttttgcagaattatgtcgaatacagtaaccaatctgacgaaaggagctgtcttgagttaagactttcaagaaatggtataactgaaagttggaacaatctaactctcaatatcaccacaacaaaatgaaaattaatggacctctttcaatagaagcaacatacagccgtacacctagtggaaaaaatcaacaagaaatgcatctctactctaatttgagcaacagccaattctcttcagcgcagacacgtcatctttcacattaatcttctctcctttgattggagcatttgatccatcatctgatgcctcaaccgtcttcttgctgacagtttggtatatctgagtcaaaacttctgcaaaagcattctctacatttgtggcgtctaatgcagatgtctccatgaagtacaatgactcagcctcagcatattcctttccatcttcagttgaaacagccaccagatggcggagatcggatttgttgcctactagcatgacaacaatactagggtcagtgtggtctctcagctcttttagccagcgtgccacattatcgaaagtagcacgccgagtgacatcatagacaagcagtgcacctactgctcctctgtaataggcacttgtaatagcacggtatctgccaacagaaggaaaatattaggtaatcatataattatgcactaaagaaaatcataaagaaggatcagctactcccactgttccacaaagagtttacttttagcattcaaaatttgtccacgaacaatttacttttagctctgaccctactcactccacaaatcaacatactctctcacacacacattctccaactattaataacaaggggaacctaagccattccctcacagtactaatctgcaatcagtgtgagaactgctacaaataaattcttcgtgggatggaggtagtaattctgattccaatagcaaacatgttcaaaattgtccacaaacaacagaactaaaaacaattggcatgaacatttgatattagaaggaacattatgatgccttatttgttatttcctaggttaaaaagtgctgccaatgtgttgctacagtaatatgtgatagacacatggcatgcatgtagtgaggaaaaggccaagctatggtaaagtaaggtgctctctataaaacatgtacatctcagcaatagactaaattaatagtaaaccacctcaatagtatgtctacatgggtatctatagctctctaatccattgcctcgtttttctctatagattatctccaggttagtagatagctttgctctctctcttcattcaatctattccaagtaggaaaatatgctgacatagatctcttgtagagaacctatagataaccattgcgggtgccctaaggccataaggggcaggccatcttttcctgttccccttcgccaagtccagatctaggatttaagctctagtcattcacatcaacatggtgtgactgtacaacacaccaaattgcacgagcgggtaacagattattggaatggagcaaacaaccgccaaactcacagtcaacatctcaggtcaaggtcagtaagcaaggttgctttttgtgaatgtgtgattggcttggttgctgaggcgtctttatggtataacaggaatgtggaatttagaaatattaaggatccaaatagaaactatagcagaaaaataaggcactggtatagcacaagttatacattataaaattttctgtgaaagctttgtgattttgttgttaaaattgccaaccaatcctagttcaccccacgtccccacccaagtcagtctatgtgtattttgcattctatgattgtctcggatatagatttactagtttcttagactttaatttacaatagcatgcaaggtgttttcttaatataaaattgtattcttttttagatgtggaaatggtttaaatctcttgcctctgctaacaagcacactgcacacggccaataagttttattgttgtataaaaattgagtgatgggcctcccccaacctctctaaagaaaccatatggacctagtatttctgacagaactattcttatccataattcagagagacttataatgaaccaaaagtttctatatagtacgaacaaagttttgcactgtccaattaggatgatcttctcgatttatactccccctccaaggctccaaagcaatatcaataaaactgtgtggtattgcaatacagtgcgttaggtagttaggtatacactacataagccgggaaccaaagtatgcttttgatgcgtatttatgcactcctcatgatgcagaaatgtcgtgaccacaatggcactttctactcttgagatccatagcaatagaagccctcaatagcgaccatttcgccgctggggccgcacttatcaataagtcctctaacacctgtgaaacacctgtcccccagttaacactgcagctaaactagcatcactgcatttttgacacatagcatttcctctgcttcctctataaacttcgaatggaagacgacacagcaaccactttcgctagaacacaacaacgatttttggtggtttcactctcgaaccattaatctcgaatgaaacagacatggacgtcccaacagccaaaccacgtgtcacctcccaatctagtaatctaccctccaggagaaccagccagatgtgaattggcactcactacactttcggttccatgccaaattcgtgcaggaactatcaaggtcaaatttacaatattaatgctctaatatcatcagcaccgaactagttcaaacaagaaattaaaatcgacaacgacgacaaccaaagttcacattttttttaaccaaaaccaagcaatagcgaagcgcctacaaacaatctgcaggaaaattatcggctacgtcgcactctaacttccaagagaaatccatgagcatgcggccagcagcaaatctagcagaacacactcgatgcactacccatttgcgcaccaacgcgggaagcggctagagtaggagaggaagggggaggccgtacgtacctctcctggccggcggtgtcccaaatctgggccttgacgaccttgccgtcgacctggatgctgcgggtggcgaactcgaccccgatggtggacttggactcgaggcagaactcgttcttggtgaaacgcgacagcaggttggacttgcccacgccggagtcgcgatgagcaccgtcttgaacaggtagtcgtagtcgtcctccgccctgtagccgccgcctccgcccgccgccattcccgcgcactagccccctcgccggccggcgcttctctctcagctagctagtggcgttcggctttggatctcgcgggctttggaggacggagcgagcagttgtgggcgctgacaggtgacaccgtgacagctgagctgagcttgctcggttttcttgcgccagtggccagtggggttttaatttgtctgaactctgaagaattaatttgctgctcttcttacgcagaaagtccactctacttctttttagtcctctctgttttatttaacctacggctgataagatgtaaaataaattgaacgaaaccagttagtactaggattttattgtaggggccattcatattaatgccatttcaaatcatactatttttttaaagttgctaaatattcgtatatatttaatttcttgataaactttgataaatatataagaaatactgccattgccaaattttagtaacgtttattttggctacaatttaaacaaccctgtagtctgaactaagaattagtctgttgctttttatacgtagaaagtcccctgcacttctttaatttaggcctatgtttgtacaagctaccgccatgaaaataataaaagaaataacaaaaatcatttctaagtaaaatagtattaatgatttagaagttcatattaaaaaatatactacgagtctacgatgaaataactctaaaatcaacttgaaactgagttctaaaatttaaattttgttgtggttcataggctaataaagtatgactctttggtttatacgaattctgtaggaaaagtagattaattaaattcttctagggttgcactattcatttttttgatggatggagcataggaaaaatagggaatatctttcctttgccatagatcaatatgaattgaaacatttacaaacatctattttttttcattccttttctcaagtaataaaacaacaaattgacacaagttaatgatacattaaccaaatgaattataatttaggtttgttttgtaagtttcatgtgttaacaacccatcttacattttccttatgtcttaatcatctgtgttacacgtaagtacacgtatgttcctatcatattcatgcatgtttcctattcctatagtttttcattgttgcgttttataggtgtccctaagcaaaaactttttgtcaagctcctatagacagcggtgatggcaaaggggtcaaatgaaatattttgattgtaaaatttgatgctagattgaatttaatctaaatttgaaaaaaaaatagtatatgcctaaaggtcggtcaaacaaacattcgtaccacgggctaattaggtcccttatgatttgatcgcacctagttagacagtctaatcgggctaattaggtcccttagagcaagtttaatagtacagcccactactagcttcaaatcatctatagccaatgtaatagtcaattcatacaatagttgcttactatactattaatacctggtcccacctgtcatacacacattacgccttgaagtccgtgctgcagctggctacagatctgtagcccgctgctcttctctctcttcttttatctctttaaaatatgtttatagctggcttatagtctgctattgtacctactcttatgatttgagctgtctgatcggcaacctaaagtctagatcgaatttagttttttcttttcgtgtgtattttcttgctctaggatcaaggtttcttgagtgctactgtatatctatcccaataatacatgaaaagtctttatttttactaagattaatatctttataaaggttatgccgattcaattgagacaatgcaattcaatatacaaggctcgtcatttactttagatttactctactttacccctacctcatctgttggtttgcatggtaaccattcaccttcgcggctaaaatgcgattttttaaaaaaaaattatcccaaaaactttccagttcactagataagtgtttatgctcagatcggtctaaatcgtctttggtagattacttgatatcattatgaaaaagatcagaagctacatcaccgtacccgtggttggagatcaaagcgcctctacagctacttcgtttaagccagtggtaggtgttaatcataaaaagacttcaagagaatcacagctccggatccgctaccggttaaccgtaacccaaccgaccgttggacggctctctttatttcttgaaccgcgttaactactcgaactcttgcgagatctcctctcgaactcgttaaagaaaggcgtgacgcctcctcggtggctcgctcgtgaactcgtgaggcgcgaagtgccggccgccggcacggtaaggcccgagacgcgcgcgctcagctcgtgggatgccttgaggccagaaccctcgcagttttacggcaggaagagcgttcggtgagatccagacgcgcgcggtttgaagcttgaaaagccaagcgaaggccatcaaacgatgataccgatcagagtgtgatcagacgccttgttgccgccgtcgtgcatggtatagttcaatactaccggagtacttggtagatgcagcgacagaggatatgccagcgcgcggcgcgactcagatcccgcaggccggctacggctcacacgccgcacatgcactcgtgcagcgcggctgagcccacgttgatgaaacagctagctagtagcctagtagtacgtgcttgtatacaggtgggtgacgggtccattgccagtgtgacgtgcccacaggcacctaccgtccgtcaccactcaccaccctttactactccagtacccagcagaagatgatggcatgtagggtttcatctagttccagtctaccctttgtacaaataccaacatgagatgggagtccacgagcagccaagtatctggcagtatggcaatctctatgcaataactgtttgacatgaggaataatccatagggattgggtaccattcacttctaaatgatgcaaatccatgtttgaataccggcacaaaatgatgcaaattatgcgaactgcttatgcgtatttccttaaaaaaacactattggcacaaaaaaaagtgctgttcatatgggaactaaattcatccaagtgaaaataccgcaaaattcctacattctagacggaacacaagggtatgaatcgatttgattttgtaaatttcacaaaacctctagtattatggtccaagttttaaaaaatgattttgatacaacacataaccccagatattatggtttcatagtttgacaaacccacactgttaattaatttggttcgctactgtaccaaataagaaatactacacttaatttagatggataaaaattttggtaaattagaaccatgccattataattttgcaaagtttgagatatgtcttcggtatctcaatgacatgtgggacccacatgagtcaatgacatgtgggtcaggatggcatatctcaaattttgcaaaattataatggcatggttccaattttccctaaaaaattttatagatagatcaaagaattcataaatttgagatttgatttagaacttctaagtatggagaatcaaataaccattgattaacaacatggttttctaaaactctaggcccataataccagcgatcatgtaagccacatgcattacccgtatgttttttgttttattttttaaacaagctaggacaataatatctgcagttatatgaaattaactcatttaggtattacacatcctgtttttatagttgataagtgtgccttttgccaagtttagggactaaaaagtgttctttatggaaggtgaaaaggcctcatctcaacatataataatctcaaaataagggaaaagaattctattatcatgtaatatttacacatttctatgcagtaaatttagctaaaagtaaagaaaatcataaattacaatattgctacatataaacaatgtattttcctatcgaagaaaaaggtgtctcatgctattcttccgcgcacgtgccaatactggccaaaactgagctctctactcttccaattaaagaaagcattagcaaattcctaagtggaggaaaagtattatcaaatataacaatactatttatgcacagttcttgacagatatctgcaccttttttgttgacatgaaaatctttctttggcgactagattgtctgctgcttgtgtaaatgtgtcttcttaatcaataatattgtttgcgtcatgttcatgttcatgctcatcctcatgaataacaacacaacttccctaagtcgtggaagcacagaaaagataaaaaacgatggcacttgataccaaggcaagatgtatagatggtagtcacctgtgaggaggcataggtaactaaatttccagaatatgaaaatccatcaaatagtccactctctgggaaaaaaaaatgtgccactgtcaagccaattgccaacaatgagaaatataaaaaactgaacaaacattttatccatcatattttcttactcacctgatgacatcagcctgaattaccctggttttccatatcgtcatcatcaaggataacatattttgaagcaccgctagaagtttgggggttcttgtcacaattcttattacgatggcctttcttgaacctatgataccttcgcatatcatgggagaagaatgaggaaatattgttcactcaacacggatgcattagaaaataaaattttgcttctagttacatagcaaacagagatgctaaatgcttgctaattattgctttataccctctcacacaaagagctgacgtgccaaacaaatattgttgaataatgcgataggtagtaataaaggttcaagtgaaaagaaagcaccaacattattagaattgtggtacagttgatgacttgaagttaatctagtgattagaaatatgaataggtttcgagttaacatgaaaacaaaatttcaacatagaaaagggaacattgacttacttgtataagttgaatagactgacaccaaatattattattcccagcccaagcccctttaaccaggtaaatgtatcattgaagaaaagcacagcaacctgtcagttttaattgttacaagttgactcaaactcacatgcatgaacatagatgaattatatacataatgaatatttaaagtgaaatcaagctttagttataccaaaatagtgaccgcttccttcacaatcccagctacggtcactgttacagcacttgttacagaaaccagaacatattctgtcaaaacctgcaggtggaaaggtccttgtcatcatcttttacggatacatttcatgatatgacaactcacaacaaaaataatcagcaggcatgtataataaaaactgttagtgtatcctgactgaagaaaaaaaggactcattgcaggtattattggtgcacggcgacattcatcattagcaagctaattctgacaagtgggtacatgatccataccatgaaaaaggccaaagcaccaccaagaagcatcaataagctgctccttattatgtgagttgaattatcaaaaaagtggcttgccctgacgtcgtgccatggatccatcgcaatagaaagaattgcagttgttattgccataaccggggtaacataactcatcaacgtaaagggatttcttaatcctgtgaatcatagaaaacaaaaaggatggctgttacatggtggttcctagtttaaaaacaaatgtatcttcatgcgtatatattaagaacctaatgctacataatatttctagttcatataaccttttttaataaggattataattcatgttactgttaaagtcgaagcaataagggcagtttcaggcatgagatgcaacacaaacaaataggattaagataaatcctctcaatggacaaaaaggctatgacaaaatgcataccatattcctctttcttcagtagattccatagacacataagagaataacaaaaaagaaagtacagtcagtacatcaatggaaattaaaatataaaatagctgtatataattaagaggacatagtgacatgcccaatcatcaactttgaatcataacagtagtaagacaaactattaaagaacaaagtattaaacctggaggagaatctgtgtcatgcaccagcggaaaccagacataacagcagcaagcataataaatacaaatccccaaagattgaattctgtctctttagcaactgtccagaaagaaatttttttaccatagttaaacaatgatggagcataagataagtactaataggcatgccagtacgtggtagcatcaagcagtaacaatgcaacatctaagtgaaaaaattggaaattacaccataatccctttaataaagcaatatatacaatttggaaggtcattttgtcagcgctctctaaaaagaacaaaagagaattgtttcaaataaaaagagaactgttatttcttgatgaattcagtatttcagtacctgttagtagaactccaaaggaaacaatcagtatgattccaagaaggttaaagctgggcttctctagccttccaaagaaagatgaaaagtttagctctataacatcaaaacgatttataaaaaaaacagaagtatataagaatataattcctagacaaagcgacaagaaaaaaaaaagcgatttgcatgaaagagaaatagaacgataaaagaaacagaaccaacattagcaggttgaagcaagatacccactcaaggttagaaaaataaaaatcaacaaaagatacattacataaaagtatagatagaagcaaacattttaaatctaccaacttactcgtattgttcatgtgagagtgcacgtgtcagtgcgtgcttttgagtgctttgtgcttgtgggtgcattcattataaagattaaagcacttaagagttattaaggatggaaaaatcagatcgaggctcaatttaaggttgcataattggtatttaaatcaacgaataatggaagaaatcactttagaagaaaacacatgtgtatacactgttgaaaagaaatcaacagcatagcttacctaaacaaaaaggcaaacagaagaatgaaaattggagctgcagatttacactgcataataattgaaaataatgaattagaattccaaatttgctaaccagtacttaactatgaaaaaactaggaaacaatgattcatatagggtgaaatgtaccattgtagcaaatgttacagtgatgaaaacaagtgaaatgttgctcaaatttatgtcaagagcagtagccaaagctgttgggacaactgcagaacaaataataaaattacaatatatcatttgtaaacaatgttattcaaataaatatgatatacaaaaatacaaaacaataaaaatggaaaatatatatttacaaatattttcaggtagtatagattctggtttaacctaatctttgttgattgactcggttcaatctattagagcattgattgcatatccactaagaaatgtgatattgctcaacatcataaaagattcagtaagagaagtatactaagctccctatttgagcctgtgtgacgcattaaccacttttatttctacatgccaccagctcaaatttcatttgaataagagaggaataaatttagcatgtcatctgttctatcatggatttagcatgccaattgtcctatcatagatttagcatgtcatctgttctatcatggatttagcatgccaattgtcctatcatagatttagcatgtcaattgttctatcataatagtcactagttgcttaaggctgcaaaagccaatattgttcatgctgactggtcctaaacctgatcttgtaacaggctaactaaagagtacccttcttcttatgtcacttattagttgtgtggcaaacatagacgtaaaactagcattcaatttatttatcccctataagtccagaatacccaaagttgattttactaatttgagcgcccagctacccaatcccatgccacttctctggctaaatatgtggaagcatcaagaggcataaagtaagctacactttggtcacctcgcagaaagtaatctctccatgtcattgcactagccgctccctccaggccccggtgctggaaccatacgatcaccctcgatgccacagcctgcatcgtgaaatgcaccgtgttcatcaggaatggcgctgggaacttccacatgtgcttccccagcatctccttgttatacctgaacacacgccccacgagcacaaacagaacaccagcatcaaacatgtgctcaagcacatactccccctaatcatccacactccaaaaaaaaagcgtgctactcacagcgtcaagcaggtgctcagcgtgtaccaactcgcaattagcgcaataaccttcgcgatcaaccacggcgaaatcgggaggtcatcagatctcgccgctgcccccgcctcaatatccatcggcaagtggctgccgccgccgccgccactatcggagggcagaagcggaagctcgaactcctcggaatcgtcgtcgctggccgccgaggcaggggaggcgcccccagggggggcattggacatggcggagcagtccttgcaccaccgcgagaacgacggctccctgcggatcccgccctgtttcctctgccctctactcccctcctcccgcggcttcccggcgccctccgggaggcgctccacggctaccaccggcgcgtcctcctccttcgggacggggtggccattctcgacgacgacgcagtcccccatggacgcgggtggcgctacggcgatgaggccggctctacagcaatttggatctaagagaggcgtggatggatctcatcggcgacggcgagcgaccgcggcggcggccgacgagaagccgcgggagatgggggttttgctttcagcgaggattccggtagcaagtcaaaatcggaacacctcgtctcggcgacttcccgagcggttagctttgcagcttcgcggctggtagtggtagtttcccctgcgggcgaggaggacgctgtttttcagggctttttttttttacgggattttcagggctttttttccccacatggaaaacccttttctttctctctgagttggtatacgtgcacttgacgtatcacatgatttcgcttggagatttgtgaaggtgcgcggcccagcagatggagtcatggagatagcaccggcccatccagcgttgtcggtcagtcggtccaagtaggttggcaatttggcatgacctttaccgctggtcttctccaaagcgtccatttttgcgactagtttagacttgatactcatcatgcctgatctccggtcctcttatcaagtctgtactcatgttgcaacaggtatatctactcacagcactaagggcctgttcactttgatgccaaaaaaaccttaccattaccaaaattttggcatagttttggcaacttgccaaaaatttagcaagatttattatatagttaacaaaatttggtagcaaactaaatgtagccattgttttggcaactttaccaaaatttggtaaggttgaaaatggcatcaaagtgaacaggcatttaaagtcaacaagaaatgcttagagatacagatactcgacgagtagtagaggaaacacttcctatgggaatgctcgaaaaacctcgttggcgaaaaacacaaagtcaactggataagaacatgctcgccaacaatcaatagtggtatagggatgctgaacctaaatagattcgtaagagctctaggagtaaggtggttattgcaagaaaataaagcacgggaaaaggctcgatcgggtgggcctcttaacaccccatgggacaacttggtcagattatttattgtcgcaaaccacaaccctattaattgggacgggtccataatccacttttgtgactcagcctagatctaaggtagacgatcaaaggacttagcaccactagtctacgcaatctccaagagaaaaaaaagaccctaaagcatgccattgaggagagcacgtggatccaagaccttaacttctcaaacattgatgatgtgacggtggagctcatcgacaagctggtcactatctggagcgtagtgcaagagatacaactcgctgacgaccaagtagatgaaattacgtggaagctcgcaagtcgtggagactcgagagcacacattggaatatacctacaagtacagtttctcgattcagtttgcacaaattacgaaataatcattgggaaaacctggggcctgaagaaatgcactctttacttgccttatcgtgcataatagagtgtggatgccaaacagaccagcaatccaaagctggccaacaactcctattgtcatcgcctatgccaggcataccatgagaatggcctaccacctcctcgtggaatgcagatacaaaaagaaaatatggagcatgctatctcatgagaaacttagaccagggaggtggcatgtgtctacgtcggtatacacctagtggatagcgctagcaattgccaaagatctataccaaagaatggagtttgctcgtttatcctcctcatggcttgataggtgtgaaggaaagtaaccaaagagtcttcgagcataaagatcactctacaatagcggtggtggcaaaaattaaggaggaagccaacaccgctttatagctcatcccctgattttacttttctttttacaatttctcgcttttacttgtacaaactatttactcatgttttattcaatgatatcggcacacttagtactagttcgtcaaaacatatactttttttgagctgataatatatatcgttttagaaaataattttaccatgtttttaaccgctctcatcacttagactaatgaaccaacatagttgtgaattaattagtacagctatctttgccgcacttcatcatgtgatagttatttgtttcgctgccacttgctaataaattttgaaaaccaatgataatttgcatgcaacgtgagcagtgtgatcacaaagcctaacattatgcacctgacagcataaatcgcaggaaagagtttactccgagctaaaaactgcgaacatataaacagtcagatccaaaaatcatttcgtcattaatcttccgttcacttccatagaagcaatccagacgaccccaaaatcaaattcagagcacacgacaaaaaccccctcacaaaaagcgtttctctgagtagaagtcagacaaccatgcagtcctgcaccctggagccatttgaattctggaaactgggaaatttggaatctttcgccagataaaccgccaaattattgtgctggagccttgtggagataaaactagccagcgttgccccatgcatttctctagcttacataacaaaagcaccattacaaacagcaagagtataataagctcgagctttacactccagcatccaatgcgcgcaagttaaacaaacacctcaaagcgtgcgcactctgctgcgtgacacagcttttagcagccacgcgtgcaaagatccacgtaggcacgtccgcttcgaatggagcaaatgattggaatcagcagcatccacgtcaactagctaggcaagcacgctccgatgctccatggtgccgaggaagaagaacgtacatcagctgcgcggcggcgcaacggcggcgacgcgggcggggttgagctcgaaccagacctgccggaacaccttgacgatgcagtcgtggtgctcgtcggcgttgagcgagaggtagcacgccaggagcgtctccagctcttccggccggccgatgcgcttgctcgcgatcatctccaccatcgacgcgcggaactcccgctgcgggtcgctcgtccggcgcaccaccgcgaaccgctccagctccgacaccgccgccgccgccgccgacgccacgcgacgcggggaccgcacgcgcacggtggcagccacccgcgcgcccggggtcctcccggagaacgaccgccgcccgccgccgccgctgcggcgccggcgccggcggctccgcggccgcttcttcctcgtccgtgtcggacggcagcagcggcggcgtcgtcttcagcgccgggacgaacggagcaggcaccgggatcggagaagcggcccgggagaacgggatgaggttgcggagggtttggaggtcccggtcgccgccgaccgagtaatggcggcggcggtggtacagctgccgcgcggccgcagcctcggcggtgtcgccgtcgttgccaaccgagaggcggcgcggcgcctgctggtcagcggtcgaggaatccgccagctgctttgcgacgccgcgctcgagctcaagctcacgctcgtgctcgtgtngagctcgcgcccttgaagaagcaagaagggaatccgccagtggcggcgacggcgctcttgtcggccggcgcggcaggcttcggtttagcggcagcagcattgttcttggccgtgagcttcgagagccacgcgagcggcgagaaggacaggaaggccgccctgctcttgttgcccttgtcctcttgctgctcgtgcttgtgctcttcctcttgtgtgcgctgctgcttctctctctggttgtgtctactacttctaagcccccacttcatggctcgcttgctaccaccaggcaccaggttcttggtgtgtctgcccgtgtgtgtgagtgaccttggagtgtgaggagagacgagggagttgcaacgcttttaaagtggggagggttttggcggctaagcgatggactgtgcaatggtatgtccgtatgtgaggttccgtggtgtgtgcctgtgtggtgtacatgtgcatgcaaattctttttttttttgccccttgtgctgctattgggacttggagtttgaactttgatgctggggccatagaggcgtagtagagctttccggcatgccgtagctaggtgggtgaaaaactgaagacagctgctgcacttttcatggcacttctttctggtttctttgtttttctgcctgtgtgggctctggctgattgatttccgtgattggtgctgatttttaagctcacgcttgtgcggtgctgcctgtttgcgacgtttgattgatgtctcactttttcttaattggccatcacagattaaaaagtatgaattactccctctcaactattatggtagtacgatttaccctctaaactataataccggatatttgatgccccaaactcttaaaactgtataaattaccaccttaactcgattcgaagcggtttagcctacgtggcacatacgtggcgatacagtcagcaaaaaacaaataaaaaccagtggggcccaccagtcagtgttttttctctctccttctctgcccctctctctctttctctcagggtgaacaaaggaggtggctagcgcctggtgagcagcaggcgaggagctagggcggggcaggtgggggcagaggcggtgggcgggggcggaggcggctgcggctgacggatgaggagccgaggccagcggcgggcgggagtgagggcggaggcggggcccatggtcctacctcacccctctctctcttttctctctctgccacggggggcacggtgggcacggcggggagggcgagcggcgacggcagacgcgacgcacgagtgtcggtggccgcatccacggcggcaacgcacgagatggagctgcacatgaggcggacggcagtgaggatctccgcctccaacactggccgcccggtcgtgttccgcctcagccgaccgtcgcctaggggatctccgcctcaatcgcctgctggctgctgccggccgcccggtccagctccttcgccgccggtcgcccgggagagctccatctcagccacctgtggcgtgggcaatctccgcatccgtagtcggatgctcgggtgagctccgcctctgccaccggccgtcgagcgcatgcacctcctcctcggcagtcggccgtccgagcgcgtgcgtgagagagagaggattgggttgaggaatgggcatgacaggtgggccccagggagttgtttattttatttttctgactggaatgccacattggagctacgtgtgcaagctcgagtcaaaacctctgaaaacagtgttgaggggggttatttgtccggtatgaatagttgagggtgtaaaatatatggtatttcagtttaggagtataaatcgatcgaccacgatagttgataggggtaatttgtacttttttttctaaaaagaactaccgtaacggcgtaacgcagccctcccttcatggtagtactacattggtaggagtacatgtacgcatactcctattattctgtagtggtggtatagtacaattccttgttgcaatgttccgagattttttatgtttagtacagtaagtactcctggtaggtactgcctagtctttatagctcatcagatccacaagattggatcgctaccctcactggctcgtcagatccacaagttgtcagcggtgcactgtggatttccaccagaaatacagtatccagaacctcacggagttcacaaactagggaggcaccgcgagaggaggaacctgcaggcgtgagcttgaatgtgatccggcctttctacgcgtatgccataggtgcatttttctcatgtggctccgtggattcacatcctctaccataacaaacattaacatctaaaatattaaaaaaaataagatctacatacttataattataataatattgatatcatggtaaagaatcctgctccggctcagtaaaccagcacgcaggcaaagttcgcaaactcacacgacgttccgtctttgcccgcccgcatgctggcgctgcgacgctgcggcctttccttcactcgttcatcacgaagcggcaggcagcgcagaagcggcaggctcgctcagcgcaggtcggggaattgggacggcgacgaatatcgcagtggcacgatgaatttcgcagtagcacagacagaggctttcgccaattcgagtgggtaaaaaagtcgccggttggcggaaagctaagctacgagcgaacgagggagagggaaagaagaagaaaaaggccgtgatggcactgaggttggttggttggtttgggggcccttctacgatcgtgccaacttttcgcctttttttcatctctgcacgttcactgttaacttgtccctttgctgcctctctgatgagtaattcagcagcagcggcagcgagcgctgtgcctctttgtttgaacgagctcccgccatcttatggcttcctttttgtatcggcgtttgatcttttggtgcactctccagtaactctgtgtgggaagtgcagtaaagattttgcaatttcctgtgttgctttcttgcatgaagacatgaataattctgtacaaaccgttgcccggagccccggacaataaagatatacagtgcatggacagtgaggttcgaaccgatcgacgtgctgcaagctgcatgaggaatgtgtgcagatatgcatcttcgccagcttggttcggacttcggagggcatcatcgcatgtagctacccctgtttcagtcataagttcaaaaaaacatctagctccatcgtctcgtttggcctagacaaccaaaaaataagacaaaatttaaatttttgaacttaattttaaagttgattttgaaatgcttttaacgtaatttttgttaatgttggcttttaagtcgctacgaacaaatctacaaaaagttttaattataaattaattttaattttctaataagccaaataaaccattttgggctaaatgggcaaccgatgggagctatcgttgctttctcctctcttttttctggcgtagcacgctgtaggctcacttttagccatgtagtgtgtctgacgaagaaaatgactaaatgatggggagcctatctagagtgtagattgccgtcatagccaactgtccttccgtgtgttttttacatgttgagagcacagtagcatgcgcagttcaaaattcacatatggcacgtactagtaggttggtcctctgacagaattagggtgtacccgcattgcctctagagttgctagctgctgttcttatcaagaagttgagggtacgtgcagactccagaaagcaacgaaggacacgtgaatttcacgtctaataaaaaagaaaacaaacaagttgggtccatgaaacaatcgagctgcaaggcctagtttgtcaaatgggctagattttaattcactagttcagcccatctccacccaagattagtagggtactcctataattaagtactactagtagtctagtacacacatgttgcccacaaggaccgagagataataatgtcaagccgacccgacaaggtaacagattaaaaaaacaagaaggctttgcccctcaataatacagcctcaccgacaaaataatccggtcttaccgaagcccttgaccggagattttgcttttaaaagcacgcgtatctttgacgtttccgggatatgcatggagatggaaccataagcccatgaacatgcatgcagtcagcagtcgtcaagatctgcaggcgttctagactggggaaggcatggcgtgcggccacgccgtcacgtttttggcacctatgtgggtgtttatacaggggtgtaaagttttgacgtgttacatcgaatattatataggatgtcgtatggggtgttcgggcgaaaaaaactaattacagaatccgttagtaaaccgcgagatgaatttactagtctaattaatccatcattagcgaatgtttactgtagcaacacattgtcaaatcatggagcaattaggctcataagattcgtctcgcaaaatagttgcaatatgtggaattagttatttttcagtctatatttaatacttcatgcaggtgttcaaacgttcgatgtgacaatgtgtaaaattttcacttaggatctaaacagtgcctctatatctctagcgcgacatgccgtggcccgtggctattgtatcctgtttattacagcttttctcttatagcgggtttaacggtgtagccaactactagctttaattcatttgtagtcaatttaataattaatttatgcaatagttaactacaaatatatactacatcattaataattggtctcatatgtcatacacacatagcgtcttaaagtctgtgcatttgtagcttatttctcttctctctcctctcttatcttctctatgtgtgtttatagctacttcctccgtttcacaatgtaagtcattctagcattttccatatttatattgatgttaataaatctagatatatattaatatgaatgtgggaaatactaaaatgacttacattgtgaatcggggggagtaacttatattttgttattgtacctaggataacctgcttacataagagccctttcaagattatagatttttcttattgatttttgagaaaccctcataaattaatagctccgtaaggactggtgcacatcttaatttgactttaccgccggataaagagaccttttgttgtgacttgtttggttttttaaaataatggaataacattttggtttttctcaacgatctacaactaattattacaaaatccacacataaacaaattcagtacacactgacatgatataaagaaaacgcaacctaaaagacactaacacaatataaaagaaccctgaattactgaattctattcgagaatctctatccaaagttggcaaacaggtgcataatcgtcgactcaagtttacgacatgcatcatttattaggatatcatcatcgtgcctttgtagcttgatatcatcatcatttattacttgtttggtagacgcgttatattccgtattaggtttttattttggaacgaaaaagtattaaggtagtatacttttttaaatataacttataacgttttagatttataatatttttttatttagataggaatgatcaaacattctagtcaaaagcgaacagtgtcacgcatgtaaaacaacagtgggagtagtatttcttactagataaatacactgtcgcgttgctacgggaaattaagttacataatatgtacaaatatgatgtaatatgattattaaaactaaaaccaattgaaacttattaatttttagcctataaataattgagattgcatgatactatgagagaagaaagaagagacaatttgaacctagacctatcatttaatggttaaaataattgggggtgatgtgacttaatgagagaggggagaaataacaataactacacttagcgaggatgaactatataattacataggattcctcttggataaccggatatatgaatgcaatactctgaacttgcatcaaaagctaacagcgtcacgcatgtaaaacaacgagtagtatttcttattcctcttggataaccggatatatgaatgcaataccttgaacttgcatcatataactccgtgaagatggtgggcttttttttcgagaaaccttcaaaaaaacagctccatacgaggccatgtataatgcgtggccttggacctatggtctcagcctccacgtagactcggatgccaccgtggaggggaagagtggtttcacagtgtgtcggaagagctggtagaggaaacaatggccgaaccgcgcctcaactcagagccacggtctaggtcatggattgggtgaatcagtggcctcagcaagtagctcaaaggaggaggagagagggacctaccagatttgagcatccggcgagctcctctgtgccaccggagagacatcacctcctcgaagatcgtcgtcgtgcgccgccaatgcctccgaggagtccgatgagtcgccagcgttcggatccagcgagccagcgtacggatccaacgagagctcctcctccctgccgccgccgagaactcgtcagtgctgtcaccgagaactccacgctgccaccgagaactcctccccgccaccaccccgtcgtgttgctgccaagctcaccatgccgtcg

SEQ ID NO: 6421 - DNA, 58118 bp, Oryza sativa
agccaagtctgtgagtccggaaaagcaatttctgcaaatcgaagcagaactgtgtaatttccattttcaagtccaaggccgtaatacctcagagatgatggcgacacccttccagtttcaaacaactttgaatcaactacattgttaaaattttgggaactatatataatgttctttgcatctgtggcccggaagtagtgtcctacactgctgacaccccatcttgtttgaccagtaacataatatgttgcagctccaagatttgcaggatctgcttcataaatggtattatctgatcctctcgttgatgtattactaccacagtcaaccgcaaaagaataatctacgatcacaaaattgtaacaatcattaaaattccttagctcatattattgtctttggttcaatgaagattgagaaatgtacattttggagatccacggaaacaaggagtgtcttgttggaggcagtttagcccccaaggtagtctactgtgcaaatttggattgaaaatttaagttgtcagcaagcattcttatagtgcaatagcaaaattataagaattagaactaaattcgtatagtgcactagcaaaattagaactaaatgtcacaattagtatgtacctgttactggtgctaccgagtaaaaagttgtttgccaccaaattcctttcacaaaacagaatattagaatatctatttttttctcagcaacacagatatcataatattacacttacaactgtaaattgttttggctagcccaagaaggaatgctcccagtgagttgattgtacgaaaaatctctgtaaacattacagaattagattatacaggagttaatatattccattatgaaagtaaattgtgctataatgccatgtcgattgtatttgacatacatcgcttttaaggaagagcttataccatcaggcaaccttcctgcaaggttattgttcccaagaaacctgaattgggcacaattcaagatgatcgaacatgttcatctgcttaataggagcttctatcaacaaattaatgtaaaaagaatttcttacaagaactgtagatttcccaaattcaggatggattgagaaactttccctgtgatattgttaaaacttaggtccctgtaccacatgacaaccatattacttgaacatatggtacagaacttgagttaatgattaataatatcatcaattggcaccatggcctgtaattgaaaacttacagcaagcttaacttttcaaacatagaaaaatctactgctccgagatcaccatatatcttgcagttcctcaatattctgtaacaatgaaatccaaccgtggtaacttgcaactagacaatatactgtaagctttatagctgaaatcatcacatacagggtgttcagagaagtcagattactgataagagccaatggagagatcccatttacaatatctccaatccgcctgctcatttatatttttcataaattagttatcagccttgacattatcaaccttcaagagtatacaatgtcacctaaagagtatacttacaaggttgttaatttggtcagattagacaaactttctgggattggtccttcaaatgaatttccttggaaagcactacaatctcataattttagaaaaagggcattgcacattttaaaataagaaaaagatataaaagttctatatgtgaccagtcttaataaaatcactacgtatgtatatgccacctggacaagttactgtgatgcagctttattcatttctatctagcgaggactgaaatgtgaaaatgcaattgtttatagaaatttagttcggtctaacaaaaagtacatcgaggtaccggtacctcatggtaataagtcgtttatgatcgttagatttagctaggtaggatgagcattgttagatcaaaaaatcaaaaacgatttggtactgtgaggtaccggtatctcgagatactttttgttggagcggagcaaatctattgtttataagtctgaatggaaagaacatgatatacagaataatttatcttgcacaaattcatctctctcaaaaataggatagaacatatgagatatgttaataagttaatattaataatcttacatttcttccaaattagtcatgctacctaaataatcaggtattttccctgtgaatccattgtctgatgctagactgcaagcacaccaaaatgtcatttatcatgaaagcatgacgaatataacagctgaggctatgcttttgactatacaggatctgcaggttctgaagttttgagaacgttgaagggaacggaccactgaatccagaactatcaatgtacctgttattgaaagtttgttattgtcatgttcaacaatagatctggccattccaaattttaattcttatagaaatagaaatatgaagttagaaatcaatggagtatcttacaattgcttaagtttggtcaagttgcctagttcttcaggaaggccacctgtgaaattgtttaagctaatgcccctaaatgaaaataaaatatttcaagataagaaattattatcatcaactaatagcaggaaggggcatagtttttcccgatgtgccatttgacccgcaatattcatcatgacaatatgttcatgtttttgctgttcgatcaactttagttgatcatttgaaagttgaaacaacacatgaacagggaagttacattgacgtgcctattacataatatttagtactgagtagtagttatgatttttttattactttattgctcgaacttatgcgattgccatttgttgtactattatattagttcatggagtccaaatatcacttactacaaaaaaatgcacatcaggtcaacactataggtgccataccagctaaaaccggtagctatagtgtttttcccacctccttaggactaaaaacataaaaaactaacacctttaagggactataggtacttgttcttgagaaaaaccgacacgtataatataggtgtcagttaattaaaaaacgacacgtaaaatatattataggtgacgatcaacactataggtgccagactagctaaaaccggtaactatagtgtttttcccacctccccaggctgaaaacataaaaaactaacacctttaagggactatagttgcttgtttttgagaaaaaccgacacgtataatatagatgtcagttaattaaaaaccgacacctaaaatatattataggtgatggtttttcagtaaaacgagccgagaagaaccggtgtgcttgaacccaccacaccaccacccaccagtccactctcttcttcctcttctcttcttcctcctctcttcttcttccttctatcttcctctccacttcttccttctcctctcctccatccatcacggcggcagcacgggagcgggggggggggggggcatggcagtgggacggaggcggcctgtgctggatctggtggtgtggtggtgctggcccctcggctgtggggatctagcaggctggaggtgcggcgcggcaacgacagccggtgtggaggaggtgcgatggcgtcggcagccagtagatccgtctcttcccctccctccctctttgtgatttgttgatatagatgtgatctattgctaatgtagatgtgatctagatgtgtattatttgatctagttgtgttgtttttctagggattattgactatagttcatggatttgaggcaatttttagatatgggttttagttgggatcggcttgacggctcaatgtatcgagctgatattttttgctcgtgtgcgcctaaaaggagctggttttcgaaccggcacctttgaccccgggtaatcagtgctgtcttcctggtaccggttggaaaactgacacctatgatgttttatgtagtagtttatatactccattttctttcgtattacctactattcaagttttgttgcaagtcaaatatatgtactcttggctatcaagttttacaaatgagtatagtttaacatagttagatttatatatatatttttagattcatcatgagaaatattgtgacaatatataattcatactcaattggttaaaaaaacaacttcttgatattttacataggacaacggaaaaatgatgagtaatttggaacagaaggagcagctgaagattaatccgcatatgagaaaatatttcttacaatgaaataagattggtgaggtttccaagttcctttggaagtggtccagatagtggattgaaacccaatgccctttaaataattaagaatagttaagaaacaataacgatcaatggatgaaacatgatatagaacatgtaactcctacaagtatttcatcgaagtgaattttccgatgaatgatggaatgaaaccagtcaagtaattatagttcaagtccctgaaaacaacataaaaaagtagaacaattagccaacataaaaaggatgttgcatggctgactgaaatgtaccctgctgttcacaaagagaatttgtgtgattgaatttttagtctgtgaaaaacttgatctataacgtaactttagtagcaggactagttaagaagaaaaagacttagataccatacaagttctctagacgggtgagattctgtagctctgaaggtatttgaccaaccacgtccaacttatttaccctccttcataacaacagacaagtaatacctataaaaaaatgtgcttgagctattaggtgttgcccaaagagagtgtgcgtacagttttgtaatgcggcatagtgtgttgttgctgaaagtgcaatcgcatttgatgaatgggttgatgttgggatagtaatcccagtcgtttttgtcagcggcgaaaccgctgcagagatcaccgctaacattccactccgatgatgcctccttgccccatctcctcatgatcgtgttcagggccaccgctgcattcatggatgatgtttactaattaactcaccactaataatcatatggatgatagctaggtcattaatgaaatcaaattcctctaactctttctcaatagaaaccggcacctatacatgtatcattccctaatagcatccccagcttatccaaatttcatcctccatattcccatttggatggccattcaaaaatgtttcctactccattttccttttgattccaatagatcattcatattacattctccatgtaccaaaaacctatattttactaatatctttcaactacctttcaacactcccaaaaatcaaaaatagacaatgtatgagaagaactgttgagaaatttgataattcaacctctaaaaaaacttcctcacctttctctctcttctatatccaatgctgagagcctgagaggatgggaaggacatacgaggagggctgaccaccgacgggtagttcaatgggtgggagtaacagggcgcgcgatggggagagaagtggcttggcggcatgggcggaggagcggcgcgagcaggcgtgcggagggtcggcacgggtggcggggggagaagtcacaagcgcaggagcagtgaggacggcaggggagatgccacgggcgtctgcctacttagaggagtctatagaaggaggggggagggcagagtcggatatgtgggcgcgtggcgctttggccgacggtgggtgcagggcaggcgcatgtgaccgatgtcgggagtggccggctcatatgatcatggggcgacgctcaggaccggccgactaaggtggccactagcgcatcctctctctcttctctacattcattccttcacccctccatagctcgatctgatgagggtgggagcagcagttgtggaattgcgtgaggagagagaaagaccatatccggcgtttctctcttcgggatagcgcatgagctatctttggatgcccaaacggcgtatccgctacagaggtggattttctcccaccatacgctatttcatgtaaggaggacgggagagagtatctactggggatgctctaacaggtgctctaacaggtgttctgtagtagtgcgagggacatcatatatcgagcacaaccacaaattactactcctgcaatctaactatacgcatggaggaaaaccaagagacatttaactattcgtcacttttaggttattgatatatgagtgctcacatgtcatcgactatagatgataatttattaaatttcacatcttaaatatgtaaatgtcaaaaaacgaaagaagatagacatacgtggtgcgtcaatacacaccgtacatgattgctggcttgcttaccttcgactggatcagtttttggtgcttgttgatcctgagctgctgcaacccgccatgaccatacaaacaccagacaccacacggaatggcgaatgacacctctggaagaacgcatctctctctctctctctctctctctgctgaaacaacactgcgtggctttgttttttcttttttaacactgcgtggcttgttaaagacgtacacgacctcctatatattcgtataatatgtagagtatatgcacgtgcaaaataccggtcaactaattgcacgcgctggttaaccagacccgtcactattgataacgatatatagagcatgtgttttaccctccacaatcaatttaagggactatctaaaaactgccgcaagtattttatggaaaaagctttcaaatctacaattatacttccattatacctatactataactatataatatatattaaaataaaatatacaactttatatctaacttatattgatattacaatgcctttagagtgcacttatacattgtagttacactataaagatactatagttatacattatagttttttgcccaaaaaatttgtgacagtttttttagcaattcggtcagaaggccttgcaaatttaaatccatgctttgataaatccgacttatcaaagacaaaaataattggaaaacagctctaaaactatagtgacagctatcaataatctttaatttcaggattagcattgttttgttcagttttacatccttcattttttgtccaacgcgtcgtgtatagttaggtcttagtcatgcatatggtttcaagttttacaccgttcgtcgacccaccattgttttgactgcctgcagccgaaggaaaaccttgccgtggaaaggaaaaagtctacaagcaagcaatcaagcacaaaggtgatgggaacgaagtcattggagctcttatcaccacacatgagaaactgtgaaaccacgtgtggttttgattcattgtgatggaaaattggcaagtgctggaagtacaggaaatgtgtacgtggactaacgtgggtcaggttgcgttatctatacacaaacaacggtcgtttacatgtctataggtaatgcaagtcaaccttggccaatggcataactaggtctatgctcaaggaggagtattagtcttgtgtggttgggatactatgtgacagggttgtacggacgtcacgatcattggcggtcaaccttggtcaattaatggcatatcgagactaaactcagggaggagtcgaagtccaaaacggccaaggatgtcgggtaacaaagttgagtacaagacggtgcatgctggataaataatgtggtggaaggacttcacaacagactacacaatgtcaagtgtgccaagaaaattgatgaagaacaagaaaagggaaaacacagagaaagagggaggcgggccaagcactggagcccaagacaacctcctctcccaccaccggattggcctagcacggcccaacaccgtatgcacgcaggctcaagcggaagagcacgggacgcatggcaccaactagttgggatcttcctctagttggcaggtgagcccacccaggacggcacgtgaagagaacgtggcgcgggcatggggtccactcggagtggacgtggcctccaatcgtgaggcgtggggccgtaccggccacccggcggcttttgtctcgggagagcgcaggcgatgtggctccttccgactggcgcacgcggcatctcccactggctggagggcccacgcgcatgcaggagaaaggcggagccgtggcaatcggtaattggggcgcgcgatgtcgagattgatcccaaggcatgcgtgggtagtagcggcgcggatcatccgtggaaaaggtggacttgttgtggcggacatgttgtggctagctacatgtcagtgatatgaggcttttcctttgaagtggaggaacaacggatggcccagattttatctgagctagtgttttgccctaagagcatttgtgacattgtcttagttaggggatttcagccacattggacaataataaggggtggatgcttggtgagaggtctccctttgagtcgcctatacaccttggtgtgagagagccttcatagctttcgtgtgtgattttaaattcaaatccaatgtgaagatgtattttttagtgtgttagtctcacggcagcgactactcatacgtctactgtagacaatccgacaatagaggagaacctggtgaagcatcgagttcgacctaagcgtatcaagtgggccaatgtcagaatcgctaggccggaatggatcatgggctgatgtattcgcgcggctatataagcgcagtaggtggaagggaaaagaggtcgaatgaattgtattctgaactatctcctaaactgaatacttcttccccttccccaagtctgaatatctctctctctctctctctgtgtgtgtgttcttcgcctgttcgactctgttctatcttcttcctctgaaactttccagaaatcaacagagttcgtaacaataggtatcagagcaatcgatcctggattacttggagaaaccacgctatcattctcgtgcgtagctcaagcttcggtggggttgttggaggaaatcaagcccatggtggtggagctagcggggtggaagccaaccatagacaaggcggtggtggagttgcgagaggatattggggacttgcgtcatcaagtgaatcagctctcaaaacagcaagccagtgctatcaagccagcggagcggccgccgctgcttcccacatcgccaggatctcgtccgctgccgaaggaggaggagacttgtccaagtcatggtgacatgggtcacggcccgttaggccaccgcgcgggaatttcactccggggaaaggcgattgggaagaatacctctccattgtctctcccgggcaagggtacatttactcctcaatttgcttctcgaaatgagggacgtgattttggggattcagtggggcggaattttgggggatttccttatggtggtgtgaatccgtgagtggactgtcctcaatttgatagagagaatcctagagcatggaaattgaaatgtgagacttacttccaagtgagtggtattagatcagatgtgtgggtgggagtagccgccttgcagttcataggtggagatttgacttggttgcaatctactaatgctcacgtagatttgataagttggggtgaattctgtgagccagtttgtgctaagttcgggcgtgaggggtttcaaactctaattcgacagtttaataggctacgccaaactgggtatgtgcttagctatgctgaaaaatttagtgagttagtacacagcttccatgcacatcactgttgacggtcgttatcaattagttttgaccgtcaatattaccaaaatagaggagaactagtgatgcttgcaatgcatatatctgttagaataataatattccactagtattaggtatactaacctattgcagagaatgacaataaagtggaggagaatcgacatcaactcaaacgataaatcaatcaaacgatgtcgatgtcgcgcccagaaattcccgaatagaattccaagcagaatgtgcattaaattccccgtccaggaccggccggggtacacaaacaagaatgttgacattcagatcctcgtcttacaaacaccataaaagacttacataaatgcagcggaaaaacgaaagacaacaggagcaaagccttgactagatctgcagtgggaacaccactccacaggcatcctcgacggcacggacgaagcctactcctcggagaaaccttcatctgacacgtactcgtgctctggggttgggaaaaatagagcaagactgagtactacccactatactcagcaagtcataccggaataggggtatgatgcagggaattatcaaaggagagctagagtggttcatttgcataaaacgagcatttataaacagaagttgaaagatttaaacggttgtaataattaattaatattaactatccactgtccaacgctatcccacgttgcgacaggcccaaccatccacctaaactatccaaattcaaaagattacactagggtgagactaatcacggtgaatctggttgaccgcccataaccgcgggcacggctattcgaatagttttactctgatcagaggtgtagaactgtacccacaagacacagccccacgacacgttcccgtgcgccgacatgccaccacgacataccggaaagaggccgtgacaggacccttcgcataacccccctctaaccaagcacaccacacctcaggtttcatccccactcctcgcaaggcagcgggcagtcccctctcgtgcctaggtgaatccggaagccgcataggccgtcgcagggcccatccgaactccatcacgcccatccttgcctggatgcgtcggctagaggaaagctacactacaagcccagccattgcccacgctggcttgtgattagtatgataagttcttccagggcatcccgcgaaccggtccttaactgccatgggtgcgaccagcaaaaccatgcacccacagcccaccatgtgatttattttaatgaacaaacacaaagcggtggcactaatccaacaataccattagaaccaacagtctaaacattaataaggttttccccattgtgcactagttgaactaagcatgattaagcaatccctagtccaatctctagtcatgttataaccccaagctgacaaagagacatggtacaacaatagcatggctatgacaataggtaaacatcccatagtaacattataaaacgatgcaatatttgaaggaaaacaatagagcatttgcaatataggatcaacatgttcaagtgacaagcatgacttgtcttgctctgctgcaggaggaacctcggcgactatttcgaagtacatcggagcgtcggacgaaccggaatctagcgacatacaaggcaaacattgcaaacaggctataagactactgaaacagagaacaaaaccatttttaatggattctacacatttttcttaatttactgagacttgaatgggcttaaacggagctcggatgaattagttatgaattttagaagattcactgtgtttattactataaaagaaaaaccttaaatcatttattgcgcaataaatcccagggctgacgtcagcacggagggggggaaagacggcgccgacatgcggggcccaccggtcagcggctcgggagagggaggaaggggcgccggcacgcggggcccaccggtcagcgactcaagggggagggcggttcaccgtggaccgggaccacgcgggtggtccactgccggtccacggaaccgacggtccagatcgccctcagggtcgatcggacgggcggcggcgacccggctcggctcaaggccgaccgaccagccgcggcgacggcgacggcacgcgcacacgcgaacgcgttaccggcaacggcagccggcggtggagacggcggcgcaaaggcggcgccgacgggcggtggtgctaaagcgacggctaacgggcggcggcgctaaagcggcggctaggagggagagggaggggaatagaagggagagggcgcctcaccgagggtggccggcgcggaggaagacgacggcgaacggcgatggcgagccacgggaggacgacggccactggcggacgggattcggggtgccctaaagaaggagaagagagagattagagggagggagatgaaccacggcgacctgtattcatggccgaaagcgcggtagcggttgaactcaccggagcgcgaggggatgcgaattccggccactaaactcgaccgggaagcggcggccggggtggagcttagcctcgcgaacccgacggcggcgacggcgcggtgcggcggcgaccctagcggcagctagcggcggccggagtagcgaaaacggcggcggcgggtggttgcacggcgcgggagcgatggggagcacgagggagtttggcgagaaggggaaaaagcgagagggagcgatggggaagcttaaataggggaggggagggccggacgtggccgggagaggcgggttttcgccggccaacgtggggagtgggggaggagagagaggcggtattcgaaaaccgaatcccggccatctcgggcgcgggcgcgggcgggagagagaggggagtgggcgcgggagatgcggtgcacgcgcggacgtggctgacgtggcccggaaaaggcggaggcgtggacgcggcggtggttgcgggcgcggcggcgccggctggagtaaggggacgggtctgataggtggggcccacctatcggcgtcccggggagagagggaggggcggcttggctgggcctcggcctgcggccggcccagcagggaggagggagagaaaaggagagaatgggccagcggcccattcgaaaaagggagagaaaaagaaaaagaaaaaggagaaaaggatttcctggaattaaaatattgcttgctcaattttaactggttaaaattatttctagggctctgaaaattccactaaaaatcctgttagtgaatttcgacatgtagaactcaagaaaaattccacatgccagttccgattattattcgcattgatttaaaagggtttactcttgctttgcactggtattttcgtagggtcgcttataaattaaatttttggcttgggaggagaacttcggggtgtgacagtcgagaaccagacttatgtatgaatgggccaagaactcaggattgacacgacacactgggccaaatttcacaagtctacgaagaggaacaccggaggaggccaccagccaacttgtgggctggttgggccagcccagggttcggctaaaccaggggttcggccgaaccaatgccagcgccgatggatgcagggttttgagggaacagtggagattcactccctatggcggttggagggtattaccgacctttccaaccaccataaccgtcattacctgcctatttaaggagttcactctcttcacttcaacacacacctcaagcaagagctctctcatttctctcaagtttagtttagtagtatctagttggtggaataggaatagagtagaaatcaggagtccagaagccttcggaagagttcgggtatgactctagtagctttcctttcctcttttgaaagctttgtacttttattagaatactcttctatatacatttatggtattgaaatactttccgagtatataagtacgtactttacattatgttcatgttatactgaatatacggctagggtatctgcgagatgctttggtgcgggtataatgtttgcatatgcaattactctctgtcatgacgatgatattagagtagtatctgatattttagacgtggtgcctagattacgggatatcattatttggggttatatactgcggataagaggtgggccgctgacggtgacagcttagtacgggtattcctccgcgccggtatataattcaaagttaattccctggggaggttattcctccgtattgagccccggttgtatggttatgacgggctgttgtaaggaactcggcagtcaggggtggcttctcgaagtacaaggagggcatcggatagagggtattagctgtatatcggttaactagaatgtatgtatactatgtatattagaagtacaggaatagattttctttctcttttctttccacttagcttagataatatattatgagaatgagtagctaatgcttgtgtgtcactctacccttagattatcttaacccctacttagaatatgattatcacaagtaatatataaattattagtcaagttctctctacatgatcttcccacaggataaaataaatacgatacccttggaatactctcgggtgaaatgctacaatggtatattcatgcgcttgcggatgaactctgtaaccataatataccagaagtatttctgcgctattgctgggaattatatttctagtaatgacgttaagaaatacgaacaatcacccatcctggaatacaatgttctttgtcacccagtttgtggaaggattgagagctgaaattagagcggctgttataatgcatcgacccgaagatttgggtactgctgtggatcttgcccgtttacaggaggaggtgttggaggcgatcaggagggaatctcgtcgtcctgagacaagttccagcagtcggactaccaatttttgttcggccacagtgtttccagtgggacaacctcgtaccattttggcagctggaactcgttctgataagcgcatgtctcgggtggaggacaaagtagctgctcttcatgctattctcaaggctaaggggctctgttacacttgcggtgagcgttggagcagagatcataaatatggtccaactgtgcaacttcatgtggtggaagagctattggaattccgggattcttcttctaaagagaggggtgatgaggagaaggattctgctgttattcctaactctgaatatgaaggtgaagtgtgtcagatttccaaagaagctatgcaaggcactgagacaagtggtactctcagacttcaagggttgattcaacacaatgaaattctaatgttagtcaactctggcagttcacacagctttatttcagagggattggccgataaatggactcagcagcgacatgttttgtcacctatcaaggtcaaagttgctgatgggggtattttggagtgtgttactgagttggaggattgtctttggtgtgtacaagggatatcctttcaatctaacttcaaggttttaccactcggcagctatgatgtaattttgggcatggattggttagagcaacatagcccaatgcaaatcaattggcgagcgaaaaccttgcagtttcagtataagcagcgtgcagtttgtcttaaaggtgtttcagctaatattgctcttttccctagtatcactggtaatcaagttaagggactagtccatcgtaatgcggtgttgcatgctgtggaattttgttcgttggtggaagaatcgtcatcttcttctctgcctacagaaattgctcagttacttgaggaattttctgctgtctttgacgaacttcagggtttaccaccagctggatatttgatcactctattcctctactgccaggagctcatccagttaaccttcgaccttaccgatataatcctgctcagaagaatgagattgagcatcaagtgtctgatatgttacagcagggagttatacagccgagttctagccctttttcttctccagtgttgctggttcttaagaaggatctcacttggcgtttttgcattgactatagacacttaaatgccattacagtaaagaatcgttaccctcttccaataatcgatgaactattggatgaattggctgcttcttgtttattcacaagtttggacttgcaagctggatatcaccagattaggatgcggcttgaagatgtgcacaagactgcactgaaaacccacaatggtcactatgagtttcgggtgatgtcatttgggcttactgctgcgccggccacttttcaagagctgatgaacacaattctatctcctctactgcggaaaggagtgttggtcttcattgatgatattctagtttacagtacatctttggatcagcatgtgtctttacttcggtaggtgtttcagctattggctcaacatcaactaaaagttaaacgttccaaatattcatttgcacagactagtcttacgtatttgggacatgtgatcagtttggctggtgtggctactgatacaaagaatattcaagcagtttaatcttggtctattccacagaatgttaaggaagttcgtggttttcttggtttggctgggtactaccgcaaatttgtgcgtcattttggaattatcagtcgacctctcaaagatttactgaagaaaaatgtggtgtttgtttggagttcagaacatcaggcggctttcgatgctctgaagttagcgcttactactgctcctgtattggcgttgccggatttcactaagcaatttgagattgaaacggatgcttctgataaaggggtgggagcagtattaatgcagtcaggatatcctttggctttcctcagtcgttctttggggccccagaacagaggtttgtcgacctatgaaaaagagtgccttgctattttactcgctgttgatcattggagatcatatttgcaatttggtgaatttgtcattcgtactgaccagcgcagtttgacacatctggatgatcaatgttggttactccctggcaacaacgtgctctcactaaatttttgggtcttcagtatcgcttggtctattaaaagggattagaaaaccgagctgctgatgctttatctcgttgctctcatggagaagtgttacagttgagtgctttgtcatcttgcattccgacttggttggaagaagtagagaatgggtatgctgctgacctggctacttctcaactcatttctcagatagtattatctccagagcagtttctagattatactctgacagatgggattcttcgcttcaaaggctgtatttggttgggttcgaattccactttgcagaccagagtgttgatagctttccactgctcagctattggaggtcattcagggattcaggtcacatacagtcgagtgcatcgtttgtttgcttggcccggcctcaaacgtgttgtccggatgtttgttaacacttgtgaggtatgcaaacaagctaagtctgaaagagtgaaatatcctggtttgttgcaaccgctaccggtccctgatcatgcttggtagacgatctccttggattttattgaggggttacctatatcagccggctttgattgtatttttgtggttgtggacaaattcagtcgttatgtgtcacatcctgattttcgttttaggatttataaattatttaataaattattattagaatttatattaaatgttcattaatttacaagtgaagttaaatgtgggaaataaaattcttaaatataaagcatggatggatttaatttttatgaaattctccatggttaattatactctctgaaatttctcggatttttcggagctcaattcctaattttaatcatacaaagaacattttagtaattacccacatattaaattaatcattaaattgcctgattataatcttgttaagtactttgagtgtccaagtattttcaggatttttcttgaaattatttgagcattggaagtatttttaacaattcaaagatcatttcagtgattattttaattagaaaaagttttaaatcttcccctaagccgtgggctgattccagcccatctccgtcctttgtgtgcacggctgtgcagcccatgtcggcccagccgagctcccccttctctttctttctttgctttgttttcagccagcccaagagggaaagtatactttccgtccctgtcactacagtatcgtcttcaacctctggcagcttacctgagaccgaattggctcggtttttcccctccaaatccgaccttttctcttgtgttttcctaaaattagttgaggggaaattatctcctccttatcatatttctttccctaaagtttcggagatcaattttgctcggataaaccgaatcgaattcgttttcgagtttatctctccacctaaccctcggatttttctggctcaaatcctttcgttttgagttcgatctctctcacccatgactatataaagcatcccctagtcgtcctcttccgtttgccccaagtcccgagctctaccgttgcccgtagcgcggccaccgcgtagccctagccgttgccgtcgttgtcatcgttccagccgcgccgcgctgtggttgtggtcgccgtcgccgcttagcgtcatcaccgtcgggttcacgcggaggaggagcacctcggccgcccctttgcagccgccgaagaccgtcggagagccgtcgtcgccgtcaagtcaagccgagccggcgttggagttcgtcgccggccttcgttcgtcgttgttctttacaccggtgagttcgcgtcgtcgtcgtcttcgcatgggtgtactcggaagacccagccgagtcctctagctccggcgacctcatggttcagagccatggccggcgatgatgtcatcgtgacatcataaatcttttttttagtttttctgtattagatgaaatctgattaaacttcagaaattcataactaaatcatcataactcggattcaagtggttcaaattgctaaattcatgtaaaatcgatatccacatgttaaaaatatccacatgtactgtttatgcttgttttttactgttttgttgattttatttatttgctttagtttcggacgttccggaggagagcgtttacgttgaggaaggttcagaagcgtttgaggaagctcaaggcaagtcacacagatcccaaataaccctttaagcaggttgaaccagtttaaagctaatgttttatttcaacttatgcattattttcgaatgtcatcgagttgtgagcctttcccatttaattatggccaacaatgactttattttcctatgagtaataaattaattagcttgaaccttatatattggtttggtttagctaaatgctatatatataattgcttagccatgcttagaaacattagctcattaatgggctgaatcaccttacattattacttatggttatatttaatgttagctcacgatggttaatcgtgttatgataattaattgataattagagtctgattaaaggtgggttgtgagcacatggttttgatggtcgtgctcatgacaattaaggaccggttcacgagctactgttgtgaaacattaaccgtgccaatcacaagccagcgtgggcaacggctttatcttttgtatagcatgattcattgcggggtgccagactgagaagcggcgagaagtccgtgggggtcgctggggagtccatgcctctggttatagttatagagggggtgattatgatccaggaatggtgcactgtggtgagttgtgttgtgcagagagtattgtcacaacctctattcgggtactttctagtatcgcgacgcatggtagacatgatgttgaggctgtgtcttgtgggtacagtggtacacctctggccagagtaaaagtattcgaatagccgtgcccgctgttatgggcgggttgagcaatgtttttcgtgattactctcacacctctcacaaaaattattgatgctataactggtaataatttgcttagctcctggtttggagttagatctgtgcagccgggtttggttgtttagaagtgtgctgttcagtgttgattaaaattgatgattactctactgttttactattcttaaatatttgttaaatgctgcttttgcaaatgagtctatattatgccatcctttggtatccttgtgcacttgcatatttgctgtgtggcttgttgagtatgtcatatgctcaccttgcaataatcaatcaacctcagttgaagaaaaaggatccagaaggagaagacgtttggcttataccctagttgagctgcctgtgggagtggagctgaaaccatcgctagatcgtttttccgctgctgtttttttttcttttgtaagaatataacgatattattatgatggatttgtatattaaattgcctcggttgattcctggacgaggattttatgcacaaataagttcggaagttactagtgaattctgggcgtgacattatgctcattttgtggcgttaacacatccatttactgcttttgatgtgggtttggcatatttgaacaacatgtacaagttacatggattgcctcagcatatcatttctggttggaacgtatctttacaagtgccttgtggacagaactttttcgcttggcagatacacaattgaaaatgagttccgcatatcatccgcaggctgacgggcagaccgaaagggtgaatcagtgtctggaaacttttttgtgatgttttattcatgcttgcccgaagaaatgatttcaatggcttgccctggcagaattttcgtataatacggcttatcactcagcacttgacacctctccgtttgaagttctttatggacatccacccagacattttggtggtttggatatttctgagtgtgtagtatctctaaagaacgatcactagtttacttcgtcagcatttgctgcgagctcaacaaggaatgaagtcacaagctgacaagaagcgttctgaccgtacctttcaagtcggtggttggatttttcacaaggctcaaccttatgcacaatcatctttggctgttcgttctaatcacaaattggcgttttgctactttgggccttttcaagtgctagctaaagtaggagtcgtggcctaccgtttgcagcttccattggattgcgctattcatccggtgttatgtctctcagcttcgtcaagcatcttaccccgctcaacctactgatgttcgtcttcctcctgctgttccacctgaagatattgttcctgtggaaattcttgaacgacgcgtggtcaaaagaggagatcatgcgacagaacaggtgaagattcgctgcaaggtcactcgtcggctgagtctacttgggaggatgctgcagctctccacctgcattttcctgaagcaccgccttgggggcaggctagttccgaaggagggaggaatgtcacggcagcgactactcatacgtctactgtggacaatccgacaacagagaacccggtgaagcattgagttcgacctgagcgtatcaagcgggccaatgtcagaatcgctgggccagaatggatcatgggctgatgtattcgcgcggctatataagcgcactaggtggaagggaaaagaggtcgaattaattgtattctgaactatctcctaaactgaatacttcttccccttccccaagtctgaatatctctctctctctctgtgttcttcccctgttcgactctgttctatcttcttcctctcaaactttccagaaatcaacagagttcgtaacagttagctccactcttttgtaatgatatgatttgaatttattttatgtaatttaaattcctgtatttacttcatgcaatttaaattccgcatgagttttgcctctcctattaatttctgtggagtgtgtttctactctctctctccaattcttcgatctcgtattcctagcgaggaacgtagaggcaaccttatatagccctcgagctatttgagagggagttcaatttgagaggttgaactcctcatctgagtagggttctttgtagctttttttaacctcctcctagatctagctttccacataactatgatcttaaggaaatgtttgatagaaattttaaacgagtattatgggggaagaattttgggacaattttgttcttgccccaactttgattgccaatattgattttgcccctgttttttagggttttcgtttttaccctaattttttaaatgaatcaaccgtttgcccctgttccgttaattcttgctaacggtgttaaatgtggagggtaaaaagacaagtaaaccattagatattttcccgtacttttgatataatcaaaatacaaatctattgatgccatactatagcagtaatttaatttgtcaaaaaattgtgaaagtttgccaaaatttgggtcaaatttgaaagtggtgtacaaaagtaccggaaaatatctaagggtatacttatcctttctaccccgcaatgaacaccgttagcaagaattaacagaatagaggtaaacggctgtttcgtttaaaaaaaaagtagggataaaaacgaaaacctaaaatataggggcaaaatcaatattgaaaatcgaagtagagacaagaacgaaattgccccaacaatttttgtacgctttattcatgcccacactagagcgggtagaggtcctaaaaaacagccgactttttctggacttacatagttacatatggatggatgtgcggtagccttctgagcggtggaagatatctcagagaattaacccaagcctttcgagagtaataggtttttttatctacaagccaaggtgcatctaagagatcagctctacctaaatctgaaataacaagtatgtgtacctttggttgaggatttatattgctcctccttattactgtctctatttctaaatcactactataaaaaaacatttttgcaaacgggccaaagcgatttttccaggtggccatccactccgcatgaacttcaaagcatgcgaaaatacacgatttttgtaggcggacatttgtccctcctgcaaaaatgattttagcaggcggcatctccatattcgtaggcactatagccacctgcttgcgaaaatgttttcggagaaaaaaaaagccaccacccacccgctgctgccctctccccctctggccatgccaccgccttcgccccctccgccagatctgtgagggagacaaagagggagtgggggagggagggtaggggaatcgcaccaccgtcgacttccatgacgacgaaaaagacgaccatgacgacgaggaagatgaccacacccgtcacctgatccgccgcacccgcacgtcgccatccaggaactgccaccccgcccgtcaccatctccagctgccgaggtagagtagagctgaggagaggagagggacgggagctacaccgcccctcccctccggccacgctgatcccctcccctcggttcgcgccaccaccgacgcccctccccttcggccgagccgccgctgacgccgctccttgtcaccaataccaccacccacacctccccttcggccatgttgccgccattgcccctcctctccgcccgcgccgctgcaaacgcccctcccctctgcctgcgacaccgttgacgcccctcccgtccacccgagctgccaccgacgccgctcctcgttgccgataccccgactacccacaccgctcctcctcggagccaccgctgacgatgccgcccctgccctctgagccgtgcgtgagagagaagaaaggtcgagaggataaggataaggatggtggagagaaaagagtagtggatggtggaggaaaggataagatgggacgcaatattatttttggtgagctgcaggcacgattttcatagacggaggacaatctcagccccattgtcaatttcgtaggtggccatttacttccaagatgcctatccgcctagaaaaaatatatattatcgtctgaaaattggtttttctagtagtgaatatttgatattggttagttcaaaattgaaaatgtagggctgccacgataccctttgcaggaggactatgttcccgattatttcatttttcgtgatctacttttttgtttggagaaaaggtaatggaaacaaatctgatgtttatatacacagaagtgcttgtacaaaatcgaaagatacatcattaatacttaaactacagatctcataacaaagagaagaaaaacaaaaccaaaactacttgactaagcatcaaaactacattcgttctgtcctgctttcacaaaacaacactgaagtgatcttgatagattttccgaatggatccacatgtcctgacacatattaccttcgcccaccgacgctctctagcagaggcagagaagaagaggccctgccaataccatttgcgttccacgaatggatcctgcacaaacacctcatatcccgtggcacttaagcctccgatctaacatagttccttaaccattgtcaacacctccaaaaagcctttcgtccactcctcgccgtcctcacatgaacgctagctgtatctagccattagaccgaatccagtctccacggttgccgctagcaccgtcactgagcttattgttatcctaccaaagcccctccttgttgtcctaccagatctagcaatgatctggcagccagcacacctagggccctcgccgctgaccatcgtcaccgtcgtccacaccacaacgttgaaatgtacaggctgccacgttgaggaagccgcccctccaaccggagttgatgccgtcttccgccttcaattatctcgtgccacccctccagtcagaaccggtgccatagcccctgccaatgccgtctaaccaccgcctccatcgcagcctcaccaccctgccaaccaaagccgaacgcccgcctccaacgtcgttgtgcccccaccacttggagccaaggtaaagaatcaccactagcggctagcaaaggtgaatggcgagacaaaggggagagatgaccatccgtccaaccgcctgccaccataataaacaggtgctgccggccagcctatgtcggcgtgccaccaccaaactcaagcgtgtgtcatagtgaatgtggatctagaagagagagtgataaggacacggctatggtgcccggatttgtcccaatctttcacagtaaccaaaagatagcaaataatacagaccattgactagataaattgagcagcaattaattttcaaataaactagcagaaccaaatagccactccataaaatatagtgacaaaatagttgtgcaaatctcgcaaatatactccacccatgcggcaagggagtcacacgatcagagaacgaatacttctgtagaaatcaaagatgtgcccaagaaattgattcccgagcacactcctgttggttgattttgtggacttgtggcgataaaaattaggagatgggctaaaccaccggtttccttatcctaacaagaaacaaactaagagataaatctgttttgtgtgatcggtacaaaatagactcgaattttagattgagatagacccccgagccccaccagtgtcacctataaaaggaaagagaaggagggaggcaggtgacgacttatctcactctaacctcaaaccctaaattaatcacccgatcgatcaaggcactggaaggggttcatgaggtatctcacaacagaagaaacaatgaagaagaaagaagaagagcaatggcttcatctcaggtcagttagatcaattaattttcgcataagcagaaggtgaccatgtttaggctaagactcaattatttaattggaataaattccaacattgtggtatcagagcctaatcttagccttcttgttaacagtgaaatttggtaagcccggagtagtcatcgacttagagtcagcatcggcttcgaagtcttgagattagccgatgagagttgtcaagtcatcagttgtcggattcttgctatattcggttaaggaaattgatctactagatgaagcttatctagaagagaccgagttcaaagagaatgtggcatggcaagttatctattaattaggaatagtttgttagtttccttttatctttaggaaagtgtgtttagtgtcctataaggattttatcttttccttttatctttaggaaagtttctttcttgtccgatgaggacttgtatcaacccatgggtataaatatgtacacctaggatctgtgtaatttatcgctacgatcaatacaatttgacgcatcgccaccctttttacttctacttttgtttttacgttccggcggaacttggcacccgatgcagggctgcatcgtcttcgatctctggcgaagggataagtccaatgttccgccggcccaggcaattgtatcgtctacatcggcgtagttcaaggctgcatcagtacattcgacctcttggattgctttggtttggatgatatacttgcctacctatttatcatatgtctatgttaatctagtcttagcatatcaatttagctctatcggctgcttctcgttttagggtttctgccggtatcggctaaatctcatatgtctctgttaatcttgtcaggtgcaggatcaaactgactggcacgcccgcatctcatcaatctttgaacctgcacaggagctaagcagatctcccaggccggtgtgttcgattttttcatcaacacttctttatcccatcatccctaagtgaagccattatgccaattaaaccctaatttctattcggcatgcatgatgcgattttgagttaattagattagattaatccctttgccttggttgcataagcgaagccctgttatactgctgatctcggccaactgctgatctcggccaacagtagaagaagcaaaattattgaagagtttaattttgttgatttttatgagaagaagaggattgggataaacaagattgaaattcccaattcaaacactaagaattcctagaccgatgctaaggtttcggctagcactcagcaaacaagaaaggggataaactagattgaaattccccattatcaagcaaaagggaataaacaagattgaaatttcccgaaatccccaataagccggatccaattggcctaaaatccccaaatgaggaagcctaatttttgggggaagaaccctaagtcacaaatatccgaattaaatgcaaattcaagtcaaaattaggtttgagtttgggttacttatcggatttagaccccctaagattgccggcgcacaccggcctcctcggggcagtgccggttgaccgccgtgcgcgcaccaccttggagctcgtctctccaccgtccctcgccggggacgggaaacgtcggcttggcagctgccttcgtgctcttgccccaccccgatgaggtccggccgcatcgccgccgcctcgccggactgccgacgccttggcacaacggcttggcgccgccctcgggggcgccccccagccggctgagatggagccgctgcggcacttgtcgccacacgcgtgcgccgcctcgtcggaccgccgtcgcaacatcgccgccgattcgctcgctcgctcgccggacgccgaatcgggaatagaaggggataagaatgagctagggttaggtctcacacccattcccccctggcgagcgatttcttcagtgcgggcgaaatcttggccgtccgtttgatcagatggccgccctcgctcccgcatcgggccgtcgccgtcatgggccaagctgatctgggccacgtccgccaaagcgccgagcgcgcacataaatgggccggtccattttgggccagcttttcgataagagtgggcctttattttttatttattaagcccatgattttaattcctcagaatgtgttatatctttattagctaaattttagcccgattttagccttttttttatgggccggcttaggaagtgatgagccgtattattattttaagcccgccatttatgttttatgtatttccagaaatttatttatgacctttcttagccattaaaaattgctggaaaattatggtcaattatttgatcactcagaaaattatttctagttaaatggaaccaacaggaagtttagctagaaagaaattaatgatatgatattatatttgaccaatgttaatatgatttcatgtcaatatttattaagattattatttccttaagccacttaatttattcctagttgaatagaaatttaactagaaagtatttatgatttcatgtcaacatcattatgatggtcagtgccttagtaacttaattatttatagtcgaatggaaccaacgagaaattcgagtagaaagcattaagatctgaagttatatttaacccacgtttttataattgcatgtcaattataatttttttattccttagttattttctaccaaatggtgatataattaaggaataaattttaagattattcataattatttatgaccaatggtgttttgactatgaaattctaagtttattttgcatatgattgactaagccaaggtgaattaattatatgcaattggcaatgtttattatttaagatcagttgcaatacttggtaaatatttctagattaatggaaccaacagaatgtttatctagaaagaaaaaatatttcattaagatagtaatttccttaattattttttgcccaacggtgatgtaattaagggaagaaatctaagtattgtcaatcgttattttaattttctctgtcattttggccttaacggtgattagacttagaattttatttatgccattagtgcattaattcctttgtcacttctaccttatggtgatgtgatcaaggatctaatctatcagtaagcttaattcctttaccatttctgcccaacggtgatatggctaaggattttaattttaattctatggcatcactaatggcgtcatttcctatatcatttctaccgtatggtgatttgatttgggattttaaattatttacattatcacttctaacctttggtgatgtgacttaagacattaatgtttattccctaatcagttctgcccaacggtgatttgatttttggattataagtaatttcatttaatgattctttcgccttgtctcttcccaacggtgagacaaagcgaaataaagattaagctatcgttattgtgtaagtgattgtaataatgtacatcatttgcacaagcaaccacaataatagtgccacttaatattttagcaataaataatgttgtttatcagttaaagtctatggaattattattatttttcctcattgacttaactgagcctaaggcctacttgagtatgacttggcattgacaaaggattccttatggctcccgtagctaatgtcactaatttttttttctaaactcaagaggcatctttagcctgggagtaggccaatataatgttatgtttcgcatatcactcataaacattaagattatcatccctgttggtgttaggggagaattttgagcatgactttgcaaaactgtatctagcaaacgttgagatgaacttttagaagtttgtgaaaactaatgcttagtacaattttagtgcctatgcacatttgccgccataatttaaaaggtagcacaagaaataaatcataaggcgtgcaaacttagtgggatggacatcgaacatttcatatgcgccacttgtccatttcatattatttttctcccattagactacggtcattttcagttatgtaatactaagacaaagtggaccataattgacttggttcatcattccacaaatcaataaaaaatatagaagattaagaggcaaaataagtaagatcctattaatcttgtcatttgatggcaaagatgaagctttactaaggggttgtagcaactctaaatttaataataataaagctcactttcctcgcaaggggaaataaaattgcctctatgtcctatgtatgctactcttgaaattttcttgtgtaagttctttgcaagtaatagggacatgcttaatgtcctgattcaacaaactagttaaataagaagattaaaggcattattttgggttgaatcattatgagacgttgtcgaaattatggccttatttttcggccacatttctaggggagaatatacgtctcattaaggtcgagacacttcacccttagaaatttttgacatctatcattacttagatgataattcgctaagtaaagctaaagtaaaatcaagtgattcaagttcataaggtattatgcttccattacataaataataagagaagattattctacctcatttatgactcatagctccattatgtggatgctagaattttgtatctcttaatttgtgacttgcacaattaaatatacataacatagcttgagggttttgttatggaaagaaaagtcacatatagggtgcagacttaagaaatccatttgtggacttaatcaagcattgatgatgatttaaattccgctgcatcattagtgaactaagcttaaataagaatcaggagaataactattctataatgatggaagtaagacgccattgggagtgtgtcattgtcgcttatgtcacataactaggggagtttggaacgtctcatgagatagagatattcttttccttagattttaatggcgttgtttagctttaagttaaaatttcactaagtcaagaaattagccaacaaatgatcatttaaggctaggtttacccataagcgacctccgatttcctttaagaaatttaagacactaatgctaaaatcaaatgaagttatgagatcggattatggtggtaaatactaaataaagtttgttcaccttataagacattaaaaataagcgttcatccaaatggttttcgaaccatgtaagaataaattgagatggatgaacaaaataagacattaaagtgttcatctaaatggttttcgaaccatataagaataattgagattgatgaacaaaataaagaatttagtagaagtttctgaatgagtcaaaatattcggccatttaagtgggttaataagattaagcctgactctaatggaaatttcgaacaattcaagtgaggtggacaggtgcatgaaaattaaaggtggaaaatttcattcaccggtactccatactaatgatattttattgttaagcaatgcatattgctgttagaaactaaggaaatttttccatgaattattttggtctgaaggagcactgggcttatatcagtaagtcatacattgacataaagaaataatttgagagaattcagttaaagttagtcaagttgaaattaaattataaagataatcatttatgattcagctgacagaagcttgagattagctcaaatctggatgcctacagatttggcaaacatttttactgggaatcttggcagtatttaattaaatccagagtagaccactggtattaagaatgttcacaaggcaatcttatgtaacatgctcatgtttctaaagtccaatgatctcagaagtttagagacatttggacacttattttgtgagatgtgtggatatttataaagattattcagattaagctatgtccacacataggggagcaatgaccatgtaaaagctccaaaaatagtctcttactgcatagtcgatgatgcagttagattttaaagcatgttatgattaatcatatatataagaatatttcccagaactaagagtggtaaatagcgctcataaaccactcaaaaggtgtaaaccactcaattatactgtgttatatgttgtgcactaattgaacacagttttctattttagtagcaacatgttgtgtgttttctgctaatacattgatatagttgtgaaacatatgtcctaggatcgaattattattaatctaagcttttgcttatggatgcatactctaaaggctcataaagttaagattaattaagatatgttctagccagtacatgtgtaaataagagcctcactaagatcctggatgagggggacttaatttttcaatcaacacccactaagttaagcttgagtttatttgagttctatagtgagatataggtcttgttgtctcggtgacgcataatgttgttgaagacacattgccttggggagctattttatttaatagactcataagtaagtctcgaaatcaaggggagaatgttggttgattttgtcgacttgtatcgataaagattaggagaggggctaaaccaccggtttccttatcctaacaagaaacaaactacgagataaatctgttttgtgtgatcaaaatagactcgaattttagattgagatagacccccgagccccaccagtgtcacctataaaaggaaagagaaggagggaggcaggtgacgacttatctctctctaacctcaaaccctaaattaatcgcccgatcgatcaaggcactggaaggggctcgtgaggtatctcacaatagaagaaacaatgaagaagaaagaagaagagcaatggcttcatctcagatcagttagattaattaattttcgcataagcagaaggtgatcatgtttaggctaagactcaattatttaattggaataaattccaacaactcctccaaaccagcacttggccggtggcttcaatagatcatggtcgatggattcaccattaaccagctcagcagggatgataaccctagatgcgaaaacttcgacaaaagatcaacctctccaaaaagttgtcttcggcttggtgaagtgtcacgcccggaatttctatccaaaattccaaactcttacatgtgtgtgaaccctcgtccaggaatcagccgaggcacacaataacaaattgataatagagtacaattattactctaattaataagcgaataaaatgtcattacagaggtagatagttcctatcaatcaataaaaatctaagcagcggaagaataagataaacggcgcagacgactccactccacaggcagcttgaccaaggctacacctaatcctccacaccatcagcatcactgtagaactcctcctctgatgaatgattgcaaggtgagtatatgacatactcagcaagccacgcagcaaatatgcaagtgcacaggataacaaaggatggcatagtagggtttcatttgcataaacaacatttaatgaacatttcagaatttaataaaacagttaagtaataattaaacaatattaatccaacgctatacaacataccttgttgcataggcccaaccattctgaacaaccatcccggctgcacagttctatctccaaaccaggaatatgccattccaaaccaggagctaatcaaattattaccagttatagcatcttttactatggtgagaggtgtgaaactaatcacgaaagacattgttagacccgcccataaccgcgggcacggctattcgaatagttttactctggccagaggtgtaccactgtacccacaagacacagccccacaacatgtcaccatgcgcctcaataccaccacggtacctcagaaaggagctgtgacagtacccctcgcacaacacaatccaccacagcgcaccgttcctggatcataatcacccccttataaacaaggcatggactccccagtgacccccgtgggcttatctccgccacttctcagtctggtgccccgcaatgaaccatgctatacaaaaggtaaagccgttgcccacgctggcttgtggttggcacggttaatgtttcacaaccgaaactcgtgaaccggtccttaatcatcatgagcacgaccatcaaaaccatgtgctcacaacccaccattatcaagttttagttggcaatttaattaattaaccaatcacgattgaccatcgtgaactatcattaagccatcattaaataatagtaatttataagttatcccaatagtgtgctaatgtttctaagcatggctaagcaatcatatctaatatctagctgaaccaatatataaagctcaactagtcaagttataataacccaaggtatcaaggaataaagtaatcaagaacaaaagggctataacaaacaataggttaattccacccaatgacattcgaaaataaatgcaatagttgaatagaaacaatagctttaaacgagatcaacatgctcaagggttgtttgggatctgtgtgacttgccttgctggccttggaactcttcaaattcttctcctgcaaaaacggactctctggaaacatcggaatctaaacagaaaggagcaaaacaccaaaacaacacataaacaagcatgaacagtacatgtggatatttttaacatgtagatctcaattttagaaaaaaatagagacttgaaccaactaaatccgagctaagatgaattagttatgaattttcaaagattaaatcggattaaaacacttatatggattttaattgaattatgacgcaataatcaattatttttgaaaaggaaaaaggggtttattgcgtcagcggctagggttcgcggtgaaccgggtgcacggcggcggctcacggaaacgaacggccgagatcgattcatccaaaacggacggccaagatccatcggtccacgaccgggccacgggaaacgacgacgatgacgtcagcgggaccaccggcggcggctcgggcgcgcaaggttgccggcgaacgacggcgcgacgacgcgaacggaggacaccaacacgtagagggcgacgcggcgaactcaccggtgaccaaagcaacggcggaagatcaacggatggtgacagcgtcgaggaagaagcggcggcgaccttcggcttgacgacggcgacggtgttccagcggcccacagtgacgacggaggggcagacgaggtcggcgacggcttggcgatcacgacggtggctttcccgagcggcaacgacaaccggagcgacggcgacgcacggttggagctgcggcggcgacggcggcgcgaagctacacggggctagggcgctacgggcggcgacggacgaagacgagggtggcgacgggtagcggcgggcttgggggtccttttataggggttggaaggcggcggcgaaggcccacggcgaccggcgacgagaaggaaagtttagggttcagaggagagagacgaatccgattcgagatcgaatccacggatttccaaacgaaattagccgacgattccaaaagagaaaagatagaggggatcccggggatcatttcccctctattaatttcaccggaaacggaaaggggcggctggatttggaaggagacgacggcggcgcggcgctagggttcggccgggcgatggcgcgaggaagacaacggccctgacaggtgggccccacctgtcagcgggcagacgcgcgcgcgcgagctcggctgcgggccggattgggccaggagagagagaaggttccaaaagagaactttaaaaccttttccaatttaaattattcatgaaatgcaattccatttattaaaaatacttccttagctcaaataaatcccagaaaaatctaggaattatagaattaagcaaagtatttaatgaaattttatctggccccattttatattgaaatttattaattaaaactagatcttctcttctaggcttttaaaataaattctaataattccaatttagacaacaatttaaatatttgggatttttagtgtgtgacatgaagtgactggaatagatatactggattgggacaccaccatttttaatttctggcctttctggtatatcctccttcttcctctcgtgccctgtagaaccaattataagtcccttgcattcaaccctatggttccgattcacttgaataggatttgttccaactaactaggctctaaaaaaaatatcttatatattagaaggcatcttggtcccatcactctatccacctcgaagcaaagccgtcctcggctttcatgtaattttggaaacctcttgttgagattataaacacataatgatttaatttattccataaataaatcataatattgcagatgcaaactagcatgaacgtatcattggatctacacatgtacactaggcagtaaaacataaacagatcaaatatacgtaccatattgaacacgtaccgaggttgccgaaaaatcggttgctcagcaggaattactcgtggttgtgggcgttgacgaaggcgtgcaacacgcgagcgaagaggaagacgagccgtcgtggacgaacagggagcagtcgtgcgaagcgctttcaaaaacattattgccgcctctcccggtgcagaaagtcgaaggcagaggttctggagaactgctctcccgatcgccggtgcacgccggcgagcaggatggagtagtatacgagcgacggcgcagcacagagtaggaggcaaaccctggatgatttcgcgtgtgttgcgtggaagcggcggctcggtttatatagagaaaggttgctttatcagggcgcccgcatgatctctactccgcgtcgcttaatcagggtgcccgcacgatctccactccgcgtaactgaaccagatacactccgcgtaaccgaaccagataagtcgcgcataacttatccagatgccacgccgtttttcacgcaatggatttttcggtatgtttccaaaacaaacaaatctgaatttcccacagcaaaacaaaactgcaaaaggaggctgcatctgcgacaattcgacacgtacgtcgtgcacgcgcatcgccggcctagcccggcgagcaagcgcgcgtctgtccccctcttctctccacctcacatgcttcaagtggctaggagggcatcctcccttttaaggaggtctccctctcttagaataactccccatgcatgtcatcctatgaggtggtcttttgtgattttccaaagaattaatctttaagtgggctaagacccatctattaattccaacacctctttctttttcttcatagcaacaaacacatcagcctcaatagcactcctcgtcatcagtttcagcacatgttgcaccgccttgtgcacaaaagaataattattggactgaccaccatgtgtagcatcaagatcaaactgccatagtctacccaacaataaatgacatgcactcaatggcgcgacgtcagagtccactttatccacatactttccgatagaaaattttactctcaccttgtgagtaattttcagtataccactctgattcatccattgaatataacatggtgttggaagcctccggattggcaaagcaccaaatctaaactaacaacatttgtaaaacttccaccatcaattttaatttgcataccttctcacgaataatacattgcgactgaaaaatattggagcgttgtcccttcacaccattaacagtatagcttctacttcttgagccatcatggataaaccgtttttactcacctgtaactattggcttatagttaggatatgcgtaggttacgatagcataaatcaaaattttctaccgtgtaaaccaggaaccacatgcaagtataagatcatagatcgttaccactcgacgcgctgcatagcggaagaaagcgctaagaaggcaaagccaccctcgcgatgtagcgcgtgccgatatagaggaagtgctcgattgcaccggctcgaccttctcctcctcgtgcgttctcctcgtcgtgctcccacgccgatcagcaccgcaaagcagcagcgcctctaccggtattcacacgtacaaggacggaacaccatgcatagatgtgctagcacccgcgcgcggctagggttttgctcgggagggaagtgacggctagggtttctcgcatgatgcaataactccgccggtcacacccctcataaatatataggatccacgactcaggcctccaaggcctataggactcctattcagatccctatctgaactaaggtcatattggatctccatccaatccccttattctggcccattaagcgtgccaccttgtaggttcatgtacactcggctgtaacccgaaaactcattttcggtccacgtgtcaacagcggcccctagcagaacttattgaccaaccggacatacataaagatcatatcggctgaacctctagtatatacttgtataaacccctttgcctcacgatatcgattaagctcgaggctagatatgtgccatcctataatagctcaatcattcactcgaacttgtgatagattataaaacctgtgattgactcctcaatcacctttagcatggccatgcactttcataatctataatatcgaggggcccaaatatctctccataggaggggcaaatcccatattcttgattaattattcatatcccactacatgtttcattgcatacccgaaaactgttttataactacccaattacgaagtagtgtttagcagtccctaagcaagctactacacatcatagcaatccaaaattaagctaaggctaatctacaccgcacactttactctggagtcctggactcttttgtagttccccgactccctctccctaatggcagttgcagcttgcagtgccatatccatgtccccctcctatattccgtgctcacctcaacattctcctgggagttatctcctagctcagcaggtggccgccctgctctctctctcccttcctctccagtgggtatgtcctctctatttccttagatttgtggattgggcgtcagccgctggactggtgccgcaggacctcttattgcaaagataactcgtccaaattgcatgttgtagaggaccggaggatggagccactaaaatcgtgtgttgcagaggattaaaaggtgttgctgacgaggtgtacatatatatgtatgcaagccggtgcatatatatatatatatatatatatatatatatatatatatatatatatatatatatatatatatatatatatatatgtaatcttgccttaaattttgctttgagattaatttgaaatattgccttgtgtacacaatgatggaactaatcttcgtttattcatgacaaatacatgctctacacgtgcctaatcttgcatgccatatgtgattagattttgctttgacattaattttgaatcttgcctcccatacacaattatatggaactaatcttcgttagttcacgtttcagaattagttcacggttggaactaacccatacactgcacatgcgggccctagggaattctcaactctctcgttgcaccacgtggcgagcgttttgagggagacatgtggcagactgagagcgtttttagaaagtttaatggaattttagtatataatagatagatagataatagataatagataatagatagatagatagatagataatgtgttatctatttcaaggaacaatgttagataattatgtaaacatagtatgtgatacaatcatctatacgattgcctctaggacatatcacctatagtaacattagtggatgagtcaccaagaggatcatcagagaaagctgtagttaccaatcctggtgcagaagaaacttcagcactgctagcattcatgcattccctttgcactagaggttgatttgacatgccgattaggagaagaaaagtttttactatggaccactttaaacttcccataattattcatagcagcaattcttttgttgttcaagtctgaatactgatctctagctgcaaaaacacatacctctttatttttctttctactaacatctttgcaggacttaacgataatttgcttcgtggcaatagaaagattttcagcaaacataaacctcttcccatcaagttgggtcgcacaaccatgtgcattcagtaactcatctctgataatagatgcactccacgaagaacgtatagcctgcttcttggaagccttaaaatcttcacctacaatagccaacttctcaattggtgaatcatgttgttgacgcagcagcactttcatccccttccacgtcgctgtagatttgttcttcctgtagatttgaccaccactgcaaaacacgaaaagaaaatcgccgctctgcaaaatccaacatctgggagtctttgtagcatcttaattagcggcataaacatagatttcctgctagatcgaggaatagtagctagatcgaggagtctttgtgcatagcaccttcccaatcatagtagctagatcgaggaatagtagctagattgaaaagaaatcctccaacgcacatcttcacaatcatagtagctagatcgagcagtctttgtgcataatagcggcataaacatagatttcttcccgagccaatattcatccatcattgaaaaacagtagaaaaatttctaaatgaagaatgatcaacccaaagctttgatatcaatgtttttttgagcacgatcaggatgctattcacttcttgttcactcaggtctccgccgagtgatatgattttggcggggtcagagtcatctatctgcaaccagacaaccttgccgtggggacgggtttcagcgtcggcctggttctttcttgccgttcgacttctaaggtatgaactcccctgtcgaaggaggccacctatagatggccataaggcccgaggcccgaaggcccggcccatggcacggctttttggcccggcccaagcaccgcacggcttgacttgggtcgggcccgtgccagcctggcccgaccgccgggccgtgtctgggcctcccctccggcacgctgggctggcccggcacggtcaggccggcctggcatgatgggccggcaggccaggcatgccacacaaagtatagggactaaaaataaacatataaatgtcactgtccaaagaatagggaccttaaatagacttattttagctattgatatcacaacccaaagaaaagggaggtaaaatagactttttttagctatatatatgtcacagcccaataggagggaggaaaattagacttattctgaggaaaagcactatgggccatcgtgccttcgggccggcccggcacggccccaggcgtgttgggccgtgcctaggccgtgagtgcggcacgtgggctggcacggcatggcccggtgcgtcggtcgggccgtgtcggctcgacaagccttggcccaggcacgaccgggcctgggccgtgccgtgccgggtggcccacatggcgatctataaggccaccatggtagccgaaggatgggaacccttgacaactaccacaccggctgggctaggcatcttgagcttgaggtagttgtgataagagactgcttcaaacttggtcaaagtgcctcagccgaagatggcgttgtaattgtatgggatgtcaacaatgtcgaagagtatctcttcttctctcttgttttcttgtgtgccgaaggtgactttgaggtgggcttgacccaaaacttgcactacttcgcctccaaaccccctgagcgaggttggtgcttgggacaatgccagtgtcggcaaacccatcttggcatatgttccggcgaagatgacatcagccgaactgcctccataaatcaagatatgccgaacttcaataccaaccatctctgcaccaaccgatcctggtgtgggaaaaggactccttcagcatccttcggtctgaaggatatctgttgcgtcaagtatcttgggaccccttcgcctgccgaaacaatactatgcactgctcgaagttgcatctttttttgtcgtttcgacacttgcgagggggggataagatcttgtgatgacctagatcactcttcactgtgcatcttggcgctgttcagcctgaggtgcttggttgaggaccgcttcgcgcgttgcctcttcagccctggcttgctgctgcctgagctcttgagtgttgccttgctgccgaatgttccggcattgctcggttgtgtgcgaagagtgtccatgaacggcgtagtataggtctttcctgatctttttgcgaaaaggttgttgctggccgcccgcttgctgagcgtcgaactccttgcgaagggcttgcacttcttctcctgccatcactgctttgccagctcgatcagttctaaatttttccatgtcatcggggcatggttcggccttaaaggctgcccttgattcaccggaggggttgagtgaatcagaacgggtgccgaactagtaacttgggcttgaatttgagcttgtgcgtgagcttgcgcggtggccgtctcggctgcggctgttttgtcatattcggcttgtatctcttgccgccgcttggtatctttttcgcctcatgcataaccatcgattatgcgaaagaggtgttcgagcatccttggttccttgcgggcgatcttcctagtgagttcgcccttaagtaggccggtcgaagtagcgttgatgacagaggcttctgttatgtcttgcacttggcaccgtgcttgcgagaagcggcgcacgtattcccttgtcgattctcctggcctctggctaatgccgagaagaccttattgtgttttcggctcctcataagtgcctcgaaagttaagaacaaagacattgcgcaattgctcccatgagtaaatgctactagtaggcaaattaatataccaagatcgagcaatgccatcaagagcgaggtgaattaccttcgcctttgtattctcgtcaccatgggcagcttcgattgtggactcatagatggagaggaactccttcggatccgtttctcccgaataccttgggacatgagggaacttgaactggggtgggatgggatgattcttgatcccccaactcaacggcaaacccttttcgccatccgacttgatcatgacgccttgctgagaaggccagcttagctgcgggtacgggggcgcaaatgaggttgagcagcagctgttgattgatgccccgtgccaaacaccattggctggttttgttggtcagtcggagcagcttgcatcaccatagctgggtcgaacacgacttggttccaaacttgatttggtagtgggaccgctccgtagccagagggcacggcttgtgcgaaggtcatgggtgcttggaccgcggtgcttgggtcgaattgcggcagttggctttgaggcgatgccccttgggcttgacttgtgttaacgaccaaatttcataatctgagtatcaaagatagagatcagatcgaagcagaatctaaatccaagatcttttaggaaacagagcaagaatcggcaagagtccgaatcggctttgatcaggattagtagagtccgagttggacagggttagccgattgagccgaatcctacaatatgacaaagaatacattgtcgggttgagttaataagcttcatgatgattgccacgcatggatagaatcctgagaagacaattgtatctattaattaggatattttacgtaatttccttacagatatgtttgggcaaaagtctgccgcaaagacttatggtatcatagagtttgttagagataagagtcgtgtccgatgtgtacatattttgtaaatctcgggtataaatagaccccgagccccatgtaatcaaactaatacacattcaatacaatctcggcgcatcgccacccttttactttcgttttgtttcgacgagttcttgctttcaggttgagttgcatcgatttcgatcttcaacaagaggtaaaacttgttatggcgccttgcgttctcgggattagtgcttccatcttcatgatactctaatcttgtttatgtaattcgtcgagttatcatatatcttatataatctccggcaatatcgccatctaacctacaatcggctaacgtctgttaatagaaggcagccgactaggttaaataccaatgttgacttagattatataggatatctaccactctatgaaacatccaacggcttgattgtctagatattgtccttctttttatacttatagctgcatcagttgagtctgatcttatgagtcgtgattagaatctcaatctctagcctgcttttggttgccgattagggtagcatcggggtttcagccgatcttacctgatttaactacttttatcttatgtgcttgattgacatgttaaatctgccctttatgttaagatcttgtagcatttaagtatattaggctttcgtttggtatattttacttgctttaatatgttaatatagagtggtatctgttaacaaccaaatttggtaatatcggcattgggaaagaagattagatcgatgcaaagtcggaggcggagatcgagttcggaaacagagcaggaatcggctggagtccagatcggctacaaattggatcggctgggtctgagtcgggctaggtaagccgatgcagccgattccgacaatgcaacctgatgtatgatatcgggttgaattaaggcgcttcaaggtgattgccgcacatggatagagtcctgagaaggcaattgtatctattaattaggatgttttatgtaatctccttggagatatgcttgggcaaaagtctgccgcaaagacttatggtatcttagagtttcttagagatagtagttgtgtccgttaggacatatcttgtgattttcgggtataaatatacccgagccctatgtaacttttaacacacacgttcaatacaatctcggcgcatcgctacctttttgctttagttttattttgacgagttcttgctttcgggttgagctgcatcggtttcgatcttcaccaagaggtaaaacttgttatggtggcttgcgttcttgggattagtgcttccatctttatgacactctaatcttgtttatgtatttcgtcgagttatcatatatcctacataatccttggcaatatcgatatctaacctacaatcggccaacatccgtcaatagaaggcagccgattaggttaaataccaatgttgacttagattatataggatatctaccactctatgacacatccaatggcttgattgtctagatattgtccttcttttcatacttatagctgcatcagttaagtttgatcttatgagtcgtgattataatctcaatctctagcccgcttcttggttgctgattagggtagtatcggagtttcagccgatcttacctgatttaactactttttatcctatatgcttgattgacatgttaaatctgccctttacgttaagatcttgctgcatttaagtatattaggcttttgtttagtatattctactcgctttaatatcttaatatagagtgatatcggagtattagccgatacatgctagatctatctgatcggctatgctataaacgtatatagtctcattattaatatatatttcgatctatgtgatttatactgtctcggcatagcgaccgatctatcccaatcacttgatttaagtatatatcgatataatgattatatattgttaatatctacagccaatcgagtagatttagtcccttcttatttcttaatgactgccgatcaatgtatatatgacatcggcacctagccgatcggctattatttatagatttaactgcggtttctttgcttctatttcttgttgattacaggatcaaatcaactggcatgctcatacattcgaaggtgagatttggacctgtactagagttaagtaaatctcccaggcctcgtgttttctgtcaacacgcttttggcacgcccggtgggacatttaagaagtcagccaacaattcgtcctcatggccgagaaacaaccaccaccaccatccccagctagcccaggctctgttaaggaaaaggtgctgaaattagggttgactgacgtcaatgaaggaaacgtcgtgccgatcgatccagaaaaattcacacctgagcagaagatagagtttgaagcaatgttgcagcaagcacgggatcagttcttgaactcattcatgcagacccgcaaggggacacttgtttagaagtacaaaatagaagtggttgctgatgatccagggaccagttcttctaaggatggagatggaaaacaagctccagacggctcggctcagctgagtaacaaaagtgctatcgacagctctctaggaaatcaaggtgacaattctcaaggagtccatggagtgcaaggtgacggggtgcatggagtgcaaggtgatggtgctcaggggttgcaaggaggaaatcataatcagaatagtgatgcggcacaagattttttcagtaatttccaagatcgggttgactacgctgtgcatcatgctttgatcaatcaatctggggtgttagtcaataccttatcaaacatgatgaagtccatagccgatggttcaatagctgagcatcaggctgcaggcccggtttatttgcaaggaggtgtctttccaaattatcggtctttgattaccgatgttcagccatcaactcaggcggtttcctccgctgcaccaacatctcagccgacggtgttggcaactttttgtgacaagttgacaagcacgatcgcagcaccttaagccttgcggtgatcctagagtcgccaaccacctcgatctagcaaagagctaaacctagatgggttttgataactaaaccggctagcggagccgatttctagataactacccgtctcgtgggcaaaacggaaggttttcaggacaaacctacaaagagctgtcgcactctcacagcgacggcggacggtttatggcgcaacccgacaaagatggacaaactaagagaaaactaaaagcaatataaaaaaacaattcgatcgattgatagtagattggcttttttacaatgaaccggccatgtcccttatataggggttggtcttgccctctacaggccctcctccacgtccaactcgggatagaagccaaaggaaacccgaaacatgccttcccgagcaaagaaacctcgagacccgatgaaacagaatcggactcggccctgccggtcagactggccacacaccgccggtctgaccagccctcaaccggcggtctgaccgcccaacacacggcggtcagaccggcccactcggaggaaaccggcagacttccaaattttggcaatctttcctattttaatcctaggtgccaaatttgggtataaacacatgcccccctgcctttttgatgaacaacgtgaatctaaaagcatagaacatgtttttggtcttaggacgataatctaattaccggccatagtacctcctaagcgtcttgccaaacgctcgggaagtattgcttcaagtatttcccgttgattgctcgctgaaaacgctccccttgaagtgtctccaaaaaatacgcgttccctcgaacaatgccgcatactcgataaggaccctcccaactaggagaccacttaccgaactccttggatcgagtacccaaaggaaaaattgtcttccaaaccaagtctccaacttgaaacaactttcctttcacccttttgttgtatgccttggccaccctcttcttctctttctctatctcctccaatgccctcaagcgcttgtcgatgacttcatcaagattatctcccatcaacgtcttgtaatcttcacttgacaaatcatcttgcttgatataacgaagagaaccaagatttacctcaaccgataaaacggcttctttaccataaactaactcaaaaggagtgactttagtggcaccatgtttagatatcctatgcgcccacaatgcttcggaaagcacctcatgccacctctttgggtgttcctcaatcttcttttttactagcttcaacaatgtcttattactcgactcggcttgtccattagcctaagcgtagtaaggagaagaactcaacaatttaatactataagattcggtaaaactcttcacttcctaagacataaaagaagcaccttggtccgtagttaatgtttgcggaataccgaatctatgaataatatgcttcaaaataaagtcaattacctccgtatgagtcatattcttcaaaggcacggcttcggcccacttagtgaagtaatccgtagcaactagcacgaacttatgcccctttgataatgaaggataaatttgaccaacgaaatctaaagcccaccctcggaatggccatggtttgattatgggattcaacacggcggcgggcgccaattgaacattgccgaaccgttgacaagcctcacatcctctataatatttgaagcaatcatcaatcatcctcggccaatagaatcccgctcttctaagcaaccaattcatcttgtgggccgattgatgagttccacaaattccttcatgtacctcccccatagccactttagattgatcttcatctaagcacttcaacaagacaccatcaagcaatgtgtatttgaacgattgccgccgaattttccgatcaaccttaagtgtgggatccttcaaatattgaatcaaaggaattctccaatcttcttctgtcacctgggcacaaatgtccgaattcacaattaattcggcttccaaattgattgaaacgtgccccccggcgctctgtccaaacccggtcagaccgaccacacagggccagtcagaccgctcggggtcgccggtcagaccggcggcatgcggccggtcagaccgcccctggtctccagttttgccaatttcgcataaagatttaaaatcaagcaccgactcttctaatataaaaaataatcccttcttcacattatagccagatgcttgttgtgccaagccatttgctctagaattatcacgccaagcaatatgtgtaatagcaaaattatcaaaattgacaataatatccaaacatgaatcgaggtacctatttagtgatccgtccaagcatttgtagactccggcgagttgttgcaccaccaattccgaatcaccaaaagcctccacgtatttagctccaaccatctccataacttgtaagccgaacaataaagcattgtattcggcctgattgtttgtacaataatacttcaaacgaaccgatgcttcataacacatgccattaggtgaaaacaaaactacccctatgccttgaccttctttgcaagaagaaccatcaaaataaatcttccaaggtataacttcaattaagcaaacctctccctcataagcaatatctatatgatggtctactataaaatcacatacaatttggcctttcatagatttcaatggttcataagccaaatcatattctatcaaagcatatgcccacttaccaattctcccacttagaattggcctttgcaatatgtgtttaataacatcggcttgacaagtaactatgcatgtgctagataacaaataatgcctcaatttggtacaagcatagtataagcatagacaaagtctctctataaagacataccttgtttcggcatctaaaaggcggcggctcaaatatgtaatgatatactccttgccatcctcctcttgcgtcaaaatggcaccaatgactttgtcttcggaagcaatatataaccgaaaaggctttccggctttaggcgctcgcacaacgggtggagtagacaaatatctcttaaactcttcaaacgcctcttggtgttttgccccccaagtaaaatcgcttcttttttcaagcgaagtataggaacaaaagcatcgattttacccgctaggttagaaataaaccttctcaaataattcactttacctagcaacttttggacctccttcttgcatgtcggcgctttgaaatcatgaatcttttctatcttcttaggatcaatctcaactcctctctcatgcaccatgaatcctaagaacttccccgccgacacaccaaaagcacatttaagtgggttcatcttcaaaccataccggcgcatcctctcaatagctaacctcaaattggctacatgtccttccataccatccgatttaacaacaatatcatcaatgtagatctccaggacaatacctaacaaatcatgaaagatcaaattcattgccctttgatatgttgcaccggcattctttaacccgaaagtcatgacaacccactcaaacaaaccaacaaatcccgggcacctaaaagccgtcttgtacatatcctcttccgccataaagatttgattgtagccggtattgccatctaaaaaactaatcaccttatgacccgaggcatcattaatcatcatgtcggctataggcataggatattcatctttgggagtagctttatttaaatctctaaaatctatgcaaactctaatcttatcactccccttcttttccaccgggactatgctagatacccactctgcataacgacatggcctaataaacctcgccttcaacaaccgatcaatctcctctttgactcagtcatatagcaaaggattaaaatgacgaggtggttgcttataaggcctaaaacctggtttaattggaagccgatgctcaacaagctcacggctaagacccggcatctcatggtactcccatgcaaagcaatcaacatattctttaagtagctcgattatcttaaccttataatcagctctcatatttttgtttacaaaagtcggccttggcttagttccatcacctatgtctacttcttccaaaggatcggccgatgtaaacccttttctaagcttctctacttcatcaaaatcctcaacggtttcgccaatatcgttctttgtagaccgatattcttacaccctcctttgtaaccactctaaattagcctctttactcattatacaaatttatatggcttagccgtgctacactagccggctttatagagataggtacaaatttgccatcggagatactaataaaatcctaactagaaagatccctccccgataagcattggatattcctatgatgccactcaaaagtagcatcagccattgcaacctcggccgatgtatccgcttgaacaatctcaacatcatcgccgtcccattgaattaaacattgatgcaaggtagaaggtacacaacaattggcatggatccaacaacgacccaaaataacattgtagttaccttgcacatcgacgatgaagaaagcggttggtagcgtcttatttcccacggtgagctccgccgaaaagataccccttgcctccgttggttcaccattcaagccattgagaatcatgttggtcttcttcaactcatcatcctcacgcctcaacttcttgaataatgagtatggcatcaaattcacggcagcacctccatctactagcatcctagagaccggcttcccatcaacatggcctttgagataaagaggcttcatgtgacggtttgactcatcgggcttctcaaaaaccgcatctttaggaccgaatgagaattaaaaaagccacctcagcttcatccatagcacaaaacttcataggcaacatacacaccatgttgatatccatgtcttcttttggagatgattcacctttgtcaaccgattgttcttccttctcatttatatcaaccggtttttccttctctatggacttaggcctccataccggtggtggtcgcaactcgttaaaccttttatctctttgctcttcggcctttttctctcttatttcttgggcccgaagacgttgcaaccttctcttttgtgtagccgtcaaatccttaggcatccacctaggattcggctctattccaggaggtaaataatgccctttattaactttgcttgaagacgatgaagccctcacatcgccctttgcagccctctcatcaaaccgaagctggagcccggctagaccggccgtagaccaccggtcagaccggccagacgcgctggtcagaccaacatgtggcgagcggtcaaaccggcctgaggcatcggccgaaccgctgtcgggtcggcggtcagaccggcctgatggcccggtcagaccagccgtatggctgcggtcagaccggccgactgcgaagaactggtaccggcttcggatttcttgtttggggacactccaactccatctccagaaggtattggcacatcatgagaccccactttgatagtaatcacctccgaagtcctctcctccaccttgacgcgctttccttcccacttttcttcattagcccgattcttaccataaaatcggctattgtttggtgaagacaaacgctcatgaattggcctccgtggtcctcccctcccttggttgaattgcataggaggcatatgattgaacattggcggcgtcggcccccatggcatgaagcaaggataaggataacccgacggcggcattggataggaaccccatgacatatcttgtggataatgatacgaaggtgaacgcgaccgtcttggtgaatgaccaaatcgctccttaggaggtgatcttggtcttttccctttgttgcgaattttctcaccaccttgcttttcatatttctccaaaagcatattaaaagtcaccttggtcttcctaggggctttagaagttgaagctccactcctattctctttccaaacgccaacctccggcttctttagcactatcatcttggaccttggttcaccaatgaccacttccttccccttagtagattcggcttgctccggccgaatcaacaccttcttatcattgaaattaattgtattcaccggaaaatgatcatgatcaagcttcatcttggagccatcggtgaacttcaatcgtccttcatctatggccgattgaacctgtcgtcgaaacacattgcaatcattagtagagtgagaatgagaatcatgccacttacaatatgctcgacatttcaactcttcttgagaaggtatgacatggcctttaggtaatctaatttgtttctcttgcaaaagataataaaaaatcttatcacacttggccacatcaaaactatatttaacctcactttgccgatctttgcgaggagtcgggattaggttagaacaaacaaaagttttatttttgttagtccatgaccattcggcaacataaatatcatgatcaccctcttcctcactatcattagcttaagggtaatcaaccacattaacattaggctttttatcaaatggtctagcaagttttctattatccttaacccggctttcttgagccagagccctttgcatgagttgactaacatcaagaaattgttggccatctagtctttctctaagaggagcaactaaaccattaaaagcaagaccagccaaatctctatcagttatattcaaagtataacatcggtttctaacatctctaaatctcttaatataatcaatgacagattcattatacttttgcataaccgatgtcaaatcacataacctaagctcagtttctctagtatagaaataatcatgaaattgttcttctaattgagcccaagtatgaatagaatttgctggtaaagaagtaaaccatgtgaaagcattaccggataaagataaagaaaacaagcgcaatttaaaagtatcactattagcctcaccacattgcgccaaaaattgacctacatgctcccatgtggtcttaccatcctcaccactatacttggcaaatttgggaactctataatttcgaggaaacagcacattatcataataatcaggatatgactttttgtaagttctagcacgatttctagtttcaatcccgaatctattcctcataatatcactaatcatatcctccatgttattaggcccttgttgatttggcggtgggtttggtggcctaataggttgtgtttgtggcgcaatatgattatattggccttgtcttgtatcgggaggatatcccctagaaacatcattataagcattaggaatatgtgtcacgtcccaaaacgaccctaaaatatatcctctaaattatgcctagaataattaaaatccgtgtgaaagcctccaacaattaaaatgtgcaaagttaaaagtcaaataaggcttagaggatttttgtatatttcctaaaagcctaaaatgtgtaaataaattttagtggaattttcagagcacaaataataattattaagaaataaacaaagttaaaatgattttataaaaagaaaaaccctaatgggccgaattcggcccatctccctccccctctctctcctctccccgcggcccactcggcctctcccctgcgcgcgcgccgctgacgggcaggcccgcccgccaccctcgctgacgggtggggcccacccgtcatcccctttctcccaccgctcccgccgcctcccccgcaccctagcgccgccgccgccgcgaatcccgccgcctcccgccgtccccgcgtgcaataaagtggggggaatcactccccgtgatcccctctcccattccacccaattttgcatccctctctcccttggattcgtttggaaaccctcccctaatcccgccggcgccattgatggagcccgagagcgccacgccggtttccttcccctacggccactctctccctcttccaaccctatttaaaccctccccgcacctccttcgtccgtttctgcctctcggcgcccttcctcctcgccggatttgagctcgcgacgttgctctctctctccgccgtcgccgccgagctccggtccgtctcccacctcggcgccgccctccttcggggttcaccgcatcctcgccaacctcgtccacctctccgtttcggtcgccaaccaccggagcgccgccgtagccgtcgacccgagccgcgccaccgcctccctccgctccggctgcctcctccgtcgccgccgtcgacctggggtgagccgtggaccgtcgcctcctttcccccttccctcccctctctcggccgccgctccaccgcgccggtggtcagcggcggcgaccatcggggcgcgggcgcgccgcctcccgctgaccgcgccagcgtggtcgccctcgggcgcgccgagtggttgccgcgtggggcccggccgtcagccgctcgtgccctcgggtgtggctgacgtgtggggcccacggcgccggccggtgtgagcccgggtgcaaccggtccaccgtggaccgtgaggctgccgcgtgggccccacccccgtggacccggtccgcgcgccccctccccctcggctgacgcaataaaccccttttttaaattaaaatttaaatgaagaaattcgcaaatattcatttaaagagcatataaacttcaaatggccataacttggccatttgaactcggaattggaccgttcaagtctcttttttttcgttaagaagtcaagaacccattttggtgctttgttcctgcttgttatatggagtttattagagtaaaagcccttttattttctgttggtcgtgtagacgttgcagcttcggaagatccgctcttcgtggaggttgaagccgacatttgggaaagtgagcaaggcaagtcacatcatccttgaacatattgaatcccagtttataaaattattttgatttaaattattgcattatcgctttatttaaattcccgcgttatcactgttttaaattattgcactttgcggataaatgcccaaagccgaggcgccagcaaggccaagcgcctccccgccccaacaacagtggtaaggatgtcattcggggtcatgtgaaccacgtgactgccgaggatgtgctgacaactccagacgtcatcgtgggtacgttcctcattcattccatccctggtaccattttgttcgactctggagcttcccactcgtttatatctgtgccattcgtggggagaaatcagttgggggtagaaaggcttaggaaccctctgctcatcaccacccctggaggggttatgacagcaaagtattatagccctgccgttcctatagaaatccagggaattccttttccttcggatctgattcttctagacaccaagaacttgcatgtgatccttgggatgaattggttggctcaattccaaggagtagtggattgcgcaagacgcactgtcactctgtaccgagggccggaacaaccggttgttttctttgcacccccaacctctgtcggtagtttagaacttcatcagataggactgtcagaaatccccatagtcagtgagttcggagatgtgtttccggaagaactacccggtatgctgcccaagcgagagattgagttccggatagatcttgctgtaggaaccactcctctgtacaaccgaccctaccgtatggtagcaaatgaactggccgaagtcaagaaactgttggaagagttaaaagaaaaggggtacatacggccgagcacttccccctggggtgctcctgtgatttttgtggagaagaaagacaagacaaagaggatgtgcgttgattacagagctctcaatgaagttactatcaaaaacaagtaccctcttccccggattgatgatctgttcgatcagcttaaaggtgccacggtattctccaagattgatcttctctccggatatcaccaattgcgtatccgtgaagaagatatcccgaagaccgcattcaccacgtgttatggactgtatgaattcacggtgatgtcgttcgggctgaccaatgctcctgccttcttcatgaacttaatgaacaaagtgttcgtggaatacttggataagtttgttgttgtcttcatcgacgacatcctggtatactcacaatcagaggaagaccatcaacagcatctctgtctggtgttgggaaagttgcgggaacatcaattgtatgccaagctcagcaagtgtgagttctggttatccgaagtcaaattcttagggcacgtgatatctgctaaaggagttgctgtggaccccgaaacagtgaccgccgtcactgattggaagcaacccaagacagttactcaggttcgcagctttttgggtttggcaggatactaccggaggttcatcgagaacttctccaaaatcgctcgacccatgacacagttgttcaagaaagaagaaaaatttgtgtggagcccgcaatgcgagaaggcgttccaaactctcaaggaaaatctggtttcctcgccagttttaatcttaccggatactcgcaaggacttcatggtgtactgtgacgcttcgcgccaaggattggggtgcgtgctcatgcaggaaggtcatgtggtagcctatgcctcacgccagctacggcctcatgaaggcaactaccctacccatgatttggagttggccgctgtggttcatgctctaaaaatctggcggcattatctcattgggaatcgctacgaaatatataccgatcataagagtttgaaatacatcttcacccagtcggatctgaatctttggcagagaagatggttagagctcatcaaggattatgatgtggggatccactatcaccctggtaaggccaacgtggtcgcagacgcgctgagtcgaaaaagccgttgcaacactcttagcgtccgtggcattccaccggaacttcatcaacagatggaagccctgaacctaagcatagttggtcgtggattcttggctacgctggaagccaagcccaccttgctcgatcaaatctgcgaggctcaaaagaatgatccagatatgcatgggatcctcaagaatatgaaacaaggtaaagccgctggtttcacagaagatgaacatggaaccctatggaacggaaatggtgtatgcgttccggacgacaaggaacttaaacagctgatacttcaggaagctcacgaaagtccttattccatccaccctggcagtacgaagatgtacttagacttaaaagggaaatactggtgggttagtatgaagcgggaaattgcagagttcgtggccctttgtgatgtgtgccagcgtgtcaaggcagagcatcaacggccggccggacttctccaacctctacaagtaccagaatggaaatgggatgaaattgggatggatttcatcatcggacttccaaaaacccaaggcggttatgactctatatgggtagtcgtggaccgactaaccaaggtagctcggttcattcccgtgaagaccacctatggagggaacaaactagctgaactctacttcgctaggatcgtaagtctccatggcgttcctaagaaaagtatatctgatcggggacgccagttcacctctcatttctggaagaagctccaagaagagttgggtacccgcttaaatttcagcaccgcgtatcacccgcagacaaatggacagaccgagcgtctaaattagatcctagaagatatgcttcacacatgtgtcctagattttgggaagacatgggataagagtctcccttacgccgagttctcctgcaataacagcgaccaagccgacatacagatggcaccgtacgaagcattgtatggccgcaaatgccg

SEQ ID NO: 6422 - DNA, 9321 bp, Oryza sativa
agatctcctcctattaatgaagaaatgacagggtgatcccctgtgtccgacgagtgacggcgctgggcatcactcaaggacaagcggtgatttagcttccaggcggaggcgcgagtcaagatttggtcaagatagggtgggtccccacccacaagaagagtaggtagaagtagtgcatgtggtatccccttgagatataaaaggaggaccttgcccacctaaaaaggggggaggagatcgagagtaaaaaagaacgagaagagaaggaaaaatgggggttctagagcttgaactctcttgctctccatttgctctgtaactccttcacacacagatccaccagaacacaggagtagggtattacgcttctcagcggcccgaacctgtatacatcgcccgtgtcttgtgcatttgctctctcgcgaacgttccacagatcgagggtgaagaacctcactcagcgcctccggccgaaccggcaaaggggggcctgcgcggtctcccggtgaggagccccacgctccgtcagtcgccgctctgaaaaatattttttttgtcaatctgatcgcatggggagtctaagccgaccattgtattctccagtgatttccagaaaataatagattttagagtttagatccctctcaccttttttttttggagttacattcattatatttctgtgataaaattaacagtaaatttgtaattttgggataaatttgatgttacatctatatttttgtgatacggcccatcaaattttgtagttttgtgaaatttactctacgttgaaattgaaaattagcacatataaagctatacacaaaatccaactcacatacctttctgttattttctgtacaaaataagtatctactccttttgaaatcttaagtgtagtttctactaatttaataattccattttttttcaaaacataattgttaacggatgtggattcttaattctaacatggactttatctagatccaaaaacatgcatggtgctgttgtatcctttcttttccttctataatgaaattggcagagctcctaccctttctcctaaaaaaaaaatctaacatggactttgaattaataaatagaaagtcataatagatttggactaaaaactaataaatatgaggaaaactgtatttggtgtgctctttaatttcgacttttcttgataagataattggtatatttcaaataattgattgtttggttggcggccaaagtttgtcatgctagactttgagagtatcacagttaattaagctaagtcgtactcttattttctagcgaaagtttatcacggttaaggctaaaaaatatggcttgcttcacttatggctataatggagttgtggtaaagttagcctccagccaagtaaacccttttttatatcctccgtacaaatttgtacttggctttagaccttttttttcaaaaaaagtttaagatcaacagttaagaactactacagtattaagttgtatgattttatatttggaaccttactaatttaatcccaaactttgtaatacttcgcagtaactagccatttgctagtggcatatactcttcatctaatctaagcctttgtaatttgatcccgcctaaatggatgactagatttatttatttactatttatttgattaacatgggtttttttacataatgacaatcagtatagctgtacagatatcaagatatataagtaagaacagttcgaagtttccctgcatacgaaggatcaaattgacaaaatgacttgaattagcatgagtgtccatgtcctactctccaagtctccattgcactcgcagaagctaatattttagtattatgctgacttttgcaatagcacgcaaaaaacattgctatattttatcatgagatattatgtaatcaccgaatatgggttaagatgcgacgccatggaagctccactgtatgtcacgatcatcgtcagtttgtcactgattgtgctggatcagcagcgccaatggatgaggagtccataatggattagcttttggcgccccctctttgtcgcgattgtttctcctcttttctgatttcccccccgttgaacgtggatcacgcaattgatggccgatcttctgagctactggcacgcgattctcttgtctttcccgttcccataattttcccacgacatgagaaaaataagttattgtctaaaaaaaatgagaaaaatatgttctctattgacgaagctaagcctggcagcggataaagcagctcacacggatctaggggatatcagccgctcgcgtaaagacggccggccggtggtgtcccgttgcgtgccggtcgccgcatgatgagtcagcttcagatagatgatcctctctctcctcgccgtctcctcctgtccggtcgtttttctccgcttcgatacgcgggccgggcccccgcttttcgcatgcatctttcggccgcgctcgcgagcgcacagcccaaatattcccgtggcccatctcctcctccgtctcggcggtcttgcgcgaaaaccccgtcgtcacctacaacgaactaaccgcgacttccgcacggaaatcaccgagagaacaaagagccgcgcgcacgcgacgggtttgggtcgaaacggacgtcgttttcgcaaaagtacggggcttttccggcaccaccaatcgggcggggcggtgtgttacaggggaattactcgggtcaacacgatgttgggtacaagcaggaaagtttgggttggatagagtggtaactaaactgccatgtcagggacagatcgaccagtgagtggttgaattaccatgggctctctgatgatccgcgctaagcaacaacagggggattcccgtcactttctttcgttgttgtttttctcgataggctaattaacaagaatagattaggcgaaagaaaaagcgcgagtgggggcgcaaaagcgagccggcgaggataaggcccctccacaggctccccaaccgcatttgtttagtccaatccatcgtgtttccacgtggcgacccaacccctcggagtagacctgcgttccaaacagtttacaggtcgtctgctcgcggagtcgcggctcgcccctccccccccccccccccccctcttgatttatatatacccccacccgcccgtggctccgtcgctgctgccgcgcgcctccgctccattcctgattcctcctcccaactcttgcttccgttttccgtgcccctcctgccgacaaacccacacctgaatagctcatcctcacctgatcagctgaacctgtttgagagaaagaagttagttggccatctcgccctcgctagaaaaaggaaaaaaaagaaggaaaggagaaggaggagagagcttgctttgctgctgggttgttgctaatggtgttctactacaaggcgaggccggacgccggcgactacaccatctacatgggcgccgacaagaacgagaacgaggagctcatcaagtacggcctccccgaggacgtctggtacgtacgtacgtgcattctccgcacacgtactgtagtagctcgtcgtcgatcctcgcgtagcggcattgcacatttgcgtttgcgcttcgcgcgcgtacacacgtacgatcggctagtcgcacgcgtaggctcgcgatcggcagctacatgagaggtggagaggagagctcgccggcggcaggtcggcagctgcgaggaggaggaggattgaggctttgacgaggccatgacgaggcgtggtggggacatcccaacgcccccaacgaccaaactctactataaaagatgtctaccagatcgaccccgtctaggaggagtacgtaactgctcatgctcagcaacaagttgcaactctgtctgtagccatcgcctgccatccgcactagtactactacagtactactactgtgaccactaccacagccttttgtttgcttcctccatctaggggacctcacctcgatctccttgggtttccaatgcttaaaagtacttttctgcttaattcgtcaaattacgcctcatctgaaacatgtagagatatttattccgatccatgttaagatgaactatatagtgctgtaggaattttcttagaagtaagaacaaagatatatataaacgtacgactggttgttttgatggaaaggtcggtttaaagtggattcttcccttctaatttcgacaaggaaaattgcttttgtcccgtcaggttccacgtggacaaggtatcctcggcgcacgtctatttgaggctcaagaaaggcgagtcgatagatagcatctgcgacggtctgctggaggactgtgcacagcttgtaaaggctcattccattcaaggtacgcactcatttcagacaacatttgagtgtagaggtagcgcatagcttaattagctttcttttccaccatctgctttgtgtgcttgtggctagattcttttggtttctaacgatcaactagtaaattttcactcgtgcaaaaaagtagggtagatacagtttaccacaaaagattctgcagttacgaagaatttatcatggatagatgcaggttctcaaaagaaaaggaaacgtttacttgcaaataatgataatcatttgcacctccaattatgttatccacggatagaggaaatagagcatggtgtgacctgtcggatattcgtgtggcctacaattctacaaagctgcagcatcacattatattgctggttacagacaggaatcttaattttgtttttgcttttccaccccggcctttttcttttcagcaacttttagcttcttgtattattggcactagctacagtgggccccttggatcaattatccgcttgggttgatttggcctatgtgaggggattgtgtgataattagaacgtgacgagtatgtgtcttggatcactggatgatatttgcagcttgcatgtgcttgtcgtgcaggaaacaagatgaacaatgttgaggtggtctacacgccctggtccaatctcaagaagtccccatccatggatgtcggtcaagttggcttccataataccaggatggtaagctgctagggtggtctaacatcctcttctttgtacataaaaaatttacagcagcatatatatgctcataacaatggcaggtaattgatttctatgagggggttacaaggttagaaactattggtaaaaggaaggtccatgttgcagagagacacacacaaataccccctccaatcaaacttgctcgagtcagagccatgaattatctacttatggataagttaaatatcttgagaagtaaacataactgattgtttaaaacaatttatccaagcaatacaattgaagaaaattttacgagaaaatgtatttgtagaggcatatggagcaaataacatgagcaagttagttaggtagatgaaaagaatgcggcacccgtttcctacattttagaacagcaattttgtgacaaggtagttattttcacccaacatacaagtgcattatatgcgagacatactgtgttctttccggggaaaaaaatattgtggcgcattttttataatttaaataaatccaggctatatatatgtatctggctaggctcgctatctactactccctccgtcccaaaataagtacagttttagcactgttcatgtccaatgtttgaccgttcgtcttatttgaaatttttttatgattactacttttattattattagatgataaaacatgaatagtactttatgtgtgactaatttttttaatatttttcataaatttttcaaataagacgaatgatcaaaatgatgaacacggatatatatggctgcacttattttgggacggaggtagtattattatcttttaaaaaaaaactagtactactacattattaagagcaccaacaagccatcatgacatcaatggtaggggtctatcctccaaaaatatatagttatgcaataatttgatttcaccaacatgttaatatgttgcaacatattatgactagtgccactgtttcatcaaacacaattcaacaaaaatatcgcttaaaatgccatatacacgaagtactcatggtaccgaaaatattatttgtctggaaagggaacaaaatgtaaacagcagagtaatgtacaggctgtctagatatatattttttattaggaccaaattgcttaaacctgcattattgcgttcaacttgcttttgcatcatattttgatggagatacattttggaactaacagttgttgatatcttttggagttggcgtacattatcctgcccatatattatagaaaacgggttttatttttctgaaaaagaaaagaaaaagaagctagcgcctcttgtttccgaagggtcactggaaaaggccgccagctgattcgtcgaggggttggggtgtcaattccgcagatgcaattttgggagcatttgcataatcgatctgcacgggaacactgacagacagagagtgaccagccttgcaacttgcaaatccatctcttgttagccagccaccgcaagttgtagctgccgccgatcgatcagatgccagtgatctcctgtcatgctttcctttggcatctaatcgagatccactcatccaccaaaccagctgcatctcatcagcaataataggatgtgtcacgacgctggctgatcactgatgcatggcaggttcgcgtggtgatcgtcgagaagcgcgtcaatgagatcatcaacaggttgaacaagaccagggtagagcgccggcctgatctgaaaggtacacgcacgcacggacgacacgcatcgatcgatcgattgatcagatattcaggcattacacatacaattaaaatcgactaatccctttggcctttgtacgccgcagccgagaaggacgcgtcgaacgcggcggagaaggcggagaggaagatgcagctgaaggagaagaggcggcgggaggagatggagaggctggagaaggagaggcgggcggagatacggagctacaagggcctcatggtcgccgagaagatgacctccaaccgccagatcgcctccgccggcaactccatgcaggagatggaggacgacttcgtctgatccatccatccatccgtccgaagccagcaaccgctcccgggcatgcgtgcgtgcgtgcgtgcgtgcgtaacgtacgtgtgcggccacgtgtttctctgtacatcatccatccatataagcgtgcgtgatcgtctcaccggtcagtctccctggaacggtttctgcagttctgctatagtagtggtagtagcacatctctgtacatacacatggtccctagcaatgggcacagatgagaaagaaggcaacgcgattttcggtatttcgatatttctacatgtcgtagtagtatttggcagctgagtgggccgcgtgacggcgccgatgcaaactctagttgatctgacagtattacgtgatcagttaccgactccaatgaacgtcaagtggtcttcaacatctttcggatcactcgtaggtattgctactcagcagtatttttctccttcgaccaacaggaaccaactttgtgtctacgttgttcactgctgatacgtgaacacaagatgttcaacagtcattttattcagctattacagggctcactgagacaaactaaattgaatcagaagaggagataacattaacacttaattgcaattctgactttctaagccaacttcgccagttatcacgagcgaagaacgggtaattttatcgggaaaaacaggggagtaccaattaccaagtgtacaacagaggaaaacggacgagaaggctaacgggcgaccgctcgctaccagcgatctttttttttttctttttttttcttttcctcttttaataagtttatgcacttaaagtttacacatctaaagtttgtaaagcgaatgtttataagtcaaaagtttatatactcaattcaaattcaaattcgaatttaaatactttatatttttctcttttagtaagtttatacacctaaagtttacacatctaaagtttatccacctaaagtttgtagagcgaatgtttataagtcaaaagtttatatatccgattcaaattcaaattcggattcaaacattatatgtatgtaatatttctatacacaaagtttatgctgcaaagtttacggtataaagtctatgcacatgaatgaatattagattttttttcctaattttcttttactaattttattttgaaatttatgatgtaatagaaaagttaaaaagagagatgaaagaggagtattaggagggagggacgggtgatcgctaggaggagagggaagcaatcacccgcccactagcaatacccggaaaacggacgtgtatgaatgaagaaaaaagcaaggctacactgccataggcccacaataattttggtcctttaggcccatgctattagcctgataatctctttagaataggatgacagcctgcttcatcaagctgggccaaaaatctgaacagcaggactgcgataataacatgctaaccatatgggcttgtctagatgatgaatacaggcatacagcagtacagcctccacgttgtcaaggaaaacttcgcaagaacatgtcgcgaaaactgaacggaatttgttcatggagacgccggtcgccaggacgggcactgccacggtgaacgcagttctgagcgccattactggtcaccattgatgcatccaagtgggtaatcaagagagatagataaagttagtcgtggctttctatgggcaggcaaggtgcatgctcatgacggttgctgctgagtgccgagtcgcctgggctagggtgtgcgctccgacagtatggcgacctgggaataccaaacctcggactaatgggcatcgcactccgttcgcgttgggcctggctgtggcgggtatcttcggataagtcctggcaaggattaagcgtaccttgttctcttaaccattcacagtgcaagcccgggttagaaaggatcacgaggtgacacataggatgaagccctttaaaaacattttctccacggatcaagttaccttacagtgagacccacaaatattttacagcatttcattctcttgcatcaaatatctcaccaaatgatgaggacgtaactagctcggtgtcggtgacatgggatcaggagtatcatgactagaggtttgaggcagacacaatcgcacacgtggcctggtacccccgagggacgtcgggcccgagggtgatgcgttcgccctccttttagtccccccgaggggg

SEQ ID NO: 6423 - DNA, 11281 bp, Oryza sativa
tcccatcagaaggtcattcggacggcaaccatacaagtctccgtctgtttatgaaaaggtggggtaagtcccccacaaaaaagagagaaatggtgcatgtggtatccccttaagatataaaaggaggaccttgcccactgagatgtggaactggatttttccagattagaaacccagaacaagggagaggctggctcatactttgtagctcctttatacacagatctcccaaaacacaggagtagggtattacgcttctcagcggcccgaacctgtatacatcgcccgtgtcttgtgtgtttctggtctcgcgagccttccacatacagagagcttagaatctctccctgagtccccggccgaaccggcaaaggggggcctgtgcggtctcccggtgaggagccccacgctccgtcatctggcgcgccaggtaggggactctgcgagggattttctgagctctcgcactctttcgtgtgcgccaagcttttcctgttcagcccaatggccgagccagcaaaggcgcacgacctctccccgagtatgagcggtgacgacggggagccaaacccacgtcgtcgagctcgtactccaccgccacctccacgccaaagtcctaggcgggagaaggcacttgagagggccgaaggatccgcgacttcgacatccacaggaggtggagaagggcggcgagatgaggagcgtcgcctcctcgtctacggcaacggcagcacgccccagggcgcgctccaagctgcgggcgcgctcctacgtcacccgcccgtcgcccatgacccggagtctccagcccaacgttggctggacgatgtggccaaattggtcatgactgcacggcagcgcctagatgctggtgggcagtcctccgccaccaaggcctctggtgctgctgccaccggctccgcatcgtcaagacggagggcgcggcgagcggcagccgctgttcgccattcggccgccactccttcgtcaatggctccgacccgggaagatctgcgtggggaaccggatgcccgcatcagtatcgagcgtcggcgtaatggccgacgtgctccccacgcaaaggagggcgcctcctcgtccggagtgtcgcctcaccacggacgcggggatcagccctccgtgcccccggttggtggtgtcggctgtagagcctttgtggcgagccttcggaatgtccgttggcccccaaggttccggcccaccatcgccgaaaaatatgacgggagcgtcaaccccgccgagtttctccaggtctacacgaccgggatcgaggccgccgggggtgacgacagggtcatggcgaatttctttctcatggccctgaaaggacaggcgcggggttggctaatgaacttgccacccgcgtctgtccactcttgggaggatttgtgccaacagttcaccatgaactttcaaggcacatatccgcgcccaggtgaggaagcggacttgcacgcagtacagcgaagggatgatgagtcacttcgctcgtacattcagcggttctgtcaagtccgcaacaccataccatgcatccctgcgcacgcggtgatttacgcgttcagggggggtgtgcggcacaaccgcatgcttgaaaagatcgcctccaaggagccccaaactaccgcggagctttttcagctcgcggaccgagtggctcgtaaggaggaggcatggacctggaacccctccggttccggtgtggcagcttcggccgcccccggatccgccgctcagatagggcggcgtgacaggaggaggaagaagaggtcagcccataccgacgacgagggtcatgtcctcgccgtcgagggcgcttcgcgggccacccgaaaggggaggcctgcgggaggcaaaaaggacgaggccggcgctcccaacagggaacgcccaaccggcaagtggtgcaccgtccacaatacttcccttcacgacctcgcggactgccgtgcagtcaaaagtttggctgagcggacgaggaagtgggaggaggagaggaggcaggagcgccgagagggcaaatccccggcggttccttccggtaatcggcgaagtgaggccaagcagaaggcccccgccgaggacatcgatgacggcaatgatgacctaggtttccaagagcctggggccaccattgctaccgtcgatgggggagcgtgtgctcacgtttctcgccggagcttcaaggccatgaagcgagagcttctggccacggcccctactcatgaggcgacgcgccgggcgcggtggtcggaggttgccctcaccttcgaccagaccgaccacccaccgtgcgttgcccggggagggcagattgcgatggtggtttctcccaccgtttgcaacgtgaagttggggcgtgtcctcattgatgggggagcggccctcaacatcctttcccctgcggcctttgaagccatcaaggccccggggatggtgctccggccgtcccagccaattatcggtgtgacgccggggcacacgtggccgttaggtcacatcgacctaccggtcaccttcggtggatccgccaacttccgcacggagcgggtgaacttcgatgtggcggacctcagtctgccctacaacgcggtcctggggaggcccgcgttggtgaagttcatggcggcggtccactacgcctacctacagatgaagatgtcgggccccggtggccccatctctgtccatggcgacctcaaagtcgcgctcgcttgtctggagcagcgcacggaccacctcgccgctgcatccgagcccgagggtggcgacgagaggcttggcgcctccgcccccgccaccccgaggcagcggatgatcacaggcaacgaggtcccggtcaaggaggttgccctgggcgacggcccgtccaagaccacgcgctcgtctccttcctgcgggcaaacgctgacgtcttcgcatggagaccggcggatatgcccggggtccccagggaggtgattgagcaccgtctcgccgtgcggccgggcgcaaggccggtccggcagaaagtgcggcggcaggccccggaacgtcaagccttcatccgcgaggaggtggcgcgacttctggaagccggattcatccgtgaggtcatccatccggagtggctggcgaacccggtggtcgttcccaaggcgaacggcaagcttcggatgtgcatcgactacaccgaccttaacaaggcatgtcctaaggatccttaccccctgcctcgcatagatcagattgtcgactccactgcggggtgcgaccttttgtgttttctatatgcatactctggttaccatcagattcgcatggctagggaggatgaggaaaaaactgcgttcattacccccataggaacctattgttatacgacaatgcccttcgggttaaagaatgcaggtcctacttttcaacgtactactcgaatttctttgggtaaccaattaggacgtaatgttgaggcttatgtcgatgacttggttgtaaagacgcgcaaccaggaaatgttactctcagatctagcggaaacttttgagagtctccgctccgcccgcataaaactaaaccccgataagtgtgtgttcggtgtacctgcgggcaagcttctagggttcttggtctctgcccgaggcattgaggccaaccctgagaagatacgggctatagagcggatgcgcccccccagcaaacttagggatgtgcaatgcgtcaccggttgcatggccgccctaagtcggttcatatcgaggctgggagataaggcgttacccttatttaagcttctcaaacgctccggaccgtttacctggacggaggaagccgaaaatgccctcacccagttgaaggcgtatctaagctctcccccagttctggtcgccccggagccagacgagcccttgttactctacttagcggcgaccccgcaagtagttagtgcggcattggttgtggagcgcgatgagaacaattctcatttcacgcttccccaccctgtgccgacttggcccgggagagagcagggaggagaggctcccgagccgaacggtggcccaaggcccccgacgaccggagttggccctctgcccgcttgtcagacggtgctaggagcccccgacccccaggaaggccctgaggccactgtgggaaggccgcacctatcgcccttcgaccccgaggctaaccctgtgctgacccgacccgggaaagagcagggagaagaggcccccgagccgaacggaggcctaaggcccctgacgaccggagttggccctttgcccgcttgtccgacgacgccaggagcccccgacccccaggacggccccgaagccactgtgggaaggccgcccctgttatcctccgaccccgaggtcatcagcacagaagacaagtgcgccccgcgaggctgcttggacgaagagtgccccagggatgcggcccctagcgaagaggatcggccccaccgaaaggtgcagcggcccgtctactttgttagtgaggccctccgggacgccaaaacccgataccctcaggcccagaagatgctttacgctattctcatggcctcgaggaaactgcgccattatttccaggcgcatcgggtcacagtagttacgtcttaccccctcggtcaaatcttgcataatcgagagggtacaggacgggtggtgaaatgggcaatcgaactttctgagttcgatttgcactttgaaccacgccacgctatcaagagccaggccctcgccgattttgtggcagagtggaccccggctcccgagcccgtctcgatccccgaggccagcacggacccctcgcagctgcctcaccgcccactgggtgatgcagttcgacggctccctgtctcttcagggcgccggtgcgggggtcacgttgacctctccgagcggagacgtcctcagatacttggtccgcctcgactttcgagcgaccaataatatggcagaatacgagggactccttgccggactaagagtggcagctggactggggatccaccgcctcctggtgttaggcgactcccagctggtcgttaaccaagtctgtaaggagtaccggtgctctgacccgcagatggacgcctacgtgcaccaagtacggcgtatggagcgccattttgacgggattgagcttcggcatgtgcccagacgggataacatgattgccgacgaactctcacggctcgcgtcctcgcgagcccagaccccaccgggcgcctttgaagaaaggcttgcccagccgtcggcgcgacccgaccccttaggggagacggatgcgcctgaccggcccccgaggcccgtcggagtccaggcctcgggacccgaggggagtgctcccaactcccttagattgattgcttggatcgccgagatccaagcatacctcacagataagactctacccgaggaccgcgaagggagtgaacgcgtccatcgcatctccaaacgctacgtgctggtagacgggaccctctatcggcgcgcggctaatggaatcctcctgaagtgcattcctcgggaacaaggtgttgtgcttcttgccgatatccatgaaggcgaatgcggagcccactccgcctcgcgcaccttggttggtaaagcttttcgccagggtttctattggccgacagctcttaatgacgcggtcgacctggtccggcgatgtagagcgtgtcaattccacgccaagcaaatctatcagccggcccaggccctgcagaccataccactttcgtggccatttgctgtctggggactcgatatcctgggaccgtttaggcgggccccgggcgggtttgagtatctgtatgtcgcgatcgacaggttcactaagtggcccgaggcttatccggtcgtcaagatcgataagcactccgcacttaaattctttaagggcatcacggcccggtttggagtgcctaaccgtattattacggataatggcacccaattcactagtgaactcttcggcgactactgcgaagacatgggcatcaagctctgcttcgcctcacctgcccaccccagaagcaatggccaagtggagcgcgccaatgcggaaatcctcaaaggccttaaaaccaagaccttcaacatagtcaagaagtatggcgattcatggatcgaggagttgccagcggtgctctgggcaaaccgaactacaccaagccgagcaaccggggaaatgcctttcttcctcgtctacggcgcggaagcggttctcccatccgagctcaccctgaggtctcctcgggctaccatgtattgcgaggctgatcaaaatcagcttcgcagagatgacctcgactacttggaagagcgaaggcggcgcgcggccctccgagccgcgcgctaccagcagagcctgcggcgctaccatcagcgccacgtccgggcccgatcactctgcgtcgacgacctcgtcctacgccgcgtccaaacgcgtgctggattgagcaagctttcaccaatgtgggagggtccgtatcgagtggtcggcgtcccccggccgggctccatacggctggccacgggcgacggcactgagctgcctaacccgtggaacatcgaacaccttcgtcgcttctacccctgagggggggtcgggtgtcaggtttcgggctcgggccaaccccgcacccccctcgggcgtgcagggttggccggggcctacaacatatgcatattcttatttctcttacatctgtatttcaataaaagcagtttcaatttcctaaaggctgtatctgtactgttttttccttttgaagaatcttgacttgaaataggtcactcgtgctcaatcctgccctcgggggctcgggtcggctaaaatcgccgaacggggcccagaaccgagccgtgccccgaggcgtggtgaactccggggggggaatcggcaaaaacccacaatcgggtcacccataaccctcggtcaccacgttcccggcctggccagtctcgacatgtggatctccccaggcactagccccgacccgcgccttttgaggaccagaacctgggcacgagcccttattcaagctaagacacaaaaggaccacggcacagatcatcctcatctcatactcacagcaagatgaaattaacacaaaaatttcttcatttttgattacagattaagttgatctatacaaaaaagaggcccgaaggccttagaagaaagaaaagaagaaaaaactgaagaatggcgggggtctgggggctcaatccgatgcgcccggatcgccggcctcgacgtcactgtcgtctgcaccaccggcattgccctcctcgtcggagttgggggcaaacgcaagccgaggggccgagccctcgaagctgtcgacgatatggtcggcggcatcccggacctgcgcgcgcgcgcggtcctcggtcccaggagggaactcatccagcgccatccatggagagaaattggggtccctggcctggtaactcgccaggacgagctccaccgctccttgggcgaggtccctcgaggatgacttaattgtcttctcgagctcctcggggagccgttggagagccccggccatcttcgagaggcgctgggcgaggcctccctggttgtcggcgtactttacggtccgccctctccagaggcccacttgccgactggcgcaatctaggcgggagacagcgtcccaaagcatgccgggccctacctcgcctgccaagcggagggcttcgacctccccggcggacaagtccagcgcgccctgcagatcggcgatggtgcgttcggcagctgcgaggcgggcggctaagtcgctttcgcccgtggccgccctgccgctgcgcgccctcgcgtccagctccttcgcccgcgcctcgagctcagcggcccgttggttcagtacggccctctcggcgcgggcaccttccagattgtggcgtgcctcctcctcctgcgctgcctcgcggagggacaggctaaccgccagctgttgcgccgcggcctcggccccctcgagagctcgctcccgctcggtgagcgcgtcctcgcggaggcggagtgtgaactcttcttcggcgcaagcagcctcgtgcgccgccagcgttgcttcccggatggtaacggcggcctcgcggtccgccagatccctctccacgacgcaggcgcgctcttccagcgccatggcgcgcgcctcaagggcctcttcacgctgccgggacgccgcttcggtctccgccgcccgctgttctcgggcagcagcagcatcaagcaccccctgggcggcgtcgagcttcttccttagctccgcctcccagctcccatattgaaggcggagggtgtcctgcgcctcgttcatcacggtggtggcaatgagggcagccccccgctcctcctccacttccttggcgatctccgccagcaccttcttacgggtttcaagctccgagacgtgccggcggtgagccttacggcccacctccaccatggcctccaccgagcgtcgcccctcttcgacacgcgcccacgcggcgtcgagctccgcccgctctgcctgcaagacctccacctgggcgcttaacccatccaacaccgtggtgtttgcggcagccaaggcctgcagaaggggctctgcgttcagtggggcgatagaaggcgtggggcagagccgccttggagaggatgccacgcggttcgggccgccgatagaagtgccggactcggggatgtcccccggacccggttggtcctgagcgtcgcccgagggagtgggcccaagcgacgcgcccgcagcctcgtcgccagctgccccagaagttgtcgcctgagcgtcgcccgagggagtgggcccaagcgacgcgcccgcggcctcgtcgcgagctgcctcagaagtcgccatcgcctcgtcctggcgaaatccgacttcctcccgagcggcttccccggcctggcgggcccgggcggcctcctcccgagcggtttcctcggcctggcgagcccgggcggcctcctgggcggcctcctcggcttcccgtaggcgatccgcggcctctcgccggtcagattcccgcctgagggcctctacggccgccggatcctcggcctcagactggccggacttggaatggcgggagggacgcgacgggatctcgctgaaacaaaagaaaaaaccagaagacgaacaagatgggtgagtgaaaactcgcgttaagagaatacagtcacgatgggtgagagacgaacctgcgagggggtcggttaaacgaccactttggaggggaaatgaggtttccccgagatggttctgtctcccccatcttacggggccgcttcttcttgcgctccccctcgggctgcgatgttggcgcggccccctccgggcgcctgctgctgacacgcgccgccccgccccctcggggaggagatggaggaggtgttcctccctgcttcctcttcccccgggcgtcggcagggcggctgctccccgggcccctgtcgcgggacccagaagcacgaccccctctcggggtaaattgttcccccctgcggctcccgcctgcgccgtcgtggccctttggagctcgctcctctgaggccccgaccgccatcataatggtcaggatggaggcgcggtctggaacgctgcagagggggaggattccttggggaatgagggccgcctctacggagttgagattcagcacccgttggaccaatatcttgaagtcctcaggagcccaatcccatctcactccctggtgggtcctcgtgaagtcttcggacccggtgtactcccaggcgccccgagcgcgtcgctggagcggcgcaatccgacgacggaggtagtcgccgtacaccatggcccctgtgagcccctgggatcgcaggcccgccaggcggtcgaggacggcgtcatagccatcccccagatctaccggcgcccgccagctggaggcctgcgccgggggctggctcggaagtcggaggcgcgcttcgtcggcgaggggagtgtagaaccagtcgctcttccagtcgtcccacttcttgcggagggcgcaggggatgtagcggttcagcaccggcccccgtggctggaagtagcagccaccgactaccgatggcggcgacaccgactgcacggtgaagaaccaccggaacagccgaagagatgggcgcaccccaatgaacatctcgcacagatgcgcgaagatggccaatgtcatcaccgcgttgggggtgaggtgcgccatctggagatcgtagaactccagaacatccatgaagaaagaagaaaatggtggaaccagccctgccattgcaaaggggagaaagaagacagaccgctccgggtagtctggcgccgggcgtccctcgcccagcgtgactatctcccggccggtggcagattccggcatgaagcggcgcggcagcccagcctgcctctcgctcacgatacgggaaggcggcagcacgctaccatcgagcagagcggaaccccgtgccatggcgccggaggaagagaagattaagagcgagcgcgtgtggcgaaggtagggcacaggaaagaaggagttagggcgcaagcggcgaagacaaggggaataatggcgaaaggaaggaaacaaatcccttcctcagtgcctttatactcttgccaacgctgtgcccggctactcgcttctcgcgcccactatttcgccccctcgtttctcgcgcccacgcttccactaatcccattcgcccgcttgcggcgcatgaggtggatatgcggttgtggcagtcgagatagatcatatcgtgcgcgcgttaattacgctcgccgaccgaagcgacgttaccatatctccagacgaaacgaatcgccatgtccagattcgtgtgctactcaagtaatgtggcagtcttgaagagaccgctcattgttgacagccgagttaccattgccgatgtgcgtggtttgtgaccgttgggtttctgcccaattgtggagaccggtcccacctgtcaccaggtcttaggagtggcgtcacgcccgaccgtttcccttaaagagggcgatcgccctggcataacgccgggggctactgtcggtgacatgggatcaggagtatcatgactagaggtttgaggcagacacaatcgcacacgtggcctggtacccccgagggacgtcgggcccgagggtgatgcgttcgccctcctcttagtccccccgagggggtcgggccgcacccccctcggccccgagggccgaggcgccccgacccctcatgggtttttg

SEQ ID NO: 6424 - DNA, 15611 bp, Oryza sativa
cggcaacgggagtccggaagagtagcgatcgagagagatcttctcgttcccggccggaaaagccatagcccatcatgcctccttgaatccagagctgcatctcatcagagtactaattaatttattacttgattagttaattactacctctgtcccagaataaatacagtcgtgagtactcgtgtccaacgtttgaccgtcagtcttatttaaaaattttattttttttaaaaaaaatagtcttacataaaatattattcatgttttatcatctaataataataataataataataatcacaattttttttcaaataagacgaacggtaaagcgttgcaaaactgtacttattttagaacggagggataattaatctctcggatcatcgattaattaaggtatagtacttccatctagctaagctctcgttccaaatgaatatagtgacctagatcacacacacacacacactttaacagagagctacatatcggatggccgagtcccttaaaaaaatcgggtggtcaaatattttagttgaccatctgattaaacattaagtcatacaaggttaaaaaaaaatcaacaattgaattttttttttgtgaaacatggtaaaaacacacaatgaaacatgtcgctatagcgtatgaaacattgagtttcaacggtttaaaatacgtgttttttagttagaatataatcatgtgatatcttgttataaagattaattacaacggatatagtgatgtaatcggatcgtatatcggataagtaatttatgagaaaaaaacattttaaaaaataataatatgtgtgtgtgatagcgtggggagagaagcatgtagttggttgggaaattgaagcgtccgatatttttcttttgatcgctataccgataagaagtgttctacatgtgacaaaccgacaggtacatatgagcatttcgtctaaaatgagagagcacttcaaggaagaaaaatgtgggagatcgacggtgatattcttttgcatctttatttcgtttatttttctagctacttctccgctagccataagatagaggtagaaagtacaacggtctgtgagcactatatgcaaaagagcgtggcctagctggctactggggatctgctcctatggcagtagaaagtgacctatcctcagcatcttcaaatgggaaagagagcctgcaatcattgtgtgccatgccatactttacctatcatgtttgctgtctgatcgagcaagctgatgactgatgagctgagctgagctcgctaccaatgcactctgcatttctgcaatgcacaggggggagagggagagatcagagatagatagagagagaactaacttttttacccctaatggcagcttttccgttctgcgcttttacttcctttaacgacgtaacagaaacaatctgtctctactgattaatttttcttcttacgaacttatgatcagtaatgatttcctgctacgagattagagatgtcatccaaaagcccacttaatttcataattattgaaggcacaaaactgcgcacgttgcgtaccaaacatgatttgtcatgagagcatgagagttggcaggggagagatctaggagcatgcaaaaacaagagcatctcatgacaaatcattatgtaaaggaaaaagtacgaaatacccttgaactatcacggttgactgaattaccccctgaactagaaaaccagatattgatcaccctgaacttttagtaccaggagaattacccccctcaactcaatttagagctgttttcttctacattgcgtccgcgtggcaatccagtcagcatttttcattaaaaaaatggtgagactcacctgtcatacctactcttcacttatttggttattcccaatctctctctcgcgtcagtcgcgtggccgcaggcacgcacgggcacggcggtgtgcggcggcgacgacgcgaaacgaggaggggaaccggcaggagctcgtcgccatgcgcgacgccagccgcggtggccgcagagaccgggctacgctcatcgccgccgacgtggcgttcttcttctcggcaacgccgtggccgtccgcctcgtgaagcacctcggtgccaaggtggtggtctccgtcgaccgcggctgcgaccgctccgacctcaccttcgcggcacggaggggcaggcggcggcgcgagacgagggagcggcagacggcggcgcacgggccgggcagtgggcagcggcgtgagacggtgtctcagggctcacccagtccatgacggtggagccgctggcccacgacaccgtcgacgaggccacggacgacgaccgacgacgaggaggagctcgccttggccagctgccggcctctccccttcttcctcctctcgccgccggcttgttagtcttcagaataacttttgcactgaaggtatcatcacataagactctaagactgtttgcattactggtgtgctttgctaaagtatgaatgaaaagaactttaaccgttggcactcactttaaccagaattagcacagcatatggaggacgagataatcagataggaaaactctcacttcttttactaaatccatcactctgcccttcgacctcgcaagaatcacgcgtggctacatcgcatccattcgctgcaactcccatgacacgaaagccatccaccgaaagaaaaatgtggcatgaaaatttggtcggagcaaccgcgagggaaattcactgaatcctcctccggatcatggcgcccgaatcgttccaaaccaataccaatcaatcccccaatagcacgcacaagcatggccaatgcagcacgacgaacaccaggaggcccccgaggtcgagcaggaacgccgtcgtggccgccacgcgcgcgttgtgcgcgaatgccggctgcgacacggaggacaacgcccccgcggcggctcctccgcgccgtcaccgccggacctggaggaagaaggggaagggaaggggtggagcggctgtggtgaggaggtggcgtcgccgccgccgctcgccacccagccgcgcccgccgccgccgctcgcgccaccgcccacctctccccctgcgcaccccgtgagagagagaggaagaggggatggggatgtatgacagatgggtcctacaactttttaaaaaagaaaatgctgactggattgccacgtgtatactacgtaggacaaaaccactccggattgggtcgaggggggtaattcgtccggtattgaaagttcggggtgagcaatgtctggttttcgggtttaggggggcaattcggtcgaccgcaatagttcagggtggtaattcgtactttttccttctgtgaaatgagtgaaagaatgtcgttttgggttattcatggcatattgtacctctatggactgtggtacatttagggtttatacattgtcaattgtggtggaaaacgaagaattgagcaaggtggtattatttccccaagcgtgcctcctgcttctttgtcaaccaagaaccgtttgttgccccacaccccccccccccaaaaaaaaaaaactaattaaggcgaacacaaatcactaccatatctatcccctccaccgtgttatatatatggtcaaggttgacatgacaacaatcctatcgcccttatcctaatcctctcttggttaagattggttggattatagaggcttcttttgcagcaataaccatattgaattctctgtttgggtagagcacatgccatccgtttgtctgatcattgtagtcaatgctctacatatttgacagaaaactccacgacaacccttttattgagtactcgtgtctagtaaagcttacacaaaatctacagctcatcaacaaacctcaaattatgccctttcagtgaaggtagctgaagggtcactggtttacaaacaatgtacatgctagtagtataggccaatggatgtagtcgatgcggtaatattgcaactccgacccctgctggggcatgcccaactcaatctattggtatttggatgaatatccaagatttatttttttacaaaaaatatatatatggtatgtaatgcgtatgtgtatgaaaaaaggttgtatttaacctaagagcccatattcatattcagtacataatacgtatgctatatattccattaatactatgtgattctatacatgccaaatactaggggttttacctataaatatttatttttaccctattatatttcgtcaaaaaatcctaggcccacccttggctcgaccttatacttagtatggtcctgtgtactataagatgttctatccaaatgatgtaccggggattaattatttccctgaacttggtctttaatctaccatataataactttaagtcttaaaaaaggacaatcatgctttttggcaaaatttacgtttttcctccctgtggagaagtggtcctacggctacagcgctaggcctcaagctacgatcgagctgatgatcaattaagtctagagacttggcagctttaagctcaagctaatcgatcctacctaggatagactaggtttgtttgagcctagctcatcaacatactcactttgtcaaataaaaacaatatagtacgatatgtgacatatatagtactatcaatatggataaatattaaatttattttatatggtacatatgggatatatgacatagactcccttatatttcatacatatgacttgcgtatattatcattaaggattctgctggcttgatttttgaaacaaatgaggttcaattctcagacatctcttgtaatttagctataatagtcatcaatctcacgcaataaagacatgttattttctgaattcgtggggatcatattaaaagaaaagatccatattagtaattagttacaactcaattactacgtaccgattttcgattttaaaactataaactaataaaatgctacatcgagaatccaagatggaagtatctaaaaaaataccgcaagtcttttgagtaaaaaactttcagatataactatagtataattgaagtgtaactgcattgtaactacactgtaacagtataactgcactgtaactactatatagtttatgtaaaacttgcattcaactatggtttgattagctagcactaaattcttacacgtgacatgtttgaaaatttatttcttgcaactttttctcttcacgcacaaatcttaaggcgatccgatggtcacaaatctgaaagttttttggggggcaaaaaacttaagaaagttttctagcaaatccaatccaagataggttcaactccatatcgatctatcaatatcaaattttggagttaggaaataaaataaatctaaatagtccaaggtacctcctagaaatcacatgttttgtttaatacagattctcaataaaatctacagccatgataaaatgacctacatttaaagcctaaatattatgtgatcatatatcatatatacttatatagttcatcccactaactgtagttaatgctatttctcttttctctcattaagccacatcaccccaattatttctagcctttagatgatatatctatggtccaaattatctcttatttcttaaaaacatgcaatctcaattatttttagtctcaaaattgtatcaaattgttctcgtattgacaatcaaattacatcttatttgtctatattatgcaacttaatttttcgcagcaacgcggcggtgtattcatctagttaatatgggagttttctcagagcgcccatttagtaaaggtatgcatatatagatagattgtcatacaaaactaacattagttccaaccatgacatgcagaaaattatataataacttatgtaaataagaaatgattatttatctaaaagttgaggagggagggggatggggccgggagtcagctggtagctagcctggtacccatttggtaaaaatccatagtttttgctttcaaccacacaaaattgtttctctgccaaaataatagcaatcttcctttattgaaccgtcgtgcatttttttttaaatgttactatatatagatcttcgagtcatatttggccacaacatatatagcaaaagtcaatatgctaaaatgaacaatgtactcaaacagtagccctttttaatttttttagagaaaagaacattttaattaatggtccggctatggggagaaagttcgaacacaaacatatgctgctgcagctagccctttaaaaggagtaaatattatcgtcaatgatatgcatgcatgtaatattttcatgaatccgcaagcaaattcagagaatatggaggcttacatgcaaaacaaggaaagtcccagcctagaaacaagaagaaacaaacatgacaagctactgcactactagccactgccgaattagatggtaggatgttgatacgttgttgtcctcagcctctttcatactacaattgtcagaagtacggtatgacattcaatttcagaagattcagtctgtgaatgaaaaggatctatacccaaagcagtgaaagaaaagaaagaggaaaggtagagataaaaataccattcactcttccaataatagaggagcgtagagtgatagttatagtagagagcagatgccccccttgtgttcctgccctgctcctatcattatcaccatggaaatacaacagaagcaacagctgcagtggtctaaattctttcttaattagccaaacttttttcttaatctgaatcccttttactgctttcatcctcctgtacctcccatattgccgatatattattgcaaaaaaaaattggcgcctttatggaatcaggatctaggacaaccttcgaattggctaaaggccggaatcttcttcagaataatcagatataagaaacattaaaagatccaaaggggggaaaagccatcaagatcatagaccatatcatctcttcatcatcacatcttgtccatgccgagaataaaggggaaaacagcaatagcaactaatgcaacagcaacagctgcctagttccaagggaacgtactcttaataattaattaagccttggttacacatgcatgaagacagcagataataatgagggaaatttcatcagccaaaatcctacatgaaatgacatacacgtacccttaagcagatcagtgaagtgtgttaattaatagaaagcacacacctcctgcatgcgcgccatgcatcaattcttcagtctcttctcatcacctgatcacctcacttccgtgctcctcctcgccctcaagccgctgcgccgccggcgcgagaaaccccataaacccgccgccgccaccggcgccgccaacgagatggccgaagccgacctgtccggcagccattgtcgacggctggtggtggatggctgcgactgcgagggggtctagccatgcgcgggctgacgcccacccgcgaccgctggactgaaggggttccccatgcgagaagagctggctctggtccagcccttgccgcgacggcatggcgaacatgtagccgtcgccattgccgccgccgcggccgtctcctgtgctgttctccggggcatgccatgcctgcattctctggctgtggtcgggccaacctggaacgcctgcactcgagatcataccgtggtggttcgacgagacatggctgaagatctggtgctggttcgactgtagggtgaggcacagctcctgcggctgctggttgcttgtcgtgcgcgacaggaggtccggcggggatcccctgtactcgtcgtgtccggcggaggcggcgccgctggctgtggacgaggaggggaacagggacttgacgctgtcggagactcgatctgcccccagcgaatgtggaaggaaggagccagcagcggccgacgcggcgctggtcatggtgccgccggtagtgttgccgaacccgtaggacgtcgaggtcgcctgctcggtggcctcgggctgctccgtcgacgccgcggcgggcggcggcggggcctcggcgcggtcggggagctcgtcgatggcggccttggcgttgcgcatgagccagtcgacggccttgctgggccggtcgtagccgaggcggtcctgcacgtcgtagaaccggatggcggtgtgcgcggcgaggcggacgcgccggtcccgcagcccgcgcgccgtgcacaccttgctgtgccggtccttgcgcccggccgcggaccgcacgatgcggcctgccccgaatgcagtggccagcgcttcgacgggcgtcgactcgccgctgctgccgccgccatcgccgccgccgcctccacctcccggcccccggctcgccggctgcctgatccggtgttgcaggaagctgccgaatccctgctgctgctggtagatctgaagctgctcatgcgcttgctgcgccctctccttctcctggagcaggtagtgcaaggtgctcgcgctggcggtagggttgctcgtccaagggtctaagcccttggacaactggttcttgtcttcctccagcttgagctccctctcacccacagttaaccggaaaggagaagagcgaaaattaaaacaagaagctaaattctattcctgcatggggtttgccaagctcagctcagctcagctcagctcgccatcctgatgagagggaaaaaagatacagtggccatgggaaccccacagctccatgggcagagcaagcacgcacacacacagtcgcagcagcttaatagctatagcggcgcccagtgcagccgcccggccggcctctcttttgtgaaagtgacaagaaaagagggcagcgcagcgtagcgcagctagcccagtgcagatcttatcttggcaatctagcgctttgtgcttgtgcgcagctcgctcttgctagctcagctcgcagtactggctacccttagagggtgccaaaagaagatcaagaaaaaaaaagagctcccaaaaggcaagataattgttaaaaagcatgtgtgttttttgcttaattatcactattcaagcgatcatatatatatatatatatatatatatatctgtactcatttttttgttctctctttttttttctccttcgtgagtaaagtggaggaagagagagattggtagggtggggctatggaagtatagatcgataggatgatgcagggagaggggggcgccgcagacaggctcacaggggcagcaggagtcagggtgcaggagcagcaggacagaagctagctctggtgagatcacgcccccatctctccaatttccctcaaatttccccaaccttaattgcgtgggagaagcccacattgaattcctcctctcaatctctcatcactcgactctttctcgagaagactgtgctacaccaataggagaagcccacgcatgcattgtatcgatagatcacccacccgctgattgtgtactgtttcgttgtgtctattcagttgcaaagctgagcacaactgtgatggagaataactatagtgatggtcatgcatcacatcttttttgggtgggtttcatcttcgttaagctagctagcatatattcggattcagtagatacactgcaccttttaatatatttgtactatgaaacttaggaatggaaaagcttcaaatacgcgagagttaattgtttttcatgtgaaattcctgagcaaaatactgtcaattctagacaggatggagcacaggacctaatgtttgaagttactgactatataaaagtttttcatgtgtacaatacgttcagttatttagcacttctattcgtaagtctatgttactctatttatactcgtctagagttgaagtgttccctgtgaacgcagggatttaactgaatctatttcaatttcagttttgtaggcctagcgttggatcttcataggaattttataggaagtagttcaattccaacaaaataaaaagcaaatccagcgttccaaacatggcctagtgttcatataaatatatatgatggaattaatttccatttgcgtggatttgttttttactccctccattttatattataagtcgcttgatttttttcttaattaaagtcttttgggtttgaccaactttataggaaaaaatagcaacatttagaacatcaagttagtttcattaaatttaacattgaatatattttgataatatgtttttttattgaaaatgttagtatatttttataaaaacttagtcaaacttaaaaaaatttgactaagaaaaaagtcaaaagacgtgtaatatgcaacaaagtattatatttgattgcaccttaagtaacgggtctgtatatatctatatatgtacaaaaatgcagacttgagtagtagcaaatcttcaaaagaaatattatgatgtaaaaaaaacgtttgtaacattttgtcggttgatttgtaactattttttttacacatactatatccatgctgaaaagcttttattttaagctacaaacctggacatatgaacctagataactacttagaattagagcctttttgatgaaggtagtatgaaattccattcagtttcatgttggctgggcatctagggttttgttagttgttacttatagtatgctatacagtgtggcaggcaattagacggtagaggatagtatcgcagccaacataggagatatttaaggcaattttgaggaaagaagacatatactctctccatcccaaaatataagtttttttatatgaatctgaacaactgtttgtctagattcatagctaaaaattactatattttaggatagagacagtatatagtaattaatttggctataaatatgtttttgtccttttgactccgcaatatatacagaaatgtgactggatttcccaaatgaagttagttagttcggtattgactattcatgtgaaaactaaccagctcctactaacaatgttacgctcgactttttacacatgatgacatgaacatagtattactatgggcagatcatccccagtacttatattaaagactccttatatatagaacttatactagctacctgcctgccatctttgttagtaaatcccgacatcgcaatcacacaggtacagtctttttctttctccaataactactacaagtagcaggctgcaacgtgtgctagatccatcaactcttgcccgcgtgcactgaatgcatacgcaccaattatttggaccagacaattggttttattgggggtgtcctctgtgttggccgggttggtttagggtccagggcgtgtccggtttgctaaactgggttaatctctccttgccagatataaaacgtgtcccatgatcggttttcccttcggccttatcctcccatttgcgatgatcagacacatctatcgtcctcccatttgcgatgatcagacacatctatcgtcctctgaagatcgaacacatgtacacttgcccatccgtctctgtctcggcatcaatgcaaaatatgattgatgaggacatgcctatactgaatgaaaccagataaacgtggttagttgcatatcagcatatgcatggcacgaattaatgaagggtttcctctcgccgtgcaggtacatatatatattaactgtgtatggattaagggggtcatacctttaattaatttattggttttgaattgatagatcttgaaacgactgtaccctccaaaaggaggaaaaaaaggatctttgtgtagtatcgttttcttttgtggcgtggttgtgtttactgtggcggaatcggagcttttgtgtcgggtgtggctagccgaacaataataacccataacaccttcatgtccgtttttgcacatgtgattgatggttgacggagctatgggcgaaagccttacccccggtctctgactggtgttggcaacattggtgcttgtgggcgtcgtcttcctccttgaagtcatcattaagtggctctctctttatccgggtgaaaatctagtctagtgttctcaatgggtgttggcattattctagatgtttgttttccttcttcgaggcttcatgcctactccattagtttatgctccacggtaggggtgtttaggtggtttgagatagttgtttgtcagtcggaactactcatctgttttgtggtaagactggcaacaatgacatgtgtcagtctcagtagtggtgccaccacaagtttatcttttttttttctccgtgtgggtttaatttgctggttttcctctaattaatagtgcaattgttaggttttcacgtcgggttttctaataaaatggaccacctattttttttcttaatttaaaatagaaaaacttcatatcctgtttcttgaggtttaccttaaaaaagaaaagaaataagatcttggaatcactttggtcttatattgcatcattcgtaggttcatgatcgatatcgtgtcctccactgcttaaataagcgtaggttatccggccaaatcatcaagtccttggcaaaaattatttgtgccttgatctttttgttcattaaggactacaatcggctggatctaccatgcacgtacaggtgatttatgacactgcagtccctaactagttggtacccggattatatattattacttgcgagttattcattgtgtgtagttatatttataataccatatttttcactaaaataaatagtcagcttgtatttatattgtaagtttctaaattatatatataatttaaatgcatttacaatgtaagtcccaaaattacatatgtaaagaaaaaatcacagcaagcagcacaattgcatgaaaagaaaacgcaaaagaaaacgatactgatcagtatcacagcaaggagtacgaactaagcacgcgtgcatgcataagtacaaactagtgtttgcacgcacgatggcaaagcagtcctgcacaaaatctataaggaaattggagagctaacaaactgaactttaatcagagaatatttatggcgatataattatagcaaaaccgtattctttttgcgaaatggaagaatccgatcgagctagtctccccacatgcgtaggcccgtaatatagcggctgggtttaatattgtaatctgcaagaaacgatatgattttacacgtgctgaaatcgcagcgcttcgatgtttataattctcgcgagaggacaaatgttcaaacaaatatatgtgaagatgattgttttttttcctccctgtagatcagaaattattacctctcggtatacggtaaacagtaatcccgatctcggctttgtctgcatctcaatgtctgtatatatagtcgctgtagctgtaaatgctgatcacatgaatcccgagcaagcaatggctcactttcatcataccgatcgattaattatcaggcgacctagacatacattgaagctatacacctacagaaggaatgacaggatttcagaatttaatgccactgatgatacctttggttgcagaattgaatatacggttaacataagtatagaagccggccaacagttaggatagcagccaacccccctgactggtacgtagcttgctagttgctagatgtggttgtgtatactacgtatgtagtacaagtctcgatatgattaattaagcgcatggtcagtataagcttaatcgttctcaaaatttccattgcgttaacacgtacagtgcccaacaggtagaaaacgtaccagccgtgttgatccgttatactagtactaccactagcttcggtggccggccggcctcctgcgccgcgtttcttttcagccttttcctggtctccaactgtcccgccgggcttgcggggccgcgcggctagctgcaggctggcaaagcgcgcgcgcgctcgctgccactgcgagctcctgctcgctcggtcggccggcccgtcgctactcgctaggcgtcactagcgccaacccgccacgccagctcgtacgttcgtactgctgctcccccaaaacccaatgcaacgaacctttctactagctccgcctccgcgaccggccgcacgcctcgcgctcatgtgacgcgtcaccctccctgtgtactacgctgttggctcgctcgatcgatcgtcatgcatgcgcgcagcagcagctgcagccgcagccgcgcgcggccgaggaagaaaggacacatgcatgtgtccaattattgagactttgaggcggggaaagcgcgcgcggacacgccggacagcgccccgggcaggcacgaggtagaccgcgacaattcggcacgaaagaggtggccgatggggtgagagagggtgaggccggcggctgtcccacgccacggaacagtagcgcgcgcgcgcgcgcgcgagtacgtcgtcgtcgagactggagccgggcgggggcgcgtgacaccggccggcccggaggcggggcgataccgtatagtaccgacaccgagtgcgacgcgtcacggccgcgtctgcatgcatgcctgcgcagagaccgggccgggcgcgaatgggaggagttttttggaaacgcatgccgatttacggatctggcgcgctgggcccgcccgcccttttccctgaagctctgtagcgacgcatgagcgagcagagagggtgtggggtgatggcgatggatgcgggcgcggccaccgccgctcgtcgcttcgctggtggcgtgcaggcaggcgcaccgcgcaccgcgcaccggcaacatccgcagacgcggatagcaacgggcgtgcatgcggcgcggcgcggcgcggataaaaagggttgttgccgccttgccgggggcccgacggtggtggatgagtgtggatgtcgggcttctcggccttttgcctgaaggaggcgccacatcatggagcccagcatggacagaagaggctgggcctggcccgtttgaacttctcacagcccaggaggcaggagcaacgggccctaccccattgtgtgctccacgcaccgcaacaaggccgagctcctgaaagggaaaaggaaaaagagggggcccaacctcaaactactacaaccactgttctaaaatataacaatagcataatactataagcattacaaattataatattagattgtatctaatccatataagattacaatattttaggatggaggtacttttttacagggccagcgaataatgttctagccaaatttactaagagcgagtggagttttatataggaaaaagtacgaattacccctcgaactatcgcggtcgaccgaattacccccataaacccgaaaaccggatattcttcaccccaactatgcaaaccggacgaattaccccctcgacccaatctgcggtggttttggtctacgtggcgtacgcgtggcaatccagtcagcattatgtttataaaaaaattgtgggactcacctgtcatactcctcttccactcttcctctccctctcacccttcctctctctcacgggtggtaggcgggggacagagcagcggcggcgacaacaggggatgagggtgacgtggacaaggatggcgacggaggagtggaggacgatgctcgggcactggcggcggtggccatggcggagaggcggtggctcgcgtggaacggatggccacgggtggtggc

SEQ ID NO: 6425 - DNA, 7588 bp, Oryza sativa
cccgccgccactcgcctctctatcgccgctcgcgcccgccccctgcgccgccttgccttgccgccgccccgcctcctccgacgccgcgctcgtctcgcctcatccgctgtcgcgctctcctcgaagccactgccgtcgcctcgcctcacctcctcctccgccgcgctcgcctcacctcactgctgcctctgccgtcgcccgtgatagagaagagagagagagagtgagagattgggaaagagatagaagagagagagagactggcaggtagggtctgcctacttttttataaaagaattgttgactggactgccacgtagaccaaaaccaccgtgaattgggtcaaggggggtaattcatccggtttgcatagttgggggtgagggatgtccggttttcaaatttagggggataattcggtcgaccgcgatagttaggagagggtaattcgtacttttcttttatatgtagtagtaatacatttaccaacaaacatggtttgtgggaaaaaaaaataccgcgacatgatcgacgtctatcacgcattgttggtccggatataatgatgctagttcctatgctgaggtgctcaacgaggggttaaatgccctctctttcagaaagaaaatgctacacataccatgttttcttaccacttttgctacgcatacccgtgaatttcatatatttatactataattttgcttgcttaaggttttggcacatttcatgtaatgggtatgtatgtcttgggatataggtgcccgatccccttatggaataactggaaacgtaagctgtaaatctgacgtggggtgcagaagattttgattcctttttggtcttagatcatattttttcaatgcttgccgtataggaaccatgaaaaaataattacctattcgattaaaaaatattagtttaaataacatataagtaaaaaggaaaaataattttaaaaatattataaaatggatcaatatttcatatctctggttgaccaagtacccttgcgtaatgcctaagaagcaaaagaaaatcatcgtcctggatatcccgaggatatttcctgttcgctcggccgcgactccgactccttgtgtggtgtggacctgtggatccctcggagatgttgctaaaaccatttggtgtaattgtaaaatatcaaccatccctttatttctaccggctgatattaatttctcctaattaactctcttaagcagtgttgatttggtgagaaaatatttttattttcaccaatgagataagcatcacatatgtgtatatccctataagatcggtttattcttatcgggtatgtggtatccatatccctgacaagcattacatatgtgtatatccccataagatcggtttatcctcattatgtattttgaatatatttttttttgtctcggacaacgctacttgaaatcgatttaataaaaacaagaagaattggatatgtgttctagattacattgtgcttgcatgttattttgggaaatgagtatgttattttcttttacgttagttggagtgcaatcgctactatggaaggaaacatctttaaaaaatagtttcccttctaatcaaattaattaagtgtgaccgaggtgtcttaattgatctcatatatagaaatagaagaatggctatgagtttgccaaatcctcctatagattgttaaatgggttgtttattttcgtgcacgcccgagcacgcgtgtatagttcatgccccagtaacaacacgacccatttagttgtgggtcgtgctggtacgactagtctaatcatggtgtgcttgggctgctaccaggctagcgtaccaacacgacaattgcatatagcaaaccagcacacacatggtctaggaatggtaggacgcaacctggcccttgtgacatgatggcgactgacgactggtgaacaattgctagttgagcaactgtcgtccgaacaagagctataaagaaaggaaaacgaaagaattgagaaagctagggcttgtgttagaggaaacaatggtgtgagcttgccgacgtaggtctacacgacaacgtggtaacgcggtctacccttttcgtgagcacaaccactaagcgtgtcagccattgagagctcactagttcggggtgaaggaaatagcaagtgaagggagcttgacgaggaggaagatgaatgtgctattgtgagcggaggatcttaccatagttttgttgaagtttatgcgataggatgcaagaaactctttcatagttttttccttggtatattatcaattttgtgctaacgggttttcacacagcccacgtacccaaatgatatctcacaaggttgtgcctggcctccagcttcaacacgtgggtcaatacagtatgaccgttcgctgaatcgtgctactgattaatagggcattgcccaaacatatctatttatccaccatttcaaccctataaaataataaaaataaaattcaccgtcttaaaaattcagctcagaagttccgtttgaaaaatgggattatttccattttttaaatttcaccgtttggtagtgtggggatgggatgtgcaatccgggtggcggaattactaaattaccttcgccattttgacgtgtagttggcctctgtcgtcagtttgcccgccgccgccgccgcctccgcctccgctgaccgcgagcgagcagggcgccgtcgttcgtcctgttgcttccgcggttccgccgcatcctggtgagtacatcctccgccaccgccgtctgcgccgatccccatccatcgcgcgagcgagcgagcagggtcgccgtcgttcgtcctgctgcttccgccgcatccgttatgcacatcctctttcccatctccctctacccacgcactttttttctcgaatttgcgttaaccctagcttctgttctagaaatttgctttaaccttaatactcataacagtttgtttgttccccaaaagtttgggggtttaactgaaccacgatgtcccatgttagatccgccactgcatgcagacaccttccctgatgtttctctgagaaactaccccccccccctccctcccttccctctgttctccagagctacatagtgttatctgaatagaagtattgttctagagagaagaaggttttattgaaaatttgatcatctataattcatattgttctagaattcatctgtgatttgtcaagttttaagtgacgtgtaggtggatatagtttcatcaacatgtacaattttttttttggacgttctgcatgtatctaacgatcatataactaccaaattgaatctatagtcacacttctgttttgtgttattagtggttacctatatcctttcctattgcatgcagcccaagcttgttggcaccatggatgaatcacgaaaaagagccgcatctactgcaaatgctaaaagttcatcccttggtatgatacaatagagcatcatatgccttgttgcttttatgttgcaccttaatcaaatttatctgattcatgtaagatgaatactcctggtatgtaactgtttttgaatcaagttcattgtacttacatatgactgcctgcaggaaattacatatgttgctcatgaaatgcatattttttttaattttgtgcagtagggtaggaaatatttcttccttttccatcgtaacaacttgaaatggtgaatgctttttaatgtccgcaggtgaagattttggcaatgattttctttcatcttggaaattaccaaaatcaggaaatgacacgattgactttgacgttgagtcagttccgaagaatagcaagaaattcagctttgacaacctgtgagtattaggcttgaaagtttcctttagcatatgatgccgcagtaattgggaatgacagtatgtttcttttatcagggatgattttgggcttgatggagcctttgacaaattgtcgtcatttaaaatgggcatgtctgatctagatttctctggtcctctcaagaaaaaggtgaagcccaacaactcaaatggcaacgatctttctgaagggataaaagggactgaaaaggacaacttctccttttcctttgatttcaatgagtaagtttttcagtgaataattttagtgagtaagttatattggtgaagaccaataaatatgacacaaaatcatgaatttagttgcttcattttctttgttttgtttacttgaaggctgggcaagttcaatcttgatgctaacttgggaattgaggagaatggtatgagtaaatttgtagaaaaggtcaaccctgtctcttcagagggtgacaaggatccaagaaaaggtctttcagttaagggctctgatgttctgggaggtaacattagtaaggaacaaaagcaaacacatgatgcttgtactctgaggcctactcatttgggaaggtagggtaatgtaaagaacgataactgtgcagcttcaaacattattcctctaactcatttgacggtatgcatgattttttcagctttagccctgcaagaatggaccaaaataaagtagatttgctctcaactgatacacatgaagagaaatctaatgagacacacccatcaagagcagctgttaacaagccttctcagaatcttccttgcagttctacacctggtgaagatcctacacacgtgactacaacagcagttgctgagaactgtagagaagctcctttggtggaacttagtaaagttcatatatcaagggggaataatgatagtgggcaatcagttagttcacaattcatgaacaccagcaccacgtgcccctccatctcaagaaaattgacggcccaatcagattcccaaaatgaccagaatgagattgtgggggaaagtgcatgtcttaatgcacaaagtcctgataaccaaaggtttagaggaacttcaatgaagcttctgaagaaaacatcatgtgaaacaaagaaggctgaaaaggggacttcaggtccaaagagtctctcttcatcaatgcagaggtttgtctttgctataagtttctttattaacaacataagacctttattcttccattcagtgcttacccagtgattattttcattaacagataatgtatcttaaatcagatatcagtaatgtaggattaagtgtagcatatcataattctgcttgtacaagggagttcttttcctttatgtgagccgagatgtaattttgtacagtgatttgttaccatgtgacactattatgataaatatcatgcagggatatgagaaatgtcaaacccgcatcattgaatgaagcagggagtttgtctcttccgccccagtcttcaattgttaaagcaagcaggcctcctcaactaacttctgaaacaaccttaaatcaattaagtagtgccaataacatggtaaaaaagatgaatacacattctactgagttgaaaaggtagtagactgtagacagattgatggctagcatgtactcataaaatgttaatactgtatcaaataatgaatgtgctttataaaatgcagggaaagcacacaagctaatgcaagatctgaaaggcctaaaattgcttcgtcaaaaacattctgcaagccagcattacatgagctgttgaccacctccatgaatgccaaagatcataagaattccaaacttaggtaagaaactgctgcccttcaaccttgcaacatcaggaatgtgtcggttcaaaaactttattataatggtgtttacttaatgtatgcacaatactgctatgttttcttcataattctgatctaacattttaacatggacatgatagttccttgataatttttgtgtcccgtctagtataaacttgagtaaaatcaattcacaagaaacccactataaaggtttggtgtgtttgttagcgtatttcatggaaactgtaaatacctcacatacttttagtatgttttcatggtggatgtgtttgcacttggaataggtgtattgaatagaatgcatgcgcactgcatccattctacttgttttcttgtttccagtacagcagaatgctctatatttaccgtattttatccccttgatccttccactgcattgatggttaacaagcttccttttcccagacttgagtctcctagcacaggcaatgtttctacactgaatgctcctagcagcccagcacatagcaatggacataagaccgttgcgagtcggtcactcttgggaagtaccaatgtttttgatgcaggaaaaggcactcctaaagctgacaatagaccactttctcaactgaaagcagcaaagtatagtatctctaccatattgcataaattaggaatttgaactattaactgtgtttttctaaacatattgcataagaagtgactgaaatcatctatatgaatgtagaattactaaagcaggcaccataagttcaaagtctgacttgcttctggagaaggatatgatggaaacgagcgggaggaagggttcccctgtaacaacatccaataacccaaagtcctatggtgaaggaaaatatgtgttgcctagcccatccatgatgcaaaagactcctaaggttattcactggtgcaacattatgttttaaaaaatcatttcctttttctcctattgcttgtatccctgtgtggtttaaccctcattgtcttcatctgaggattacaactaatactttttcttaagcttacattttccagactcaaaaatttgatttgtcaattcatatcaagtttgttgtttgtaactttgtatgtgcttatttcatatcaaagtttgtgaggaatgttatgcccttccacggcataaaaattcaccctggatataccaagtgttaaaaagtacatgcagaagacgatatccactcatggtaagagtggtagaccatatgtaatagctcaaattcctaatttatgaaattccatgtcatactgaagaaatccatcatgcccttatagaaaatttctatgacatctactgacttctgtcatcaactaatctatcaaattaacagacgtgttaaaattgtccaatcctaaaagcatgaagcattaatccacagatgtaacatttaagttgtactgttttgagtcagtgattatattacgggtggtagttttttacttgttcatctttaagcacagtttcacagggttttaatggactgatttgataaatgaaatatcctgcaaaagtcagtttttaagcaaggtttttatctgcagcaaatttactaagctattgataaaagaatacaattttttatgtacatttttttaggagaattcgctattgttagttttttgtagtttgttcatattgttaatttgccttctcaggaatcagcttcagatccaaaagctcctgctatgctgaagcacatcatgaaatctccagctgtgaggttgttgtttcgattgcattttaatgcataaaaatgtatcttgaatattctagttctctcttttggaagtaatagatttattttaccatgcagaacatcaccagaaactgtttcagagttgggaaataaaacagtaagtgccatgaatatatctgattactgcat

SEQ ID NO: 6426 - DNA, 19297 bp, Oryza sativa
acccctcatgggtttttgctccgcgtatgggttaggtgagcacagtggggctcacctaaccacatttattgtggtttggttgagcgtgtcacgccgcatgtaacgcagtgcagtgcactcgtttatccggtctgtgaccagtcacagaccggtcagatcgcgggttaggtggtgacaggcgatctgacgcacgcctcgccccatcccgtcaggacgagggcttctaggcgctcgtccccagctggagctagcgtgttacctcccagagatggcacgttagtcctggtcagatatatgccaggtttcatcctaaccattacaggcaagatgttgtgtgaagaagggtgagcatgtaggttgctaagctgacacgtagtggacaagaatgaccgacgtgactggtctgataccggtcatgtcgtcagcagacagccacgattccacgtcgcgcctgcttccggcggaagtggaggtaggtatgggccgtcccatcagaaggtcattcggacggcaaccatacaagtctccgtctgtttatgaaaaggtggggtaagtccccacaaaaaagagagaaatggtgcatgtggtatccccttaagatataaaaggaggaccttgcccactgagatgtggaactggatttttccagattagaaacccagaacaagggagaggctggctcatactttgtagctcctttatacacagatcttccaaaacacaggagtagggtattacgcttctcagcggcccgaacctgtatacatcgcccgtgtcttgtgtgtttctggtctcgcgagccttccacatacagagagcttagaatctctccctgagtccccggccgaaccggcaaaggggggcctgtgcggtctcccggtgaggagccccacgctccgtcactcggatataaccatgactaccttatgtattaataaatcaaaggcacatatgttctacattagatttacttgttatatatttgaacaaccgttgctacacaatgagtttcgtgtgtttttgtttgcagagatacttgcttggacgaaagaaaagagaccgagcataagaaatgcatggatgattgaagaagttgattggggaccaaaccaagaccttttccaagtattctttcatctcaccacgtcacttttggtccatagaagacaagagataaagttctatacgttttggactcgggcctcctgacagcatcaacttcaaacggacctagccgctgatctagaagaaatttcggggcccatgagtacttgttggaaagcttatgaagtctactttcagatggttttggttccacatcaaaactcctaccgagctgccgggaatctgcaaaacaagtcatgcacctcatccagtccgaatctgattttgagttttgggccttgtaattgtgtcgtgggcttagcccaagggggtgtgcgccctatggaaaccttaggacgttcctaatcatatttattcagtagccgtcatcgtttagagtcgggttttgcttagattaatctgtcgagaatagtttcgccgctagatcggtttgtaagaccccaactcgtgagcttaatcattcatctgcaattttggttgttttctatctcgctcttgtttgtgttcttcgattggcaaacagggattagccttctcggcgaggtcatccgtgtttcgacacgggtgataaccagagaagacgtggtgttgcgattgcggggctcaagagcgtgcgcgttcaagaagccggatcgatttgtgtcgcgactctgcccaaatcgttgtttatcagaacctttcggaagatcgggaaccccagtgcacatcaccaaatcccctttcttgctcactcgggagcatcggctctcccctcctctctttgctgatgtcgacaggcagcacggccggcgagccctgacaacgcagatcgaggggcggtgcggccggcgagctctggtgggcgcagattggggggcgatgtgtctggcgaactctgactagtgcagatcgaggggcgtgtggccaacaagctccgggcggtacggatcaggggtggcgtggacggcaagctcttggcggcacggatcaagaggcggcactcccctgaggtggagccgacgagctctccggctgtcgctacatcaagtttccccagtgaggaatcgagtaagctggcggagtggatcaacctccttgccctagtcttcatttcgctcattcctctccgaccgctcctccttcgccatcaccgcgacccgacctgccccccaccactttttcccatactccagcttctccccttcctcgtcagcactcggcagcatcgccaacaagctccaagcctgctcggatcttgacatggcggcgcagaagaatggggaagatttgggagcagcaacagaaaggggaccgtgctcgcaccttctttttcgggcgtgaggaacctgaaccctagctaggagccgcaaaccttgcaagggcacgggacccacctccttttctcctccacatcaacgttcagcaacgaggtcactcgccacgtcgttgcactgcgaaaggcctgaagaagcgaagcttcgtgtcaatatccataggttgtcaggtgggcaatgggacgactacattattctaagaggacaactggttgcagggatttggtgttcgttctcttgcactggctgtgcatgatcggatccttgctagcattaggaggcgtaggacagtggccgaggcgctactcggccgcagatggaataagggacatcaatggtgctatggggattcaaaccatcctggattacctcaatctttggtcgctcgtacaatcggttgatcaactaagtaaccaaccagactcaataatctggaaatgggaaagctcaggtgattactcttccagatcagcctaccaatcattgtttctcggtcgaatacctttccaatccacgctgatatggaaatcacttgcgccacctcgctgccactactttacatggttagtggcactaaatagatgttggacagttgatcggttgtgcaaccatggactgccacacccaaattgttgtgtcatctgcaaggatttaaatctccggctatagctgccgttatagccggagaaagctgctggcaatagcaaccgctacgatatgttcaatttaccgctatgttttctttgacgctattagctgcttttagctgaagattgccgctaaacagaccatctattagctgccgctaaaggccttggtgggctgaaattccaatgaacaagcccatattaggtgaccgtgtggctcaagtgctcaacaaaacctaactctctcgctctctcctcctctccgtgattgcagcagcagcggcggcgacctgcagtggcgacggcgacggatgctgctgtggctgcgaccggcaacggcggctgctgttctcagaggcggcggctgcacaaatccctctccctcctcactcttcttccccaagtggtggtggcagctgcgcccggagaaggcagcgatggctgcgccaatccccactcttttcccccaaccccaagcaacgacggcggcgaatgcatatgaaggcccactcctctctcccccaagcgccaccaaggcaccaagctcgaacggcaggcaccatgtcctagcggagtcagaggcaggtaggatttcttgctttgatgttgtcgagtgttgaagaattgaagtgttttgaactattttgaatctctgatgttgtcacgaatttattatgatattggcaagtttatgttcaatttttgcaaatccgctaaatggcttaactgcagctatagccggccatagctggccatagctgatgaaaagcccagcagctaaagggcttagccagagattttaaaccttggtcatctgtgatcaacacgacgagagcatcgatcatttgttggtcgcatgtccagaatccagacaactatgatggtgggcgctcagagcaattgagcaaccacattccatctttggctctgtaacagtcggaagaaaaggacggatgctaccgaatttacatgttctttaatgtaagacttcacttatatggttaaacatatccatcatattttgcatgtagggttgttttggtttgaagccccaccaaaagtttattaatgtcaaataagatttggcactaacaaaattttggtaggattgtgttgtttctaactctattgaatggataagattcgatctccatccaaatagctaacaaaaactgttcaagaataccaaacaattgataggagaagaattgacttcaatccaaacatgcccgtaaacgatgactctccggtaacaaattgtaactgtccactcacaacggggcacataaggaaggtgcatttgcaacctattatggacaagttaggctcacgtctggcaggatggaaaggaaggctcattcagcaggcgggaaggaaaacactggttacctcagttttgagttctataccaacatacttcctcactgccttgaaacctcccaagcaattcattcaggacatggacaaaatgagaagaaaattcctctgggcggggcatcaagagctcagtggtggaaagtgcaaagtgaattgggaaaaggtgtgctcaccaatcaaattaggaggattggggattcttgatctcgacaagtttgcaagagcgttaagactgcgacggttgtggttctagtgggaatgtccacacaaaccgtggattggtacgcctccgccctgtgatgatcttgataggaagattttcgctacggccacaatggtctcaatcggtaatggtaggaaagcagatttctgggaatcaaattgggtgggacaccagccactcaaatatcttgcaccaacgctcttcactcattccaaaggaaagcaccgaacagtacacaaggctttgagcgataatcaatggatcagggacattaggcatgacttaaccttggcgctggttcaagaatttgtccaagtccatcaacagatttgggaaagtggaataactttagtagaggacaccgaagacactatcctttggaaatggacaaacaacgacaagtattcagcaaaatcggcatacatggctcagttcagcggcggaactggatcaagagctgccaatctgacctggaagtgttgggcaccatcaaagtgcaaaaatttcatgtggctactactgcaaaacaagatttggacagccgatcgtctacaactccgccaatggcccaacaattacttttgtcagctttgctacaggaacttggagacaacgcaacacctcttcaaagactgcccctacacaaaggaagtatggtagagggtcctctcaagattaaattgcaatcacactcttgcaccacacaacgacgatgagggcttgctggaccggtgggaaagaagaactagccacggcgacaagaacaaagcgaaaggaatgcgctccattcacatgttgctcggttgggagatttggtgcgagcagaaccggcgagtgttcaaaagcaaagaggccacaatgtcgtatctggtgacgaagattgtggatgaaatcaatatttagataggatgcggggcaaaagatttagctagaatagtgcacaatagcgcctgattgtaaccatcccactcctctgtagtccccctgccccctctatcttcctgtatccaccccccccccccccccctgttttccttttcttctctgctcctcacctcttggtgaatctgtacagttcttcacctgcttaatataaacccagcagaagctggcttaaggttttttttaaaaaaaaaacaaattgtaactgtgatcgttcgaaagccaaatcgaagggcgaaagatgcttcacaaaccgtccaaaccgctgactccttgttgcctgctcgcccgtcacgggcacgtacacgctgttccgcttgctgaaagacgggaagcacaccaagttttcagcggccgctcacatggagagtggcaggaggcgccaggccgccggccactggaccaacacgaaatctccctcgttggcgagacaactctgacatgacattgcttagcacgcagaggtcgtccgtccatggcagagagctcgcttgcacggatacccaagcaggcacgagctgccgcagcgccgggcaggggtcacaggccctctcttgttctccatctctcgtcgcgcacagttctcccgaaagcgaccgccccgcccgcgtcgcatccgtccgtccgcatgccaaccaacggcccgggatctcggcacggcccggtccatcccgcgctttcgcaggacaaaacatcggaaaccgcgcgcgcacccgcgcacccaccctttgaaacatttctcggcgtgagcccgtgcctgctcttcgcctctgcgtccaagagcatggccgccgccaccaccaccaccgtcctcgccacgcacgacctactgctgctgctactactactcgtcgccatctccttcgccggagcggcgccgctggacccggagcagctcgtggcgctgcgggcgctcggcctccgcccgcaccgtctcgacccctgcgacgacgcggccggcgccgtgggcgtggtcgccgcgtcctgcgacgccggggtgccgtttcggcgcgtgacgtccctcgtgatggccaactgctcggcgaccacctccgtctcggccggggcgctcgaggcgctcgcgccgtccctccgggcgctctccttctccgactgccccgcggcgccgccgcggctgcttccgccggagcagctcgcggcagggctccgggccttctcctgcgtcgcctcgctccaccgcctctccgccgtgtggctctcgcacctggagaacctgaccgagctcaccgtcgcggacactcccctcgccaccggctccccttcggagctcgcagtcgtcgtctcccacatgggccacctcaccagcctcaccctctccaatgccaacctctccggcttcctcccgcaccactggcactgccccaacctcacccacctcgacctctccgggaaccgcatcaccggcgccatccccgacaccctcaccctcctcagcgccatcacccacctcaacctcagctccaacgacctcaacgggaacatccccacctccatcggcgatctcatttcgctcaccaccattgacctgtccaacaactccatctccggccgcatcccggacactgtctccacgctgcccgagctcgaggtgctcaacctgggctcgaaccggctcaatggcagcatacctcagttcctatccgagatgaggggcctgaaggagctcaacctcgagggcaacgacttcgacggcatggtgccattcaccgccaagttcgtgtcgaggctgcgagtgttcagggcggccgggaaccccaagctgtgctacaaccggtcggtgctgtccgccgagatcgccatcggcgtggcgccgtgcgacaagtacgggttcccggtgatggcgccgccggcgacggcgacggcgcggtcggagcggagcgcggactacgacgacggcgcaaaggacggggacgcggacgagggcgccgacgcgcggggcgggcccagcgcggcggtgctcggggtggccatcgggctgtcctgcctggcgttcgccgtcatcctactcgtctgcctctgcaaggtgtgccggtgaggcggcgccgcgcgcgcggcgagcgagccgagcaagcgggaaacgaggggatctcgtcgaattcttttgcttctttcgtgttgagttggctggttgatccgtgccacccggtgtcccggtgaaatcgtgaattattccctagctagctcatgatcgattgatattctttctcatgtaatttttgttgcggttctttgctcttgatcgggttcaagatcttggtttgagagctaagaacagccatatacaaacgacagcatcagtttgagcattctgcagagccaagcaggcaatgttttggcaaatgttgttcccctgtgtctgtcaacacctgcactaatggctcgtgtgccactgttcgtatgtgctgcactgacattcctgtagacttaaactattctgagtagagaaaatccgtaaaagttctaaccaatgtacggcaatctaggatttgttactgaaactacggagggcctgttttgtcacatcgaatatttgattgggagtttttgggcgcgaatgaaaaaaaattaatttcataactcgcttgaaaactgcgagacaaatcttttgagcttaattaatctgtcgttagtatatgtgggttactgtagcatttatggctaattatagactaatttggctcaaaagatttgtctcatgatttccatttgatgtgatgtttttagaaaaaaaatttggagaactatggttgtttggtttacatggacttattctaagtccctgtcacatccgatgtttggacaataatttggagtattaaacatacactaattacaaaacccattccataagcttggactaattcgcgagacgaatcttttgagtctaattacgccatgattttgccaatgtgatgctacagtaaacttttgataattatggattaattaggcttaaaaaattcgtctcccggattagctcttatttatgaaattagtttttttattagtctatatttaatactctaaattagtgtccaaacatccgatgtgatatggactaaaaagttttagcaccatctaaacacccgtgaaccaggccggagtgatgttactggtccttttggctagtactgagcactgaatgagagatcagttcctgtctgtatagcgtgtactgcatgttcgagcaccagttgatccggctgtgcaaagagattagagatcaggccagtatttccttccttgcatttgattgtggcacaaacacacagggggtgcgttgttgggtggccgtgttcattgcgtgaggtgtaaatgctgtcatctgatgaagaggaaagtccattttctgctcctttctgcttggacctttcgagtcggactgcaattttctactagccttcaacctcacgttgccaaccgcgcgcaattcggatgagccgcacggctatcatgtacccctcggtcccgcctcagcgcaaccatccaaaaagacggaacagctacgaagctacagcattggtaagcttttcagttgggctgccagtttgggcaagcgcagtgatctcgcacgtacgcgttgaacattttgcctgccactcaaatggtggtactagtaaggcaaggccaatgtatgatgcacatacacatcttaagatggaacccataaatagttagtcttttttatggtatgatgcataatgttatggtctttaacatgggtcccactataaaataaaaaattaagatggctgccagcttctttgagatagtagggagagagaggatgtataggagaaaaaaaatacttgtttattcactatggctagttgtaagcttaaggtgcatcataagaaaatttttcctattgctaacttgcacaatatataaggtgtgtcttaagaatatatttattccttaaggttacctttttagcacattgtggttgctaatactagtagtttagtagttttctgtatatctacacgtattctgctactcgaatggtatgatgcctgaagaccctgaagtcagatttcactgctttgccacgctacacttgtagtacaagtcacaacagacgagtggacgaccacgatacattggttatagtagtagagatacaatcgagtactgtgacgtactgagtgtcttgatgtaccttggaaaatgaagtttcacagtgttggtgcataagagcagtttaatggtatagcccactactagctccaaatcatttgtagccaatgtaatagacaatttatacaatagttgcttactatactattaatacatagtcccacctgtcatacacacattacgtcttggagtccgtgctgtagctggctacagatctgtagcccactgctcttctctctcttcctttatctctttaaaatatgtttatagctggcttatagtatgctattgtacctgctctaagagcaagttcaatagtatagctcactgctagctccaaatcatctatagccaatgtaatagctaattcatataatagttgctcactatactattaatacctggtcctacctgtcatacatacattacgttttggagtccgtactgcagctggctatagatctgtagcccgctgctattctctctttctttatctcttttaaatatgtttatagctggcttatgcctgctactgtacctgctctaagtacatatacagttcaccacgctttgtgatgacaattttccgatgtgatgatcgccgctaatgagcatccatgattgcaacagcatcatatggaaggtgttgattccctcctcgatcgtgtccctacgtctatgcaagacagcacgggccaccatgggttccaactcaagttagtcaggtcgacacagcaaactatcataagcttgcccatgtaaacaatcaaatcttattttacatggtcatcatccagtcacaccttgcaccacattgctgattggtagattaatttatctacgttcttctatcagtaggagtagtagtactaattcgtggcaattaggtcgtagtattgattattgtcaagatgcaaaggcaaggaagcgtgctcgaattagcagtcattagtgctgtttatcatgaaaggatgcagtactagccgaaaagggtgttgtttatcatgaaagaatacagtactagccgaaaagctggtgctgaaaagttagtgcaagaatatggtagctagggaattttgaaggctaagcaaaatcttgtttgctattattcgcaagacaacggcgtaccttttttctcttctgcaggaggctacgcataagataagattcagtagcatatagtcatataacattacaaactgatcagtagtccaatttcaagttcaccgaagaaaaccttttctttccccctcttttttctacaagtatgattaaacggatttaacggtgccctctcatagtttcagcggcttcaacatcaaaacttcttatatcacagacaataacaatacaatgaacattttcatgcggagtactaacctacaacacctctcagatcgaggacaaagcccagagagaggaaaccacccatcgtcttcgtcgcattagatacacacatttgcaataccggcaaaacaccgccaaacgggatgctcctggagcacaaatgtcgctcagcagtcgaagttggcgcagctgttggtggtggtggtctcggagctgccgatgaacgggtcgatcttgacccagaggagggagaagacggaggcgagcaggacagaccagagcacgacgatggtgggcgtccggttctggcgacccatgagacccttgaggaaggggtacaagtgcatgatcacccacatggcgaagaacaccttgccgaagagcgggccccaggactcgtagccgctgttgagcgcgtcggagaacccggccaccacgccgacgaggttgagcaccaggatggaggtcggcgggatcagcaccgtcgtccacttgaacacgtacagctcgccgaactcggtgtcgtccgtcgccttggccgtaacggtgaagttggtgtccagcccagcaatcatcttgaggataccctggaacacggcgaagaggtgggcggagacgccaccgatgacccagaactgctcgttgcgccaccagtcctcgatgccgatgccactccaccgcagctccaggacgctcgtcacgatgatggagatgaagaggccaagaaaccatatggttgcagcgttggagagctgaaattaagaacgacaaatgaataatgtcactaagcaatgttcaacatcagaactcaaaccaaaaacatgtatagagacaggcatcttaccgtgggaatgatgaatttgcctgtgagcaggcaaatggcgggcaggcaacagtatgcaataagaggaagagaggtgaacgggtagacgatggtgttgatgtaggacaatctctggagccatttcagacgaccaccaccgtagccgtaccagagtgggcagtgccggctgaggaagatctcaacggaaccgagagcccaccggagaacctggtggagacgatcagaaaggttgattggcgctgatcccttgaacgcgggtcttatcggcatgcagtagatggatcgccagccacggcagtgcatcttaaacccagtcaggatatcctctgtgactgaaccgtagatccagccaatctatgacaggacagaaccaagaaatcacgctttgagttttaggaggaatgaacttcaacaaaggtatagataataaggggagaattaacacctcttttccccattcagttttctcttcatatccacagctaatgacatgaatggcctctttgatcagtgtagatgggtttgcggactcaggaacgcctccattctccataagagttgattctatgaacactgatgacagtccaaacgacttctcaaagctcatctgggagataagcatcgagcgttcatactcatcatagtctgcaaaacaaaccacattataatgaacacaaaattattcaaatttcgaactacttttatctctccatgtttgtgcacttactgtcaatttcccgaagattgaaaatggcggactcaaggtcttcacgtcgagagtctctatgcatttctttctcacttttttcagcttttttcttaggacagcagcagcagcaccatgaacagacagaagactttggaagcgcaggcagtgatggtggtccataaccatagagcgcttgcctatagaaacaacaaccagttcccacataaaccggaccttggaggccatcaagccctttcatgttaacctgcagatgataagtatgaatatataaattgggtaaagataatagtcatgcaatacatagtcactctcttagtacttacgtcaaagaacacaacattcctattggcataacgatcgctgcgatcaatgccatcgaacctttgtgggaattggacatagcagacatctctaccaacagaagggtccatcatgaaacacatcgcttcacgaacagctttgctattgttaacatagtgatcacagtcaagattaagaatgtaaggggcatttgtcagaactgcggatactcgaacctgaaaaattagaaaggtgaccaaactttcaattactatatccacatgataagtttgccatactttaaactaatacatatatgtgtaattttctctaggagctatttttaccaaagcgttcatggcccctgctttcttgtggtgttggtaccctggtcttttctctctcgaaacatagactagccgaggaagctcatttccgtcaaagtcccgagcaccggtctcaccaaggaaaacctgttacaaaaagccagtggtatgctaagtgtaagtttgaagaataggctatcgtctgcatgttatctatgtcttggttttgatgcaagtataaaaagccatatgtgagtgtgtgagagagagggggctccacaaaacatttgaaccattttactaataaatctgtaaaaccttgagttactctaatgacataattttaattaactgcatcctgaagagtaggatagaatttatgcacaatctcctggacaacaagaatgagcatatcgataatcaattgaagttgtatgacatatattatctgcgaaaatcttaaagtggaactgcataggattagactttctctcctggttttctgcatgcaaacaatagttaacacttgacatattttgtttcaaagcagaagtcaatagaatctctactccaagtggcaacctaaacttcatttattcttaacttttgtacaccagaaactatcccgttttcaggtgagaattacaaacttgcaaatctgtaaaaggttgcccggtatgaatacaagaacaaatatccaagattgatgttttggtaatgaaaactgaattacctggatcattccagggtggtcacgagggttgttcccaggccatggtgtcccatcttgcataatccagccttcctcaggtgtcttctgagccttagcaaccaaagcatttatcctcaccttgtattcttcgtaatccctctgcacaaaatgtgatagttgctttaatattagcaaaagtacaatataacataaagagcaccatcaaactgtataaactcctatctaccttcatagcccgacgctcccttgacgaaagatgggtgtatcttgtccttcaagtagtcaatcttctgtgagaagtagaactcaggggcacgtggctcaatggagtacttcttgcaaaatggaacccatctcctagcaaattctgctgtttccgcaagtgattcaaatgtgagcatagccgaaccatcgtctgacacgtaacacgaaatcttctcaactggatagtccacggcaagaatggacagaacagtattcgcagtgattagaggaggctctttcaatggatccactgtactgacaaagaaatctacaggtgccaacccagaatcttctccatctccatatctgaaacaacacatgagcaatgcagcttatgagacacaaattcttaatgaatagtaatgtatatagttttcatatacaaattaggctttagcgaacacaccgtgcaatcagcctatcaacataagtttcgcgattgataggacaccacttggggaactgatccaggatccaggagaatccaaaccagatctcacatatgactgatgtcatccagagaccaaaggcgctgtaaacagggttggtgatacggtagtgaaagaagagccccagaactaccagacgcataatgattactgccctgtaaggtgtgagcttgttcttcgatataggaatgatccgagaaagtggctcatatgcatctgtcaagctgcaaaagggcaaattgcttggtattacaatcaattctccaagtacagtgttatgtcaacaatcagcatttaaaacctgaagtaacaagagtttctgaaactgagactttactggcacattatcaggatatgaacacgaagttaaaaaggttgcataataggctaggatagtatactggaggaacaaagatgaacatgtactgttcgcatcacaaaataagaaggcctagtgttataccagaaaaagataagctgcaccaaaatgaaaccttattaatgaagtatgaaatatgatgtgttaagaacttaagattgactacatatgctgatctcgaaattagctaaagggtttttctgtagtaatccaattagacgttttatattttagcattgtgagataatatctgcattagggatttattagttcagttctaaacgaataacgtctgcataagacaacaagttcagttctaaatgcacatgatctggcatctagtacattcaaagaaaaggttagatatagccagattctaaatttacccaaaccataaagtttgtttttttatatgtcaacaaggatcaagagtattcttagcctattgatctaatcagatatattttaatatacacaagaattttcatttgtaactgtaaataatgtatatgaatcaagaaatgttaagtttttgatggatcacatggatctatgaaatggttccatgttccttactctttttcatccataatctgttcttcaacaggtggagcttgagcttttgctgcagctttctttgctgaggctttcttctctttctttttctccttccagctctccaccctgttcttccagatgggcttcccagattcatcattcaattcttcaaatccataacaagtgaaaatatatatatatatatatatatatcagtactcagttggaataatgcaaggaaaaatatgacagacaacgagacgagttgcttaccactcccaactccagagacactgctaattgtcctggcatgggtgctcatagtcctggcatgaactccttcatcctgttcccacaaaatcccacacaacattgtcaacaacgtcggagcgctcaagctgttctacccagaattgcacgagtttatggagagggctattcacctggtgatcgctgagttggctggccatggtgaccctctcgcgaacaccgccggccgccggctcgtggctctcttccacttcctcctccacgaccgccccctggccatgcgctgtgacagagatcaacctcgtcagaaactgctacttcatcccccgcatcgatcgaatcccgcatagggcaaaacagtaacccgcagcgcgcgggggcacctgggtcgggcgcgccgtactccccgccgcagcgcgcgcaggtggtgcgtccctcggcggcgtcctcgtcgaggcaggccttgcagagcgcgtagctgcaggcgcggcaggcggcgtgcgcgtcgtccccgcacgcggcgcagggcgggacccccgactccatcatggctcacccccctctcctctcctctcctctcctctcccccaaaggagacgctccggggcgccgcgagcagcagcacgcgaccgcgcgcagagagcaatgcgcagaatgggagggggagagagagagaggctaagcgtaccggaggttggaggcatggtgatatagccatagccgcagaggcgcgaggtggggtggcgctggcaggcggtgggtggggttggggcgtcggcatcgcgtcgatcggcgggtggatggaaagaatggaagcaaggttgagcggacatggaacgggagagaggaggagaggcgggggaggaggaggcgtgcgcgcggcaggtgttcggtgttttcttccatggggttttgcggggtttcgaagcgaaggtgacgggggatttggtttggtttgcgttggccgcggcgaggcgcgtaacctgcaaggcgtaggggggatgaggggtgggggatcggactagcgaacggccggttggtgcgcgaggtgaggagggtgggtccgccggatcggcgagagcgctcgcgctgtggcgtcgtttttgacagcccgcttgctgcgacggcgacgggccggacgcgaggtgggaggtcaggtgctccgatctcgcgcaagagttcttcgtgttccacatgttcacggccaccggcacggcacagcacggcaagagctttggttcacggcgcttttgcggatgcggtttcgttgtactcgttagagaagttcatgtgctgagatattggttgacaatgtcgtggggcttttaactttacgagtttacgaccgacaaattgttaagcgtggcgtcgcaccagttttttcatgatgtggcccgtggagagcctagtactgtttcatgcttcacttttttacgcatcgtgattcgtgaacgtcgcgtataacagtaccggcctagcctctgataatgtagttccgcgtccttacggggcaggtgcaccgtgcactcctctcagtctctcacatcaaacacacgtatcgaactatcaactaccgtagaagagagaacaatagcttttggattgcgactgttctattcccctaatttcattttcctcctccaaccatagaaacggcaccttgacagacaaaaccatatcaatttaactccctcgtttgcactgactcggcgcttacttttttttttaaaacctaagtcagcctgagctgattttatattaagcagaggaagaactgtacataatcacccacggtgattagagaggaaaaggaagaggaaggccgagtttagttccaaactttttattcaaacttttaactttttcatcacatcaaaacttttctatacacaaacttttaacttttccgtcacatcgttcaaatttcaaccaaacttctaattttgatgtgaactaaacacacccaaagtatataaaaaaaacagcttgccacaacgtatagttttaatgtgctattctcacaatgtctttagccccacaaacagaccataactggacctcatccagcaccttcgccaccacctgaagcattgagagttatttatccttgaagattcgtctatttctttcacaccatacttcccaacagagaagcacgtgtagcgatcgcaatccctttgtttgtctcttgtcctgctgggatgtcctcttttcccaccattcaatcagcttctcctctggattgtgcgctagaaataattgactgcattccagtctcgcagctactctgttccagacctctcgtgtgaacgggcaatccttgaacaagtgctgcgccgtttccaggtttctgtagcaaagctgacaaaagtaacaatttggccactgtctgatttgcaatcgatccgctgtccgtaatctgttatgcagtaataaccaagcaaaattcttgcacttggacagtgcccatgatgtccaaatcacggtggctgcccttgattcctctctgccagcgaactgggccatgtatgccgattttgctgtgtatttgccagtattcatccatctccaaatgaccgtgtcctcagtcccttctgataatgctagttcgctgctccaaacaagctggtagaccgcaaagaattcctgaaccaatgtcaagttcagatcatgcctgatgtgatcgacccatttttcatttgccaaagctgcggcgcttacttacagtagtaactattagagaaaaagtaaaaaagtacagtctaatctatcttttatcgcctaagttttactttggaccatccataaactaatcttttcactttggacctgggtaactttaccatattttcggtttggaccacctaactctctttactatttgtatccacccaccatgctgctgaatatattacctgcatatagacggggaagttcaacgttgtatcaaaattgatttgattgagattcttgatgagtactgaagaaattgtttgggggtgatccaaactcaaaagataacaaagttactcggtccaaattgatcagatttgtttacgggtggtataaagtgagacttgggtaataaaatatggcccaatttgctattcactcaaaaataaaaaatgtttgagaggcccacatgtcaacgagggttacttcttccgtcccttccctctctctttgtttgtagaggagtgtgcgaggatagtcatgactcatgattggatgtgactctagggcaacgccattaagaggacgaaggtcatgcattggaacaatggtggcggcaacgaacggtgttatctt

SEQ ID NO: 6427 - DNA, 47203 bp, Oryza sativa
catttcactatgatcatgtcatcgttgccaaacttgttgccaaaacgaacaaccaacatcgactttcccatggtggaatcaacccaagccagcaaagcaccacttactacacacggatagcaacaggacccataaaaaaagattgcaacgtataaataattttgctaagcttcattgcactccaacaacgaaataacttcgactcaacccaataaaaacaaacaaataaagtcggtcatccaccacaagacaagaatgtagaaaggaaaggtgaaggcctccaaaagtccaccaatgacaaaagctgcatcaggaatattctccaaagccacgctccaacaagagattttttactgtccttgaggagaggaggtaccatatcctggccgttcgttacactccatctaacggctgggaaagtttcggtacctcgtggtaccgcaccaccgtgagagcaggtaccgaatggcttttgatggtgggagggcacgattgtactttcgcatgtactagtgcaggtagcgaatcgagcgaatccccatcggtctgggcgatgagttcagcgcggtagatgcaacagcctcccgagcagggggaaatcgcagcggcgaccctaggggaggtaggaaaatgcagggacgccggctcaactactactcgacctccttggctcctcctcccttagaggcggtgatcgtcggagtggacgatgacaacggagacctattagatgacggcggcgacggactgtagtcagtgccatgctcctcccaccttcctcatccttcggtgcccaactcccctcagcgcctccactcaggtcgggtcgtcgggagatgttgaaaatgattaacccgcccattgattagttcaatcggattttttccttttccgatataggtgtatatgtttgtttgcacaagcagtatcgcagagggcaagatctggtttgggaggtattcatgtgtttccctcgaatccctacccattcaatttttcttttgttttttctcctctttctctcgtgctcatgagaagacacatgtcgcagtccatggcgatggagattcctggcctcgatgcgcgacggcggcgcgatagcggcaacggcctccatgcgtgacgacggcgcgacggcctcgatacgatggcgtggcgggctcgatgctcgacagcggtggcgggctccctgcgcgacagcggcgcgacgcagacggctggcatggacggccgtagatggaagagatgagaccttatttttgttagcccgatcatacccctgataaactaacagttagattaaattgatatctcgtacctcatattacctcgtggtacctcctcaaggattggaaagatgctcctcccacaaaggacgcgacgtgaaacgttgcttttttttttttttttttttttttgcaaatatgccgttttggccattggtcggttagcttatttcttctcgcgaacataatcttttatcgagcattatagaggttcaaatcagggctggcatttctaccactccaaccatcatagacaggatattcaagtttgttactactatacattgtttttccctcagcatcccaccaaatcggcacccgaggaaagttttacaagtgcgcgatgatgtatccacacgagtacaatatatatcaattaaccagtgcgaacaaggtgatagtaataataactcaggctcgcatcaacacttcgcatcgtgtgcttgcaactcacggctcatatcatgggaggcatttaaaaactcacgctgccaaaatgctcagtggcccagtgctgaacttatcacttgttgctcgtccttgttcgtagctcatggcttcaatcactgcgaggccgaggcctacgctaattcctcatagatctcgcatgcaggcagcagcgtgtcccaattaccatcgcgcacagcggcgccatgcacgcacgcacgctctccccacaatccccgccccttcacgcgctggcgagtggcgccttttgatctaacctgcccgagtttgcctgattgcttctctgttcccattccctttctacgcacactgctgcgaaaccagtgctcctcactgcaattgtaccacaccgctagtgggcacagatcggcccggctatatatcagtgagtgcgcacggaaacaatagacagtagtagtacgagctgcagcgctgtaggctagctagctgccaacccaccgacgcttccatggcttccacctcctcccctcctcgccacctcttcttccttttcgcgctcgcgttcctcgcagctggcgccgccgacgcgtggccggcgtggggcaatggccgcatgttcttcagcaaggcgacgcgccccgaagccgtcgagcttgacaaggtggcggtagcgacaccggcagcggcagcggcgccggatgccaccaactccaaccgcgcgtcggatgagttttctcggccgtccagcggcggaagccacaaccgcgggtacggcctctacggccgcccggaggagagctacccggaggcctacttccgccgcggcgtgcaccacgacgccgataagctgacgaccaccagcgcggcggcggccacggccgagcaagaaaaagaggaggaagcgacaccggcaggcgacgacgacgcctggcttgggtaccccgcagacggcagcggcagggggcggccgcggccgtacccgcgcggacagcagcagcaaacgaccaccaccaatgcggcggtggccacggccgagcaggaggacgcggcgccggcacgcgacggcaccgggcttgggtacagcgaagaccgcagcggcagggggcggccgatgtcgtacgcgcgcatgcgcggcggacagcagcagcagcaacagccgcagcagcaatacgggatgagcgacacgaggctgtaccagaacggccggtacggctacgacgtgaacaccggcaagtacggctacggccgcgagtccaacccggtgcggacgcggcccgaggagttcaacggcgggaggaagtttggcggcaatgcggccggcgggcaagagtacgcgaacggcaactatcaggaggagttcggcgtcggccaccgtgccggcgagcaggtgaggaggtatggcaatggcaatgtggccgggcaagagtacgaaaacggcaacgatcacgaggagtttggcatcgggcagcgcgccggcgtgcagacggggaggaggtatgacaatgcggcggcagggtactacgacgcgaacgggcagtacattccatgagtatctcaatgatgttatactgcgaagcgtttgtagtacagtggtagtatactcgcgttcacctccttgtgtgctggaagtaagttatgttaggttacttcgaaggtagatcgagctggtcgctcgcccgctctcgtacgtgcgcttgttatggggtgattgaagggatgaatcacttttgtcggataactagtggaatgtactcgtctcactgtacaagaaataatgcatgctacagtactatatgtcactacaacttttttgccattgccgttcatcgtcggtgcaagaggcgcttctgcctgctactatgggtaaagagtaaaaattaggccccactacgcaaacgatgattgattaggagcatcttgtttgtctctgttttgttgggttacacagacagccctgcttgtagcacgtgattgctctttcagtagcaatgccatttttgctggtaacatctctgcagtaaactgggagaaataggagttgtgccatttttgccgaacattactggagtcagtattctatcgtggactcccgctggatagtgcacagttgcacactataatttgggccattttgacgaactaactctatgtaggccatgatttgttctccccgatcgaggcgcatgcataacgaaagtcacggaagtattgcccccacttggatttggatgatccggatcctgctgtctgcaccaaacaacgaaccgaaaccacgtacctaccggggcattgcaaacgctgcgtacgatacaaccaaccccgtcggtcattaatgaacgtagcggccattgagttatatttccagactcggctgaaaaatgcttccaaggtagagagaattggagcacggggcaacgggcgcagtgtcccagcggcatctcgtacacgagtacagtaataatgaatcggcaggctgtatgtaccacggtgtaccaatgaatcggcaggctgtagtgaccaccgtgtaccgctacataagagcaggtgctatagcagattataaaaaacggagcgatagattaagatgtgattaattaggtattaattataaaaaaaaattaaaaaatagattaatatgattttttaaagcaacttccctatataaattttatacaaaacttgtaccatttagtggtttgaaaagcgtacacgtgaaatacgtgaaaaacgagggaggtgggatggaaacccatggggaagaacacagcctaagagcatgtacaatagcaggctataagccaactataaatatattttaatgagataatagaggagagaagagcaacgagctatagatttgtagccagctgtagcacggacttcaagacacaatgtgtatacaacaggtgggaccatgtattaataatatagtatgtaactattgtatgaattgactattaaattaactatagatgatttggagctagtagttggctatactattaaccttgctataaaagagtagagagaataatagtggactaaagatttgtagccagctgtagcacggattccaagatgtaatatgtgtatgacaggtgggaccatgtattaatagtgtagtatatgtttaaaggtaactattgtatgaattggctattaaattgactttagataatttggagctagtagttagctatactatatattaaacttgctctaaggctgcgttcgttcccatcccagccattcccaacactccctcctcgtttttcgcgcgcaagcttttcaaattgctaaatagtgcggattttctgcaaaaagtttctatacaaaagttgcttaaaaatcatattaatctattttttaaaaaatagctaaaacttaattaatcacgcgctaaacactgcttcgttttacgtgccaggtctaagagcaaatataatacatagtagactactcactactccctccttcaaaaaaatctgagacctatttcctttttgcatcaataccaagaaacaattaacttactcatcatgtggcaaaaccaatgaacatgcaaccaataagtactccctctgtactcgtaaagaaagtcgtttatgacaatgtttaagtcaaacattagaaatataaatcatgaataactctcaagttgtggagtttgaaaatataaaaattatataaatagatttgtcttgaaaaatacttttataaagtatacatatatcacttttcaataaatatttttatagaaaaaagaagtcaaagttatgttttggagaccgtgtcactgtctaaaacgacttcctttatgagtatggagggagtcctagaataacttcttggttttcgattaacaatttaatttagcacgtagtaactacaaataggacttagatttctggaaaaatcaaagaatgaaatatgtctcagatctttggaaggagggagtataagccaactatagtcttatgtggaggaaagataatttgaaaaatggagagagttggccctcatgcaagagctagttaggccattcccaacccaaaacactagacataatttccataaattccacatcatcaagaaactagtactagacactactcttccaatgcaaacaccactattccatacttaaatttaatactacttacctcacacgatgtcttggatattgtgtagaaaccatgtctcatgcaatatatggtttcattctctttcctcatttattcactggccatattattttttatcctaggtgacagcttatttaatactatggacaccatcctagtcattgggttgggaatggccttattctagtcattgagttgggaatgaccttattcacatccttcaaaataaatacattaaatgtataggtgagaaatagagagacgaggagaaaaaaaaaagataaccttatacttatggatggctctattattaaacttgctctaaattgaccgtgcgcctccgtaggaaaagcccaccaaacctcttttgttccgcgcccgctagcattaacgaccccgcctttttgttaggacgctgattggcattggctggaccgcaaggtaggtggctagcgggtgccactgccgcgcttctccttccccacttatcctgtatcatccactaatcccccgcgcgccagcgcgtctctcccagataattgctgcccgttcttgctcgcaccgtcgcacgcacgcacgccgagtcacgcgtatcacggagcggaaaaagtgcacccaaggtgacatcgaattacaaaatcgttcctcaaccacaaaaccggatatacggcgtcccccaactaaccaaaaccggtcataataggtccctcggcggttttaacactggttttgtcctatgtggcagctgactcaacatgggacccacgtgggccccatatgtcaggctgccacattagcacatactctatttccccctcttgtctctccgtgttctctccttccttcctcctcctcgctctctgctctcacacgagcggcaacgcgcgcggccggcgatggtggctcccgagtggctgcgcgcgggctcgctagcctccccattcccctagtgcggtcggcgatggccgcgtgcggctgctgccatcatgcggagattgactcgacgacgccgccatcaagtcgctgccgtcgggcgtcggcgatggtggcgcgcggctgcggccggcgggggaggcggaggaggtatgcacggacgccctcgccctcgtcgtcgatgtcgccaccgatgaagaggtccgcgccgctcaccagttcgtaggcctcgtcgtcgtcgacgctcgccactccgttccggccgcggcccagcggacaactgacgagaagccggcggcgcggcgcccccgtcacggacgagcgacaagaagccggtggcgtggtgcccccactcgaagccgccgccgacgatgaggccaagcggcgcggagtcgtcggcgccgccgctccccatccgtagccgcgctcgcctgttgctgctgcggccgctgcctctccgccaccgcgaacgcccgccgacactgccttttccctgccgctgccctcctcttccccgccgctcattccccgtcggccgcgccgaccctcttcgctgctccttctcctctccgcctctccttccccgtcggccgcgccgtccctcttccccgccgaatcggtgacgccaccgccaccacatctgccctcctctttgccgcgctccttcctcgccagccgccagccgcctcaccccaacgatgatgcacggtcacggcaatggcgccgcgcggcacgtgggggaggagggaaggcagacgaccaccacggtcctccccgcgtgacggcaaccatcggcggcgctccccttcccgtcccggtctcccgcgccgccctcgatttgctcccctccccttcccccgctgaccaccgttcccatccccaccctcgccgctgctgccgccgccgtcgccgccgcccacctcgctgtctccacgcccgacttcgacgccgcggcgggggccctcttcgcgcgccgcgcggtcgaggagggtggggccgccgcgctcacctccgacgaggccgatgcggtgccatcgcccgccgctgttcctctgcctcgtgggcctcgtgggcggcggtcggcggaggagtccgcgcgccgctccttcccccacgtcgcccatcgtcagctgccgccgccctcctcctcccgctggctgagttagagaagggagagagagatgaggaagggagagagaggagggaggagagagaaggttgatgtggcagcctgacatgtggggcccacgtgggtctcacgctgagtctgccgccacataggacaaaaccggggttaaaaccgtcgagggacctattatgactggttttggttagttgggtgacgccggatatccgattttgtggttgggggacgattttgtaattcgatgacaagttgagggaccttgggtgcactttttcctcacggagcacggcgcggaccggcgggctgagacactcgcgggccgtggcgatgcttacccaagctggacgctgtgaaatgggccgcgggttacaaaaacgaagtacgcgttcacgtttcccaggcccatctaaccgtagggttttagcgtctcgcccccgtcctctgccggcgtagcgccaccgcactgcgcacccgccccgacgcaatggccaccgccgccgccgcgagatcgttccttcgatcgggagtcgcctcctcctcgtccatccgcggcgccgccgcgagagccgcatcccgagccgggccggctccgctcccgaggaggctgcccgccgctgctccccgtctcatcttgaggtacgcgcgagatctcggagttgaggacttctggttcactaggaatttttgtttgctttccttgatctggatggggagtttagtgcttgtgtttttttttgtttccttttggattctgcaggtcgccggtggagatgagcagcgtctgcttggagacgctgatgcccatgcacagcgccacggcgtcggcgctcatgacgtcgctcctcgctgcccctgcgtgcaggagctttggctggctctccgaaggtaataatttctccctgatctcaatcccgttaactgcttttccaatggcggtacattggctttgagttatggagcgcatttgtttgttgctggactgtagagtggaatagattaggtgctggtttggacagatcagaaagacatcaagcactattaagtggtaataggatgagatgtttgttagttgtagctgtgctaccaagagatgtattattgttcatcaacacctaagtataataagttgaggaccaggctctaatttagagtcctacatgaaaacaatcggttcaactgtaattatgaattcgcattcctttgtctaccaaatggactgtcccacattatttatttcaattcatctttgctgcagtgggcattccgcttacagctttaatccatgtttattgcagacttgtagtccttgtttccaactcctttagagcatatttttcattgttccctggtcattttggacacttgtttgttagatgaacaattccaaacatgttggatttcttatgtttcaactcctttacattctatacggacaaagccttgctaatataacgtgacacattccttaggcttttggcattatgtttgttaagtgtcttcagtgcacaaaattaatagccccatcctataataacatcaaggaatgagtgtgatgacaaaccttatgcaaactatatagcactctcctagattaaagttaaaatgtaatagtcctgaagtttgtcatgttgaaaccaatcttatattttcgcatggcccttgttgtagggaatgagtgtgatgacaaaccttatgcaaactatatagcactctcctagattaaagttaaaatgtagtagtcctgaagtttgtcatgttgaaaccaatcttatattttcgcatggcccttgttgtaggtcaagacgaaactagatgaacaccaagcaccaaaggtgaataaaccttaaggattcacatactaataactgttgatggatagttcccatcactaatttatggctctgaaggatttacggagacaagatacctttatttaaaggaatgcattgtacgcttcatcattaataagtaaacatgtagctggagtgcaggaaatgaaaaccaaactatgtttcatcgtgctattccacagtccggataatttagagttatccttttgttgttttttctcgtgttatgtcacaagcatacatttagaccttttgtgttgccggatcaaaactctcccaagagcgacattttcaaatcatagaccattttagttcgatcgtttacccccttaggttttattgaaactgtttgtaatttgtaggtttaatattgaagtagagtttcaatttataataatgtgctaatcatcatgaattacaaatttgaggcaaaagggacactgattcttttgtattggcccagctggcaatgatgacgtgtgacaaactctaggtggaatgtagcagattatagtcccgtcaactcaaatctacaggtctggcaaggttttaaggagcatccatgttagcatatattcatagtcatgttctattaattttcctgccatggtttgcacaaaaaatgaaagatgaagacgcatataaatctctgccagggtacttgtttctccttttaattaactaggaactacatgattatgtttgttctttgtgatcattcgggaccatgctattcgatgtccttggaccttacctaatgatgtatgcagtttatttgtcctgctatcatgctattggaattataataagctacaatgaaaccatgattatgtttttagttcttgtatatacttgttttttgacacattatatatctctataggtctgtgattagtgacaatggagggtgtctgagatgaagacatgctagtatttactttgtcatttctgttgcttcatgttttatcactttgtaattcgtggaattaaaacaaaaaagaaaatttatttctttggctgtaactttttacgctgtcagttaaaaattggatcttagattgttgcgtttctatttgtagatggatgatttgttgttatcggagcctgatgtgacgatagctgctacgagatacctcctattcaatttaaagtactttccgtcggcgtcttctgagcgacatgttcagtattctgggattttggtctgtgtaagcgtctacaagattgttacctgatcgttgcgacgcttacctccggttgtccaactgattttactattgatggcctactactgattaagtcccgctgagaaaataatgctgagttggaaattttctaattctacattgttttgcttctatctgcactgttactgtattatgtacagcgacagtttcgtaccttattactacagcagtacagtattatcgtgttgtattaagctggagacgccgttactctctgttccgttgacgagcagtatcagaggcctctatctccatggtggccatcgcgtcccaactgttagagcattgtaattcaagctagcttctttctagaggggaaggtggtgccatatataacaaacaacgatgtagggaaacactcagcatccaagaaacaatttttgcccatatggaccagaggttcaaacataagattactacggttcgaatcagaagcactgcagacaatttatctcctagaaatcatatccttttagaggctcaaaatgcagcagcaaattgactgatcatctcacatcacatttgttcttacaaccacaactgctgcagcacctaataggctaatacccatccgtacatagaaatgctcgataggaggacatgaagcagttcagaccaactgctacaacctaacctcagaatctccttcatctttcactttcttgagccaactcaaaaggtagaatttgaccaaataggcttggaacacataacttctgaataacaacgaaaccaacacgatctcacccttcaacattgacaagttcatactccacaagtgagagattgttatcctcctttacgttgaaacttgccggttcagtcacttcaatgcggccccatttgtccacagcaagcctcattgatcctttgaacatatcaatttttgcattgcggataataacagtgctgtcagccttcatcaggtcaactgtaaatagaatacaattgttagacatcacccaagtaaaaacttgttcactacataagttaggaagatattcttgaattacgtttgtactataatacgcaaaaggtcagggactgggcatgttatgaatctaattgtccattcatgtgaataatcatgcataggacatgtacttatcattttggagtaatcatttatgaattacacttacgataataagcaaagtaaaattagatatgtgcatatacgagcaaggcatgttaaaatctatcaccgataaaaaaaaaagacaatcatccaaccagcttcagaaatgatgtgctcaaaagcatatactgtcatgcatatatgaactaatccaaaacactaattaggcagagggtgaacttgcgcaactcaagaataatctatcaaatgccattgcagtttcatgcacccagagttttcaagcaaatatttctacagagattaagaactaaacagaaggcaatcaactaaaacatgcaatgatgcacagttcacaagtacagacgtacaggtacttacataaccttacacagataaatatagaaagtgacacctgtaccatttgggttacacaaatagcctcaatcttaccaactggatacaccagccagcagccaagcatattttacatttaaatccaaattttcggaaccaaacgttaatcttagtttggttgtgctaaaaaccacatgctgcattacatggaacacagtagtatactcttgcctgatatcagataaacacctacaagtacatactatcgcacattattgtaccaatttaacactaagcatgcgacttcaaaaccagcctcgtcaaaggaagcaaacgtggtaacggaaactgaatactatgcacagaatggggacacagatcgtaccctgctcgttgcgggcggtgaacaggatgcagccggtctcgtcgccgatgaggcactcggcgatcctcgtgggacgcgccgccgggcccgctcccgcggcggcgcggcccttctggaccacggtcttggagctgagcaccttggcgacgagcgtgtggccgcccgtgccgggcttgagctggtccaccttgacgaacaccggcttccttttcgccgccgccgccgccgccgccatgggtacggaaaaaagaacactggagagtagtaatggatagagataggaataggattacacggagggccaaaccctagatgaggcggggagagaatttaataggcgatcgaggaggaggccaccactagcgacgcgcgcggcggtgacttgttaaaaccagacgctatcattaccgggtccagtaggatggatcaaaaggagtattatccgcttctcctttgccaaaaggtcaagaaaaaaaaaaggaagaggttcagttcggtgggaatttggccgccatgagtgataccctatgctatgctactatgcccctgagtagagtagtagttatttagggaataacctgagtatttgttattaaaaaaaataaaaaaaagacactcacatacgccaccgtgtacatgagcatcgttgaaatattagacctatcaataactcgatataaatactcctttatccatctcattttaagtgcagccataatttttcgtgccaaactttaatcgtccgttttatttaaaaaatattaaaaacataagtcacacataaagcactaacaaaaatactaattaaagaaaaatatgacgaataatcaaaattagatacagaaacttatggttaaaatgagatggaaagagcagttatgttccaccggataaaaacaaactgagctacgctcatctcgcgaataatgatgtgattatttgattcgagttggatatgataggacgacactttcgaatagagttttcgagcatcacttctaaaagcatccatcagataaacttatcttcatagccatcattaactcttattagcatctttgcgtgcaagggaagggcaatcaacctaaacccgtaccttacgtgttgttattatgctcgaccaaggcaccaagctgcaccgaaagtccaaggttgcccatcgaagcaccaattgtgcctctactaattttcatttaaagcaatacttcgaagcatttgtgcttacagttacagacgatagaatactcgctgcattctgccaatgaggcaaatctttcaggccaacgttggctaacaccaccaggcagcatcattccaacatcttcccaggaaatgagagaaatgacacccaaaggtgaaccttcagaaggagggcaattgcactttgattttccaggcgcaaaaaatggaacatccagccaggttaacaaacaagccattagagttcacgggtaatgctgcaacagaatcatctacatacaactagctctaagaaggtgcaaaactggagaggcctaaattactcagtacaaatctgaacatctagagtaagatgactgaagctaatcagccatctaaaaggttcaatatggatctaagctatatcagtaaacagaaagccttccacattgcataagaagctgtacagaggtgacggaggacggcctaactgcgataaccttgttagagcctggcaaaagaaaatcagcagtcagaatcatcggaagtaagactgaaaatgcacagtttgatctttacaattgcaagaaatatgaccaagttaagcccctgctatcgttatcttgtgttacagcagatggttagtgtactgccataaaacagaggtatacgttttacacaattttcataaaaatcacagttcagctttgattggtataggtatggtggtagtgctaagcaggtgtcatctgtgagtctgactataaccaataacagatggaaatacaagggcgagctgatttcttcattagaagcatcaaaaggtttcgtgcaagtacataaaaagcaggtagaggataaacatgagacttttatactccctccgtccctaaatatttgacgtcgttgacttttttaaatatgtttgaccgttcgtcttattaaaaacttttgtggaatatgtaaaactatatgtatacataaaagtatatttaacaataaatcaaatgatatgaaaagaattaataattacttaaattttttgaataagacgaacggtcaaacatgtttaaaaaagttaatggcgtcaaatatttagggacggagggagtacctatgtaacgacagtattttgttaattttaataagtaaaattttatcaaagtgaccacactttctttgatgcacacttaggtttctgtttgacagggaaggtaagagctatttactgaaagctcttattggacaataggctcttttctcggatcgataagtttttgtccccccgcccgtaatgaaaggagatacaaccagatccaaatagaaactaaattttgtctttttagttcttatgtaagcatcaaatttccatagcaaaatgcgaacagtttaaaatataaagatatatctgttaatccaatttaatgctaaagaaaatctaaataggcttctcacaaaaaaaaaattctaaacaggccaaataattcatcaaggcttattgtactgtacctcaaactgcaattgttttcttgccagcaagaatgcgggatatctggaggcctctgctgaaagcttcattgaaaagtaccctcgtctgcatttcctgaaatccaggcaaccaggaaaagaatgcaactggcgccataacaaacaccccaagcagtatctcatacaaacgtgccacagaaacaacactggcccagaccacagtagactcaatgaatggtctaatcacttgagcaatggaaatcaagccccaaccagtaggaatgaatgccaaaaggcttgtgaagatgtcaatgatttgaaatttagtaaatttcagaaatattatcagcactagcactgcaagaataatgacaccagattggatgacccggtagtaaaggtgttgttttgcagcatacttgtctcgagcatatgacattaggacaaaaatgccgaaaatcacagccacacaaatccaggaaagcagataaacagcaatacttctgctttcatttgcgatcttcaactggtatacaaccccatactgaaaaaagaagtatctgagatctaacaatatttctaaaatctttccccaaagaccagttgttcgtagatgatcctgctcctcaaaccaccaaacttcccagctgtgttcagccttagaaaagatactaccagggtaccagatccagttcatgaaatcatcaaagtcatacactgttttcaaccaatcaaagccagatggattaaaagcaaatggagccatgatccatgataccactagaaaccagctagatatcatcatgattatgtaaacaagtgtatcccttgcaatcacactgtgagctgcatacacagtcaatactattccaagttctattgcctttatgaagtggctcctagcatacagcctgtaattttcagcaaaactcttatgctgcacaacaaaaccacggccagtagcacgatacttagcaccgccatgaagaattgtccggccatagtaatggcttttcgtccccatggaaaatgtgtagaacacggacgaaaacatcatttgcatagtgaaaaaatcccagacagcaggcagaaaaccctgttcaagagagttctctataatcattggcaaggcagtgaagaggccaagctgtatgacaaattgctgattcagaacggcacccaaggctttattgttggtagcattagcgctaccctgaattccagcctcaagaccactcagagctagatagaggcgtccccaaacaaatgtataaactgtcaagaccaccatcattgtgttgaagtagaatcctactgttgtatagaacacagaaagactcctaaagaaatccagcctatgaccaagtctgtagatatccctacttagggtctgttcaccattgccactagaaacctttgcttcaaacatcgatatctgattgagcccaacatcacgtcccttaccaacctggatatactcatggtggctaacattgccaccgcgtagggtacagttgaaacctgcaaatatgtcctcgctgatattgattactctggatgccttgcttataccacctcgggttaaaaaccaaaggcgatcaaatacatcaggatgcccataatgcatccgaaccttcaacggattagctagaactcgctgtccaagggtaacaaagcttgtttcttgtgcagacatgaaccaagcaagtgaagacaccgatccagtaaaaacatgctcccggacgcccaaaagcgttggtttctggcttccatgataatagtcgtactgttctagtaggttacgcatcttgagggcctcctcaaaataattatcctggttcatatcaatcgtttgcacagcatcacctcgtgtgaatatgatggcatggttctgattttcaggttttccctccccaagtttcagttgacctggcaacctaatacggtatatctcaacctctctctgtaagacaggatcaaatttaacaaggacagaatagtattgcgtatcaccaatctcaggatggacctcatcgacataagcaacacggagggcatcatttttcttcataagagttaggatatcttcagcacgttgatctttcgcctttttctggtttccatatatttggcaagcgaccacataggtgtacttcatgatagcagcaccatcttcctggcctttaaacaattgacttacagtacttgttcctctctctaacctccttcgaggtcgttgtgataaacccccgttcatgggatatacatcattctcatactgaactgaaccaaaagaagccagctgttttgttccctctgtaatttctacttcagatgcattatcaagaaaagcaagcatcttgagagccctgtagtagtacatcattcccctcacagtccgtgctaaggtctgccccctgtacgaggcccaaagtcggagatcctggaattttccagcccaaatgccatcatcactagccattccttccctttgcatgcgctctaaaaagtttttccaatcatcttcataaatcttttgaagataaaacaagattgagatgccatcttcattctcacgacgaagctggtccttgttgtacagaacatcttcattgtaatatggggttaaaacactgaatgccatcatcctctgaacggtgggagcacgaggcatgttcatgaacagggagttgctgaagaaagttatgcgccgacgagcctcggggttctttggaacatcgtccatagaatccctggatgtgagaatcgtatggagtcttctcacctgcttatagaagctaacatcattgtcatctgggcattttatggcatcctgaaaaagcagctgagattcggttggtcttgatagtgctagcccctctcgcctcagctgttcaaagtccttcttgatttttggaaaatcatgcactgcaagatcatacagatcctgcaaggtacgaactatcttgatctgatccttgtccttcaatagaagctgctccactaaggagattacatacttatgaatttgaggtaataaggttagcctatattcttcagtgaactttccatattccattgcaccatcaaatgcaaggaatagctgattgacaataatgtgttcattagttctctccttgattatttccagcagcaagtgacgtatgctgtcataagcttcaattactgcacatcgcctgtactcgttgttacatatcttgttccaatgtgtcctgtcatcagccaccagctctgctgcctgactgagagcaagaagaagctcattttttagcagcaaacaaggccaccgtaccacacgaattctccacacaactgccggcagctcaagaagcccaagctctttatcactaatgatgtcctcttccctaaatgtttgaatgatctcattccaaaccagtgcaaacctcttagcttccacctcgtttgcttcaatcttcctatatggacggccaaacccatatctcagcttcagccgattgattgcatcatagaacttgctgcggatgccaccatgaacggtatccaggtgctcctctggcattaaattgaactgcattgcacttgcaaagaactggaacctcaagcgcagctgctcaacactgcgaatctcccccagatgcgagaaaaggccgataagcgcccctgttagtgatgagaagactgcataccatatctggatatccatgaggtaaatgataataactgggagccacaggatgattactgcaaggcgctctgtgtgaggcatgaactcaaaccagttacgcttgatgtcatggagtttgaagattacctttgttggccccaccatcggcttaatctggagaaagtagctgaagctaaacttagaaacaaggaggcacacccagaatatggagtacttgatgttatcaatgagaccttccctcagaccacggccaacaaatgtacgtgtttggaaccaccaggtcagcacatatagaattttccaattggttttctccagaaaatttcgaatccaagggatgatgaagagcacaatcgcaagcacttgcgggatgacaaacacagcagctgcctcaaggtaattcagcactctggtattggcagcaaaggaccacctgcgatctcgccaccgctgatcccacattcgcttatagagcacactgaatgtgattgtccaccctgcagcaacaagcaccttgagcaccatccgaacagccactgtttttgtctccctcgacacgagactgtactgagtacccgcatcaagcattgcctgaacaaagcgcagtccaccccaagtgatgaacacagacagcacccggacctggatgtcccggaatctgaggctaacccatggggttttaccatcccatgcaacaatcatcgcagcttgaaagaacagaatatgcatcacccataccctatcgaaacttcggtagacattccagaatgaccgctgctcaacaaagccagtcttgccaatgcgcccagtctttccaggctccacaaagaagctcctcgatggatccagcggccaccggagccgcttgaaaactcgtcggctccagaagtactcgttgacatcgtcgtaattcctccacgccgagtgcggcttggtcccgttccggctggcctccacctcgttcttgaggacgttgtagatcggagtcaccacgcggatgaggaaggcgtcctcgccgcacacggcgggcatcgcaggccgccctgtctcgatgtcgatggactgctcgacgacgtggtggaggtcgagggccatgtagtggaagatgtagcagaggcactccggcatgaacctcaggttggcggcctccccccagatgagcaggtacagcgccgtgtagaggaggtccatgcggacgtcgttgccggtggcggcgccggtgcggcggccgccgccgccgccgctgggcacgcggaagtggcgcttctggccgaggtaggcgcaccaggaggtgtagttcttgaggagcttcctgcggatgccgcgggcgacggtgaggtggaggacgtcgatggggtggtccttggggaatcccggcgcggcgcggagctgcgcgttggcgaggaggagcaccaggtgctcccgctggttccggacgttgtccgcctggaacccgaaggtggcgccgagccagtcgaagatgtcggcgcggtgcgggtcccagacgcgggccagcggcggcgccgggaagtccgacgcgtgcgacagcgcctccaccgccgcccgcacttccggcacctgcagcgacgggtggtccccgtgcatcaccacgtcctggatcgggatgatgttgtacgccgcctgcaccaccgtctgctcccccgaacccgccgccgccgcggcgcggcggttccgcagcaagctcatctccccgtctcacgcagccagctgcaaaaaaatcactcgacgagtgtgagccctttgaagcgaagaagtacacgggatgatgggaggaacctaggtgggaatcacatgctgcgcagctggtttattcgggctgccgcttttgttcgcttgtttgatttgcttgtctccttcggattaggcggaagcgaggcgtgcgtgatcgcttcaacagtttgcatcatagccgccgcctagtaggcgggtgtgggtttggggctcggtttggttgctttgcttgtggggtttctaaccatgccgctagtgtttctgtgcgctggattttccggtgggggcaaaatgaactaatgatgatggcgatgagaagatgtgactccttttttggaggagggatatgcaatggatttgtgatctactggtaggctacggattactgatgcactgtaagcaaaaaaaaggggaggtcagcaaagcaagtctacaagtgaatgggacagattggtgtaatggtctggagtaaatctcaccatccactcgcactcaggttttgttagcttgtgttgtatggcatctggtgtggtaggaatcgatgaaagaagataaaggtaagaccatactagtatatacaccctataaggctctgttcttttggttgagttgggaacccatccctccggtacggaaaacgaagcagtccattagcacgtgattaattaattatttgctaattttttttcaaaaatggatcaatataatttttttaagcaactttcgtatataaactttttgcaaaaaacacaccgtttaacagtttgaaaagcgtgcgcgcggaaaatgagatgggggagttgggaactccaggaaacgaacagagcctaagtaaagtgctcaagctacggaatttgggtgagagcaaaggtgttgatttgagaaaccaggagtgaattttgtgcagatgagtgtggtctagccttatattcactccattttcaggagatgaaacagaaagtggtcgatgcatgagaaacttttgaattagggagtgacaagagcataacttttaatgttggtggtcatatggcataagggtctctcactttttttaaacatcttttctacatttggaaaccttttcttttgagagagaaacaattggatactattgcttacatgctattcacgtgcgatgtccccctaaaaaactgaaagaactactaggcgtcagatatggataaaataacaggggaaaaaattacagcagttaagtaagtacaagtttcaaagatggtgaatggcgtatcagttcttgaacctcagacgggatcgataccttgaccacactgaataaatgttataaaacggtgattttattcttcttttgctaggagcatcaaatttttatgatgtcactgacagcaactatcatctttctttgaggacttgtcgttgtgacccaggaacacttgtcgtatggcatatttggtgctaaatccttctgtgttacgcctctaagacgcttttttggctaagcttttattgagcttgcactgccagctttcggtgcactagagtaggcactaatcacaaaagagcgacacctcacagcctatttctatcacaccgcaatctgaatctctctggatgtggatggagaattagaaatacggactatggagctcgtaaacggtaaggtctattcattcagaagcgaagataaaaaaaaaaactctatataaaatcggcggtagtaagaaaacaactaccactgggtgttcccggctatttctacccatgatttgaatttgatgaacccctaaacaaaccatatgttgctgccaaagtgccaattatttaagcgaccgcacacgctaaacgctattgctcgcgttttattatctgggttgagaggttgacgccagaagcaaaaaggctcaagcaaagcatgcaggaggagatccaccacactccactgcactgcactctgaataaagaacgggggacacttggtgtgcgggtagccgcacggctcgaggaaatccgccactggaaagtgggaccgggcagtttcgctactgagaccaaggggtttgacccgcgggactgtaacgtgggcccacctgtcaggcgcggcggaaaacggcagagagagagagagagagagagatggcgccggcatattcggggggagggggaggaggaggaacacgtcaatcgccgcagcggcggaggcagctgcgtgaaccgccactggcctcgtcgtcgtcggctcggaatcgaatcgaaatcgtcggttccggtggccgtgggagaggaaatcccctgagccggagaagctcgagctggcgaatctatggcagaggcagcggtgacgagctagcgaaacggagaggggaagggtctcaccggatgggttggccgccgccgccgccgccgccgcggcgtctcagcttggctcagctgctcctcgatctcttcctaaaacctggtcggaattgtaggagaatcgagatgctgagaaacaggaagaacagattcatacagtgagattgctatgcaatactaggtattagtagatatagtaggtagaaagagattaccctttattgagttttcgttcctccctgctcggcctcccaggtgtcagcgcatttgagatggtttcgccgtggaggtggagcacagataccacactcctcttttttctagccaggccgcgctcaggatcgtaggcccgtttattttactcgtgagctcaagttccaactcacacatgcgtcaatccgaattcaaaattctagcccgttcagtgcatatccgcacgcttgctgacgtgtggaaaatgctgtcacgacacccatactcgggtgttctcgtattttttttaagtaaatttcacaaaactacatgttttatggttcaagttgtagaaaaccacacacattttaacacttggcacttaagtatatatattttggtagtttagtttcacaaaaccacactatccatgaatggatttacccgcgagatgacgtggttgttccatctaggatggggacgtggcatcctgttaattttgtctgatggctggtaatatgatgccatgtcctcgtcctatgtgaaacaaccacatcatctcgcgagtgaatccattcatcgatagtgtggttttgtgaaactacacgaccaaaatatatgtaattaaatgccaaatatcaaagtgtatgttgttttcttcaacttagaccataaaacatgtagttttataaaatttacttttttttttattagtcacatagtcacgcaacttgattgagcaaagtgaaaactgtaaaagaggaaatacccatatactatcagaaaataccgtctctgcacttctgcaggtaaaagatgctcgatcaagttggaacaatttacatgcaactttaaaaacacaagtagcaactggcaacaatcacctgacatttcacaccgcaaaatgacaatatacctggcaataatttggattagcacagatctgctgaaatggtccaattgcaaagaagttggtggtacacgtgcaggaagtacatgaagattaagatcaatgtataatatgtacatcgtacaaatacgcaacagtcaacagatggcatcacttcaaatcttatttattcaactactacacgatagtaccactctttgcacacgtatgagcgccgtgccgggatggagagaggtccaaacccaacccaggacgaaatcaccacgcacgagggggtgctccggaccctgcttcgttcaaccggtccagcaatgtgttgaaatccatcggctggccactctcggtcatcctctgaataacattcatcacctgctccctgggatatcccatggtgattgccttctcaatcatttccccataaggatggccgcgcatcatctgatgcgaacctgggtgactcataccaacattacctggagctggaggcatctgaggtgcctgggctgctgaaggaccacttggggggtagccatatgcagtgttgtagccatgtgagctgccctgcggcgcatattgtggcgggccggcatagccccccttacttggaggtccgaaagagccctggcttggaggaggtagctgctgcctttgcatgttgtgctgcggtggtggcatgccaggtcctccgtatgaatatggcacttcagaacggctccccgctgccggagcaaccgtgttgtatggtccttgcatagccatgctgccaggtagagtttcagggggagggttcaaggactggtggggttgataatgagggtagtttggtggagtttgaggcctcatctgattttgtacaggaggatgctgttgtggttgcattgcctgaggaggaagctgagtgttagattgctgcggttgcactggtggcggaggaaactgttgagcattaggctgctgcactggttgaggagcaaactgctgagtgttagatagttggggctgctgcattggttgtggaggaaactgctgagtgttagataattggggctgctgcacaggtggaggaaatggctgcgagaaagtcggctgtggctgggccactggtgcaggagccggctgggaagattgctggggccactgctgctggtagggagggaaagactgaggctgggtttgatttgctgcctgagactgttgagatgaagcatggacaggaacatcttgcgttgctgaaggccttactggcaagtactgcacctctggttgtacttgctgcccctgtgtatcctgaatgcctggagcttgacgctgtgggtagtaaacaatggcttggctaagaacataacggtcctgctgtggtacagaagagctaggtggctgctgcactgtctgatctttgtactgttggactggttgagaagctctaggtgcaagggatgagttcacctgatgaggcaaaacaatcgccagctgctgaccaggtgcatctgccttttcttcaagcgtcttttgctcagggaaagatggtgttggcatatcttccttctttttagatgtgtcatgtgtaagttgaaatttggctaattccttctgagtttcagctaactcttgcttgtccctaaggatttgaatagatctgtgcacctgcatcatttgaaaatttgattagagttgaaacttgaaaacttctcaacagagaattaatgctcaaagatataaaatacagtacataaacagtaaagaaattaaacatttggagattgaattgttggttaataataaattgtcacatcttctgaacttggatacggtcatgtgcccatcaacagctctgtgatagccaaaatgttttgcaacgtgcatgtcattttagactgcaggacaatctcgatgaataccaagaatgaactatacttaaatattctgtttgctagaaatactcgaagtttgtggtcaggccttaatctccaaattctaaataagtgtcatcttgaagctcgtggtagcacctaagactccaaatggccattatggctcaacagatgcatgtctggcatggaacatatgagatgatgtatacccttagcatttgtgcactctgaacttataagatgttagaacagatccatcacagggatcacttatttatcaaccacagttgccaatttaaatacagaggagtgttgccaatcctggttgagtcacagggtatacattagacatactgagtatattcaagagtggattccaggcttcgagtgcacaacaggcaacaagactagtttatcagaagaaagtacaaaacaagaaggacatttatgtgcattaacctctgaacaggtcagtagggagcagcctttgagagaccaggaagacatctctccctttgtctgaaagggacggtggtatagcaccatcacatttcttagagattggaaatggtgtactttttgttcaaaggaaaaaaacaataatcacagcccaaaatactaaagaaccatagcccacaaaaaccacaacaacttaggagattagggcctctaggctaaacatacataagcctaatatttccctatgtattcactagatggtattttaaatacatataagaattggagcatgcatttaaagcgaaggagcaaaatcacatacacagtataaagaaaaggtaagttgtcacaacaaataaagaaaacatgtactgtacatgtcaatcaacacaaaaggctactccatccgttccaaaatataagcatttttgtctgcacgcggggatgtccaaataggcatataaattttgaaatacgtgcagaaatgctcatattttggaatggagggggtataatatatggatgagtatatgacatgatcataattacactggatgcaaaagaactgtcccccttcagtgcagaaactgaaagggtggaaaatgtgaaatactggatctagtctcaaaatatattttttcttaaaatagtgatttacttacttcatgaagatgtttctcaagagacttcaatctttgatcagtctcatcacggagcacatcacttcgaagttcacccatggatctctcaagcttatagcaatagatctccagttgtgaaagacgattagtaattccctcaagcgatcgcagcaaattatcagcatatttcttcatgcacttctcaacagcaaaaagtacatcctccttgccgtaactctcttgttcataagcttttccaaatggtctccccaatctactgtcgtgaaagtcctgctgcacaagtacaagaatgagggatgaatatagcacaaggatttctactattataatcattaaattaattttgcttgtaaaaatgcagatatctttgacaaatttcattttttaagaaacaaatacatcagatttttgtaatgctctctccaactatgtcagtaatagcttaatttgattatttatataattttggacgatgcaggagaactgcgcttcatttcattaagaagaaagaaatatttacataggagggatcaaggagtccctcctaccaagaacacatcccaaaacacaccaacccacaggtgattatttatatttcacctgttagaacatagaataccatcctccagcaacaccaagggtgtcatcagaagtttccagaatgctataatggactttcaacattcacccataaagacaataatctctaaacataaatggactgaacaaatagataagcaagacaataatccctaaacagactgaacatataggtaaacttatcaagtacaaaatcaacgtcaatccaccttttctctaaacattagattgtgttccttacctagaatagcaatgtcctggacacatggtcactaatttatatgtaacaaaaattttactgaacatgaaaactataggcggtattaatgttacgtgtgaatcaaatagtcatgacttgcataaatcttattcaacagaatgtcagaaaaaattatctgaaaactatatcctataggcatctttctctctcgtgcagtggccctcacagaaataacccactgaatatttcaattgatagcttattaaatgaatttctcattgactatctccagcctatattgaccattcaagacaaacctacactgcacatcaggaattcagtgtgggtttaatcaaaataagacctgaaaatcccaagtatagcaggtaccatataaaccttgatgcacacaataaaataaatccatgatattctctgaattacaacagataggcatagctggaataacacattcgtcaggaagaaaatgaaatagcaagcgatggctgcatagtaccaacgagcctataaccaaatcgatgtgaacgttacaattgggcaaaaaaaaaactgaaactattcagtgctgttcagccaattttcatcggaccgtttccacactattcagttgaacgaatagattcacgggaatacgacaccgctgaggcgaaatcgtgcggcaataagcctcggtcagagctctgcacgcgatcatcacgcaccacgattcacgagggatcaaaggtgggttgccgccgagagagggcgggggggggggggggggaggaagtaataccttgtcggccggatcggggcgcttgggctcggagggggcggcgaagtcgtcgtaggagcagagcacgtcgtcggcgccgaagtcgaagctgcgggagccgcggccggcggggacgccggagccggacatcgcggcgcgctagggtttaggcgagacggggatagcttccttggaggggaaggaaagggaggggagggggggagggaagcgggggttgggttgattggcactggaaggaagaggagggaggaggatgacgacttggtggtcggtttggtctgcggccgcctggggtgttaattaagcaaaggcgtcgccgtcccggttgcttgttagatggacgctcacattgacggaaacctgcagcgcctctgttggagaaattctatccttcggtactgtcttcttcagctcacgttaaaattaaaagtttagatagaattaaaataatgtgatagaaaagttgaaaatttatgtataaaaaagttttaatgtgatgaaaaagttgaaagtttattgaaaaaatttggaactaaactcggccttagttggaaaagaaaatttttgggtgtcacatcggacgtttaaccaaatgtcggaaggtttttcggatacgaatgaaaaaaataatttcataactcgcctggaaactgcttgacgaatttattcagcataattaatccgtcattagcacatgtgggttattgtagcacttatcgctaatcatggactaattaggcttaaaagatttgtctcgcgatttctcccctaactgtgcaattagtttttcatcttatctatttaatgttctatgtatgtgtctaaagattcgatgtgatgtttttaaaaaaaaatttgggaactaaacaagacataagggtataatcattgttttctctgcaaatttttacaatcgtccaatcagtctataaaaatcagttgtatattcatgctaagtacagatattcacttaccgttatttttaaagaaaatctatttatattatatatatatataacggtgaagccaatacctatattacagttgagcggttaccactctgttggttttatcaagtgataacaccaacatgataacaccaacagagttcaggtaactgctcaactcaactgtatttataacaccaacagagtttaggtaaccgctcaattgtaatataggtattggcttcactgttagatatacaaaatataaatatattttagagtttatcactattgttactattgttacataactttgggatatccagtattgtggttcaagaatacgaatccaatacgaccactagttaagggagtcaaggtgaacttattccttccatctctatctctactattataaaaaataaagatgtttttgccggtaccttggtatgtcatccatatatgagtcggtttttaagttcattcgtttttggaaatacatatccttatttgagtcggtttttaagtttgttcgctttggaaaatacaaaatgatttctttaaaaaaaactcgcatgctaatttgagacaaccagactcctaattgtagctcatgtttagattttctgaaaaaatatatatccaagcagattacttgagacgatcggactcctaactgcaattcatgattttctaaaaaaatatatatccaagtgaatacccatggtgaatttcaccttaactaaaccatataacaataataaaattaaaatagccttcaaccattgcaatgcacgaacattttttttctagttactataaaaattgacgatgcttccgctgattctttggtatgtcgttcgtatttgaattggtttttagttctttcgcttttgaaaatacagaaggagtcgtgtaagaaattcatgttaacttgggacgagagtcagactcctatatgcttcacaattctcgctatcccataagataacaacgtacacgatatatctatcatcccaataagagttcctaactagatatcaatactatcaaaataaaaaaaatcccatatacttttgctaacaataatacaaataaaataatattcatcgttacaacgcacggatatgttttttaagttagtgaaagacggaagactgtcagctcacaggctaacatccataaattgggccgaagcaaggccttccgtggcaaatcgaaagtccgaaacgacgttaactgatttaagcccgaagggcctcatcgcagaagaagcccacaaccattaggccgtaacaatggcccgcgtcatggccttctgcgagccgttttgctggtaggctacaacgacggcgacgaggcgggcctgtttggcacagctctagctctacttccattctttctggagctggagctcagccaaacagctccaccaaaactgggagtagagttaggtggagccctttcacaaaatgtactagagttgtggagctgggtttaggtagctctacaacttcacttcaaactcaactcctggagctaaatttagaagttggagttgtaccaaacagggccagaacgttttgaccgaaaaagctatacgctctccctttgatcttgacaagagccttttccaccgagctagccattatttctcatcccttttctcagtcagatgacgtgctggtcgtccatttgttaattatttgcaatgtggcacaatcatgattcatgacctatgtaaagttgcgcatatttttcttaatttttgatggaaaagtttctaaaaggaacctttatatggccacatgctcggtgtcgtgtatatatatgtgtcacccgtacggatgattatattcggattggcaaatcttcgatggtaaagtagcaatgcagggacatcgaaagcagcaattagcatttgacattcgttcgtaattcatatataaatatttgctgaagctagctttgtcacaacaatgttggtaataacaatacaattcaaactacagcgtatacaaaatatatatgctagatagctgcagcggctagcgtacgtatacatatgcatggctactactccccggatggccggatggatatgctacgatgatatatatagctagctgcagagaaaacattatttgctgccaaaagaataacccggccgctacacaagttgcttgctacctgctgccacccttagttacaagggtttagtagtacaactattgagcaccagtcgatcaacctaagcctctcagagagattatttctttgagatcataatagcctcagacgagattatttcacgaataatgctcgatatatatatcggatcgtcgtctagtaatggtgctgagggtccgggccgcccggcacttcccgcttgccgccctgtaggctcctcacgttccacctccccggccgacgacgtccacggataccaaatccgccgccgccgccgccgccagccacgtcgtcgtcgtagtcgccgcccggcggagcggcgtactctgccaaggcacgggccgcctcggcctgcgtggccgcgagccccacgacgaccaccaagaccaggcagagcacaatgcagacgcaactacgaatagccatatctcaattgatcgatgaaattattcaccgtacgtacgtgtgtgtgtgtgtgtgtcgatgagctatagctagctagcttaggttcgtttgtgttgtcatggccaggtgccggcgcgaggtgtgtttatatagggggtgtagaggagacggtggaactagtgcagcgacggttacaaaagaaacatataagtgtgggggccaaagggcgccggccggggggcgttttcttggataagttcggtactaatctcaactaccaccgcattggcgcattctacgtagcctttcttctggcctcgtccgagtggccactggccaccaccaccacaattgctggtgctgctactagctagtaatagatcagtaccatgatgcacaccattgccactttctgcgacgaggaggatatatatatccccttttggcttttgcattaggcattagagtgtgaggtatgctaattgcaatggctgtactacatgtaggttgctgttggatgaaactgtcagctagctaggcatcctagacaacgagtgcttggagttgtcgaattcacaaatgtcacaggtaagatggaagaaattaattaaacacacagtaaacattgagtagaatcaaagccaaggacaagactagtagtgtagctgaactggctatgcgccgaatgcagtaccgccagcacgtacggcgccaaattacctggataaattcctaagtacagcatgagatattgagctgaaaccaaaggcgaatcaatctggttcagaattgcaatcctgcattcagtattactgggtcccctggctatcaacatttgcaatctcgactttgatacgaagctactgatatccataccttttagtgccaccagacattacaataggtaatatggaaggcaattgtaaaatatgaaaattcaaaagaattctttgaccaaatcactttgtagcatcaaaacaaatatgctcgatcaccaaccattagtatacgagcccgctacgtagctatgtagacagtgcttagtggaaaggaaaacgagtagccaataaaatccaatgcttggatgtaatttatatgtcaatatgtcattttgctcatctatgtgcctgcttcgtcaaaaggctgtagtacctcgaaaggttagttaatgtttcggttgcagatttgctctttatatctttgcaaccgattagccacatcctctgcatgtaacggctgtctgacctcctcataatgcaagaaggcagcttgcagaattttataagataaatggtcgaaatcaaacccaagagattacaaataagaaccacttgattgttaacacagagtccacgtttcgggttctaagtgtctgtttagctgagaaatgatacggtcatttgactttaattcgatcctgtatgacttgcttggtttgagatacgaaatggagtgatccatccgtaacttcgtccctcaaaaagtcaaaacatatggttactgacaaaaattaggaattctctttattccgtcaaaaccatgaaataatctcacgatgaaatactcgcaccagagaagccatattaattaactgagtcggttgtacgtcacaatcagcagattccatggtaatatagaggaaaaagttactgaaatcattccagtcaacaatctttctacatactgtgttaagtgactagatgcaatctgtttcgaaagcgacaatgctgttccttttacaccacaccttttgccactctctggatgaaagcaacctttttcagataatagtaaaaatattgatccacctagaaccttaagcgatgacgttattctttttttttttaaccttacatctattacctgaatataagtgactgaacgatcgcttaggatatttccaactcagtacttctcattttcatttgcatagcagatgcagggaacagaagcagagtgatcaatgaagatgcctagtagttatgtaccatctattacaagatcatataaacaaagaatctgcaggacagacgaaactaactattttgtacaggatcaaccaaaactaatttgatatccaccatgatccaaatgttgaagtgatatacggtaaactggcgagtcaatgtaaaaaagaaaaggcgcacctccattgtttatcaaatgcaacttcacctgaaacattgctagctaaatatttgtgaatctgtttggcaaccttggagaaatgtgaccatatgacaggccttggttggaaatgcatgcctttacaaacaatttcagcttcctttaaataaccaaactttgtatgacagatttgctagctaagtacttgagtatctatcataccgtatgtctggcaaccttggaggaatgtgcgccatacgacagcacttggttggaatggcatgcctctaatcacaacctcagcttccttcaaatgaccacacttgcatagcatgtccaccacacaaatgtaatgctccatctcaggctcgattgaatattcagacttcatatgtctgaatatattcattccttcatgcaccagtccaccatgcctacaagctgaaaggactgctgtaattgctaccttgtcaggtttgaagccatcctcttccatggctttaaaccatgccagggccttacgagaaaaaccattaagtgcaaggccagaaattatagctgtccaggagataatgttcctatcttccatttccttaaaggctttcagacattcttcaattctaccgcacttagcatacatatctagcaacatattatgaacataagtatctaagcaaccagaattggtcttgatgataagcccatgaagcaacctaccaagaacaaggctattagactttgtacaaatgcttagcaggctcacagatacatagctatcaaaatgatgccccaaaattctcatcagttcgaaaaatttaagagcttcagcataatcaccattccttgcacaagcagtgataagtatgctccatgaaacagtgtcattacatccctgatgtaaaagtagcttcttcgcttcgtcatacatgcggactctgttatataccccagctaaaacattcatggagacagcacaggagtcaggatctaacatacccccataagccaaagcatcagaaaccatttcatgtgaagcatatgaagatataatggcacttgagacatagtcatagccgtcgtaacccaatcttgttaccaacgagtgaatctgcaacagatcgaatactgatgggtccttgagcaaagaagacaaactaacctcgtttggcataacaccagatcgcaacatctctctcagaataaaaaacgacgttggaacatcagtatctgagtgacaagaaatcagtccattccaacgtgtggtgctatcctcaggagcttcttcaagaactttgtgagcatccttcgtacaaccacattttgaatagaaatcaaacagtgaagtgttcacaaatggtctcgtattgagattgtgtttgataacttttgcatgaatggacttcccatgttcatgtccatttatactggtgcaggcataaattacactgctaaatgttatttcattgggcaaaacactccaaccttccatcatccagaaaaattcaagggctctctgaggcaagcttctcctagcgaaggcaatgatcattgtattccaagaaaccacgtctctgaacatgaactcactaaacagattctctgccaaagacgtggaactgtgagtacagtatgaattcagcaatgagtttgcaactgttgagaaggaatctatcgcaattttcttcacaagcccatgaacttgctctggtgtgccaaaagcaggaagtactgccacaagagagccatcagacacgctgttaccgcttcgaaccagcgccctgaaccagatcacagcatcgcaggcacgtccatgctgcgcaaacgaagagatgagacagttccaggtgacgacgctccgcacaggcatttcgccgaacaacctgagtgcatcatcaaaccggccattccgcccaaagaaccccaccagcgatgtcccggagtaggggtcgctgtggagcagcccgctcttgaggatgtgagggtgcagctgcgccgcgcagcgggcgccggccgaaggcgaggagaggatcggcgcgaaggtgaacgccgtcggggcgacgcccgcggcgagcatgcgcgcgaggagcgcaaagccctcggcggcgcggccggcgcgggcgcgggacgcgatgagggagttgaagagggaagcggagggcggcgcgctcggactcgggctcggcattccgtcgagcgggtgccgggtgcggcatgggggggacagcggcgtgtcactcctggcgcgccggcgaaggccaaaggcgtgccgtcacgggcacgagatgctcgcggtgcgcacagctaatcgcgcgccccggcgaccggcggcgccgcagcaggcggggcggcgtcgaggcggcgcgtggcagcagcggcagaagaggggaaggaagaatcgcaaacgagcgcgcggcgacgttgcgatgggctcctcaccggggggtatctgcccgagcgcgcttgcagttgggctggtttgggccggaaatacgcgtggcggtgcatcgggccgaaactgcaaggaaagcgcgcgacggcttccgctgagcaggctgtgcgtcatgatagaccgggccagttttcctgcaatttgcaacataaaaaacgtttttttttttgcattgcatatctgatgatatttgcatattttctctttatctgtcaccatattgcgcagagcattttaaatgatcttcagtatcttcgtcatatccgggttagcattttaatcgatcatcagtatctcgaattcttggacatatgtaccacatgcagacttagtgtactataaaatgccgccctggataatatagggccggttcactttgatgaaaaaaaaccttaccaaattttggcattaccaaaaattttagtatagttgccaaaattttggcaacgtgccaaattttggcaggatttcttatataattactaaaatttggcagcaaactaaatatagccatttttttggaaactttatcgaaatttggtaaggttaaaaatggtatcaaagtgaacgcctatagtatagctagctaggcggggtctagatcccctagagttggctacaactctatcaggtggagttgccatgatttgtgccattccgtgtacctcaacggctaagattaagccatgttaacattaatatatacttaaaacaagtaattaaccgtgcaacaaataaacttgcatcaacaacatgtcacaggattttttttttactatagaattgtagaattaatacaagaatttcatacttcatctattttattaaaaaattatacatattaatattgatatggttcgctgttgcatatatatgaaaacactgtgttggtatatactgttgcttagagttgatcgactgtacgtggttattaagaacaaaaagtttttcacttaattttttgttgagaacataatcaaaatagaggaagcgcgcgttgaaaaaactaatttttctctcaagctataaccattaatgttgaggagttaatttattaggtaaatttgatgaggcatgatctcagccgtaggaaacagtggatggtatagatttggccaactctacttggtagagttatacccaactccaagggatccagagcagggtgtggatccctcggagttgccttcaaatctatataagtgtaccaaacatccctgaactgaccgatccatgaactgaccgatatatagcccatccatgaactgaccgatcgatcgatctccttttgcttgatatatatatactaagtgttcttttggccgacatggaaggtacagggcggcggccggccgcggcaatgttggaatcgttagcggtaggtaccagttgataaggcattggcgtttctcctcatgcatatgcaatgcatctgctgcgttggaccatgatcatgtctgacttggatcattagcattagctaactatactagaatatcaataacatgctagccagagtattgattaattactagtatctttaatttctggtggccggcagaccgatcgaggcctactgcctgcatattgccggtgtggcggtgcatgccttgcttatcttctcttgacagtaagcattctggcctgtgcctgcaccgaccttttctcaaactaataccatggacgatttgagtttaaaggtttctctccaagaatctttgtgcaatgaaggatttaattgtctccctcattttaggaaaaaaaaagcgtgtcatcccatttaaattacaattgcaaaatttagctgaaagattattcaatcttgagctgaaagttaaatcaattgtgtgatcctttaattggaaatgacaaacttttaattgaaatcctgacatgagaatcgttagtggagcctccgggagcccggagtggtcgagtggagcgtggtttcatgaatatttccagtacaatgcactgaatctgaattgctcgatcactacaatggaaaaattctaattgcgcactcatcttgaattgctcgatccaaccaccatatctcagcgaaaaattaagagagaaacataaaaaggcaagaccaaattaaaccggattagtatacacacgcgcaccagccgctaatgagattaatggagattgaaaataagaaacaagaaagccaatcgcttcgacgatttgcagaatagctagctagtgaccgaagctctggctagcacacgtcatataatattcagtcgaccgtcaacctctagtctagtagtattacgctttctgaaccctgaagaggcaaaactaaacgtaccctacctgtattttaattacaccatcctaaccggccaacccaacaaccgctcgatgaacctgttcgtcgataggctgcgtctgataccaaggccccatcgaaaagcatatgaaactatgaacagagcagaaaattaaaaggtttagccgtgacgtacggcagctcgatccatcgagcacaatcgatttaatttggtttaagacctgaaaaaaatagttaaagcaatgcaacttgtgtagataccagcaattttctgacgatggcatatcatatccaaaaagttcttgggtcttttaatcgcaaagggttttttttaaggcatggactagcttttgatctctctgattaccctattcgttaagaacctatagaatgagaagatcgtgacaaggcacgtcgcaagcaatgacaaaaatgaaaagttgcatgcttacctcgatcggtagataggagaagagcagactaattaaagagttaatgctcttttccttgattgaaaacaagaaactaattaatgcttgagtgactgttgtcagagcagtgtgagtccagagctacctttttttttcctccgttattcttggcatcggtcgaggtctttctttttagacctactgcgataatcgtctgtcgagtcttgcaaggccacacgtacggagatgagcttttcatttcacgttttactggatgatacttataatacgacgttgctacaagaatttacatgaagcattaattgttagatatagatgataaactttgggtgtgtttgaggaggagaggattgagtgattgggaagatacgcaaaacgaagtgagccattagctcatgattaattaattattaactattttaaattttaaaaatggattaatgtgattttttaaaagaactttcctatagaaaatttttgcaaaaaacgcaccgtttagtagtttgggaagcgtgcacgcggaaaacgacgtgctttcttcctcaaactcactggaacgaacgctgcctttgtaatgatgacatcatgatgaataactttaatcactttgttgaattttgtaaatcgcagttctgttctcgagcccaaagagtgaactctttaatggggtggccttggtaatacgacgttgctactaaattttatactagaaaacgtgataccttccggtattttttgaatgatggtaaaattaccccctgaagaatacgtaacaaaaaaaaaaaactagaggacgtatgcacacgaacatggagactcgtcctaagctgtgcctgtgggcttgggtgaactgagcacttcccggtttttggcctggttagccaagatcaatcaacaatttattgtaggcttttagacattgtgtgtaaccatcctagttttattaaaaaaatatgtagtaagtattatttattttgttatgacttacttttgtcagtgaaggtatttcaagcattcatatcatatttctcacatttatacaaaacttcaaataaaatgaataatcaaacgcgacatcaagtttaaaagacaatagcaccatatatttaaaaacagatgtagtatttgttgtcagtagaaagtacatttagtgatttactcaagcgtatatattggactgctggtcactagctaaaacttgagaagttatctggagttactcaacgatttgatgagctgctggggtacgaagagccgggtcttccagctagcttcataaggtggtgagcgatatgtattcgaagcctcaccccttctaattatttgtataataggccatttcctaatattcacgtctttatttgatgaaccgctgtacgcctgtacctagtgctccattgactagtgccatgtcaatgtttccttctgaaaagttcatcactaagaaatacattcacgttatggtcaagcatgcagcaatattataggctcatcattgatgccgattttctatgcacatatggggccgcgatatatatgcgcagaacggtgcctttcggccttacagctatacagcacataactaaagttggcagcaggtgcatcccttcgtacacagccgaagtctgaagctgcgtgtataaattgcttcctatactttattaatttgcttattaatgtgtcgggttgtttagttcactacttcactttatcaagccacatcttaatcatattataattattagataggtatttatttcgcggccacaacttagatttaccatactttcttatactttaaactcctaaatcatttattttttttcgaaccataccacacttgtgacataataattcatggacataattttttctaccatgatcacactttagctaaggttagctgtcgcaaaattagtcaccaaccaaacaacccctcctttcacatgacacaggaatatagtgttgtacgttcattttcaatgtatacagtcaatgcatgttaattgtgtcattgttagctcggatatatatatcgttgacgaatgattatatttagctgcttcaatttgcagcccaatttaaactctagcactgtccttttaagttggtttcttgagaaaagcttgtacgagtacatactccactgaccgaccgctgatcttattgatctatatgatggtacgtacagagcggatccgatcaatgttactaaaactaagcttgtgcgctttgtcgagtagatttgtactagaaatagaaaatcaaagtgaaatcactatattaattattcccttccgatggtgtttcacaggtatgcatgcatatgcatcgaaatgaactcgtctatattgtccatctatctgacaacatacagtgcagaacgattaattagtcgagttctacagttctacactacacatggtctgatcatggacaagaacacatgccgtacaaagcgaaaaacagaaacaaatcaagacgaagaaacagaagtggtaaacaaaattaaccgcaagatcgaacactgaaacatgcagcactgggcgatcgacgaccatacaaaaaaaaacctccttaatttgtgttgatgcagacgaggcgacgactacctacgactgagagagatcaatggtgctggggatccggccctccggggctaagccgcttggactcgtgcgccgccgcgccgccgacgacgacgaccgcgccgccgccgctcctccgccctgcagcctcgccggccgccgcggcgggcaccttcatcatgccggccacgcctgcgcggccggcgacaacggccgcctcctccggcgcccgttctctcaaagccctggccgaggccgagcgcgccacggcagaaagcatcaagatggcgcagaaagcgaacacggccaggtacgtacgtgccgccatgtcgcctgctgagatggcctctttttgggaggaaattaaagctgatggattctagctagctggggctcgagacttgggtttgggacaaagctagttctacgtacaggtcgatcgttaggttgaaggtgatgatgggtttgtgtggagctacacatctaggcctgcatcgtcttatatagcctatagaaccttgtggcgtccacgtaagatagatatgatgcgtgtgtagctataagctagtaacggacatgatctctacagtcgagggcaagctgactaagaaaccatgcaaattaagacaaaagtatgttaactttgccacctcttctaaatgctcagccactaattagagagagagagagagagagaggctacaacgaattgtcttctcggtttattaggggcggcggccaaagtgtattccgactatgataatagctatacgcagggtatgcacgcataaagctaaatatatccgtgtgtttttaggtaagcacgtatttatgcatggatcaaaaaatactccctccatcctaaattgatcatcatatatacttatacaccaagaccaatgataatttaaatgacatcaatcaatacaccatgcacacacattctccaataatgcatgtatcaattaaaaaaccatgtcaattacacctcattactaccaaatctatatttcatggcagccattttgggtttttactggcggtatttggagccgccacaaagcaaaggccaatgaagatgaagcatctgcgctggcggcgaaaaaccgctagagaagttcatttttcactggcggtctatgtaaggcagccgccagcgaaaactgacttatgtggactgctagcgaaaacatatttttgctagcggttcctcatttttactggcagtggatggccaccaacaaaaatttggtttcactggcggcaggtaatgagacccgccagcgaaaataatttggaagaaaaataatcaaaacggaaccgcaaccctagccagccgtctgcaataaaaattacaccaaaaatatccccaaaatcagattttcgcagcgtgtacatattcaaatccacttccaaattttcgagcatcgattcaaatcctcatccagagttcacagcatacaagcattttgaacatggaagtgaacacagcatacaagcattttgaacatgaaaaaaagaaaaagaaaaacagcaacaacagaagagaggaaggaggccgtcgtcgccgtcaccgaccgagcagcaccggttgtgcgagccccgtcgccgagcatcaccgccgctgagctcttctgctgtaccaagccccgatctaggaagccgggctcaccagcgaaaccgtgggagggggaagggttgggggagggggaggaggaggagctcgccatgccctctgtcaccgttgtcgtcccgtcgccgtgcccccgcttcccatcgcagtcgtcaccgcgccccccgtcgtcgtcgcgccccaaaacagctcctcccgtcgccgtcactgcacccccacctcccgttgcagtcgccgtcgcgccccacgactcctcctcccgtcgccatcgccgcggcccccgacgaccgccttccgtcaccgccgcgcacggttgcctcccttcgccgtcaccgccaccacccgagaaccgtcggcagagccgccgccgatgccgcctggaggagaggacgccgacgcctaggaggagtggatctgtggaggtgaggaggagaggagaggatttgaatctggatctggatctggtgctgagaggagaggaagatatttttattgtgaagaggtgtgtgggattttagactatttgccattcccttagatgtagcattcccaaatgccatcttcccaaataacttagacaatttgcccaggtccccacaaatcagctctcctctgccattttacacccaatttcgggtcccatggctgccacatcaccaaccaaggtggcactgagagcgtgaaatgtctatcttgcccctgcctcttctcaactgttatgttttaacataaaaattacacaaattgccactgacactaaaattgaacaactgctctcataggagcactgttaagacatcccagtcactctaatccctcgttcataccatcccaacccaaattgcacaatctgacaaaatatatcagccacattgcaccataataacaagtatataacgcaattcaacggaacatttcttagaactaaaatagtataggcttcaaatattgttttctgcatttctacatagcacgtctagtagcaagcatggctggccttaacattggtctttgctgccattaaatacataaataaccccatctttcttgagtccagtttcatgtaacaaaagcaaaaaggcaacatcagttctgttttttctttggagtcaatttcttcttggttggtggtagtggctgtgatggtgttgcttcagtcatagccaagcgcctccttgtcactggtccaggtgaatcttgtgagcatccttctctagcaatagttggtgttccagttgtccttgtttgactaagaaaaaaagatgttagttatgcagtcatcacaataatgatcatgtaattaaaaagaagcaaggtctcttttatatcctaacctcctagtgactcgagcagggctatcaactaattgaactctagcaacctttgatcttgttggagtttcaacaatttccttagcagttttctttttcctagcttttgtagcaatattctttgccttcctcttcctaaaaaaacacaagtagaacacaagttgaagacagtgaataaagataggacaagttaacaagttaagaaaggaaaggaatgaataattgaagcaagttaagacaatatagaacaagttaacatgttagaattattacctctttttggtcccattaagaggacacttttggctgctctgtctatgccctagcccaccacatcttgggcatttcacctgccttctgatctttcctttccccttctcaagacaagaaggaatcatgtttttcctttgcctaggaacagttctaggcttgggcactggtggctgcaacttaaaatctttgttcgctgttggccattgggacttgtcagttatgcaggggatgacaccttcatatgcagccctaaagcaactaacagagaaaacgggatcaacaaaatcatccatgattggattcctttgtttggagatagctgcaagagcatgagagaatggcttccctgttaactgccactccctacatgtgcatttctgttggtcaagatacacaacatgcctatagacttcaacactattatggagctcagtcacttcagctgtatcatccgctcccttcatgactctcatgttggctaaacctctagttgctgcctttagttgtgtgacaattgcaggtaaaatgtttctgccttctagtttttctccaatcttccttctcttagcccacaaggctgctgtcttctctctgattgcatctgctagggcatcaacttgcagttccttgaattctttgatccatgcattccatgactcagccacattattagtgatgaagtcacatttgatctttggtgagaacttgctccttgcccacagaattttatgatgtttgtataaccaatcaccaacatcaggatcagctgataaaaccttatccatgtgatagtcatagatctcagacctaaaagctctagcagctggccacaagttaccataaactgtaccagttttcctctttgtcaagttttccatcaagtgcctaaagcactccctctcctcacagttaggaaaaaccctctcaactacattttctaggcccttgcaagcatctgtacatattgccaggtcttccacatgtccaatacacactgcaagttgctccatgaaccaagtccagttatcagtggtttctgcatcaaagaacccaaatgccattgggtacatccaattatgcccatctaaggcatttgatgctgccaagtggccattccacttcccattgagggccgtagaatcaatgctaaggtattttctgcatcctaacaagaaacctgtgatgcaaggctcaaagcaacaaaagaacctctcaaagtgaacttgaccatttacttccttggtaccaatttcaactcgactgccaggacacctcaactctatctcagccttaaagttatacaaggaatcaaagctatcatcccatgaactcccaaatcttttgtatggccctctctttacccttccaaacagtggagtaaggaatctgtaccttgtaccgctcctctaatatggtctttagctccttggccccacaatttggcttcttcctcataattgcagcagctctatctgctacc

SEQ ID NO: 6428 - DNA, 82059 bp, Oryza sativa
  unsure (1)..(82059): unsure at all n locations
gggcccacggcgccggccagtgtgagcctgggtgcaaccggtccaccgtggaccgtgaggctgccgcgtgggccccactcccgtggacccggtccgcgcgccccctccccctcagctgacgcaataaaccccttttttaaattaaaatttaaatgaagaaattcgcaaatattcatttaaagagcatataaacttcaaatggccataacttggccatttgaactcggaattggaccgttcaagtctctaatttttccttaagaagtcaagaaccaatttttgtgctttattcctgcttgttatatggagtttattagagtaaaagccttctcttttccgctcttcgtggaggttgaagccgacatttgggaaagcgagcaaggcaagacacatcatccttgagcatattgaatcccagtttataaaattattttgatttaaattattgcattatcgctttacttaaattcccgcgttatcactgttttatctagccatgcctatttacttttgttatgaccttattattattattgttattattaccttgttcaccctagattaaacaaaaccccaactagtggacactctactcatggtaccactagtatgattttaggtagatgcttcgctggttaattagccaacattaggtggttttacaactctagactttgggatatttatatcacctggacactatggaatggttggattattgtggaattagattcacacctccccctctattcaaaatcctcaaaatggttttaggctgggctcggggtgcatggttttgatagtagcacctcggccatataaggaccggtcttcgggcctctgttgcaaagcactaccgtacttccacatgtctagtgggtaaggcttagtttgtggctcagtctggttataaacaaaagtacacggatggagatggacgaagtcgggggtcgatggacatctctaggacaaatgaaggctacacgagctgcggcccggtagtcgagatgtcatggcacagggccggtgtcctgctgctaggggctcagtcctgcctacctgtcccgggggttccggccgtaggtggggttgggtcggtactattgtctatggctaggataggttggaaactatgtcacgtcttccgtccatataccgtggtggtatgtggcatgtggttacacgtgaggaagatgtgtcttgtgggtaaagttgtacacctctgatcagagtataatctatccgaatagccgtgccctcggttatgggcaagccgagcaatgtagccaagttattgtttttaattcttaaaacctgcttaacaactaaaatgtggaatggttggcctgggttggattgggatgagctgggacccagggtcgggttgccagttcggtctgaatcatcgtaggccttgggttaaggcaggttcgtgtgggttcacggccttgattaataatattgtgtagctctaggaccgtggttacaaaatagctttgagcaactaagtgtcttttaatgctgtttactgcaaaccctaactctctatattatggctcccttgtactcccttgcatttattctgcacttgtgggtgtgtcttgttgagtacggtggttgtactcaatcttgctcaattttttcccaaacccagaagaggagttcctggaagatgaaggctttggtgtctagctcgtgcctgccgtcaagcgcctgtggtcgtcgccctagtcttccgctgtttttcgtttgtcttcttgtgtgctgggccttcgccgcccatgtaataaattaattaattacgcttccgcctgttaaactctgaattgtatcaacttttgtgtaccttgcctcctgggacaaggaataaggaataatgcacgcacgtaaggaacgcccgttgggttatttccggtcgtgacaagttggtatcagagcccccttgaccctaggacgagccttagatcccaagcctttgcaatattttcaaaataaaaatgatagcgaaaagaaacataaaaacacgcacaagctccatcgggcaaaagcacatatgtgttatacaaaggagcaaaaaattacatcatccgtttcagaacatttttgccccgcccctactaagtcccgcgaacacggttcgtcatctatactgtacacgactctaaggggggaaggaagtgaaatacacaccgacgtcaagcgataacaacttgacgattagtcatttcgaagtctaaccaaagtgtggcaatgtcatcgcggcgctggatgtggcaccggccgtaatcctctaaggttcgaccgggatgtcttcgcctccaattcgccattttgacaaccacagctacataaaaggcgaatgcttgatcgacgaaaacgccaggggggcaaaacgaatcggccgaagcatcgctcgccgaacattgaaaccgcaacagcttgtttcggaataaagataccgaacgccgttacattcaacttacgcaaaacacaagcgtttttcccaacgcaaaatgctacgagtcgaaaacggaagtcgaaagctaaaaagtcaacaaatcttttcgccaatccccaaaagggggccgaacgcatgactttgggcaaaatccccgctaaaacaatagggaaaaggggaaagaaaaaaatacaagtcaagaatcgcgcaaagcagacaaacttggcaaaatataatcacccagtgtcataatacagcttcgccattctcgaaaggcgaacgccagtgttcatatgttttctgaaggagtctaaaacgaggtttcggcaggaacatcgcccgaaaggggacgcctcatgccataccgcatagtttgcacggtctcggccgaagctccttactcacccttccccgtgaggggcttgttggaggtatgccatgaagcccttcggccggacctgtcgaaactatagtaccagcaaggattcaagccaaagacgtcaaggccattcaggcgaagccctatggcgaaagccataagcgaagatggcgaaggctnnnnnnnngaaagccacgtcgatattccgaaagtaaaggcatctcgggcgaaggcatctcgggcgaactacaaagacttcgccatgacgagttcggcatcaaggaggcccaacaggccgcccctagccttttaggcccatttgccatagaccaggcccagcctatcagcccattaaaggcccatatgtgcaaatgacactgcatacccatgtaaatgtccctttcataagggcaaccatgtaaaatcccctgtaaccctaaaccctagaaggtgcaagcttgtgctaaggctataaataaacctctagggccatgtaatgggggggatccccaaaaaatatttcacgaatcaatacaattgcttttacattccaactactgttgagagaaccacgcctttcgacatggcatagttgtccattcgacaacatttagcatatatgaaggtttgagaaaaaagactacaataccccttattaaatggtttataggtaagagtggagaatagttgagggtaaaatagggagaaatttggacgagaaatgattaaagggatcattagtactctattgtgagaattattttgggacaaattcaaatcctagagatacaattattatggggtagaggtattatattactaaccatttagtttgtaatatagcgtgactgacactaacacaacttaacatatgctaatcacttgtgttttttttttgaaacggtagacggctggagggctaccggttatattagaaggagaaacaagtgaaaacagagttattacaacgtaataagggagcattggggataatacaactcagggataggcagaaggggaagggaggctagttatgggggcttgaaaacaaaattccgtaaatctatgtcttccttgattagcgttgctacatccacaaaggaattggatgtttgtttgaaaattgttgtatttctttggttccaaatatgccatcaagttgagatcagggcattgaattttgctttgctttgtgttgcatttgccgaagatgtaagaggggcaatccactcaggaactgatccccgtggggtagtaggtagaccaagcattgttgagattgactcccaaacctgtcttgtgaaggtacaatccctaaaaaggtgaacagtgtcctctaatgcccgtcagcagagagagcaaatgcaattacaaggttagtgtcttatgagtagattgtggttgtaagtgctttttgatgtaagattagccatccgtgaaaatgttgtttaggctacgcatgagcagaccaaatgatcttgaaagaggggttcatcactgatcctagaaaatgtacttggtaagcacttcttgttgaaaaacatcttgaagaattcaaggatgatgatatgtcatcttcagtgttttcctccagagtgattagagagagcattgttcctagttggacaagttcatgaatggactccacatttgtgatctgcctgaaagaggttaaccaagagtttttagagagttatgttgcaacagttctgctcttccgttgcactagtgagaaaagatctggcaaaatatcttttggacattggtcttgaagccagttgtcatgccaaaagaggaacaaatgcctgtctttttcattgcaagggagtttcatttgggcccaaggcctctgatcatccttccatctgagctagagccatctcaatcttagcgctcttgaaaacttctcaaggtctaagattcctatgcctcccaaatctttatgttgacaagctgtttgcaaatttacgatgcatgttctagggtgggtgttttcaggctcagtccctttccaaaggaaagatcttctaagtttatcaattttcttgatgaccaatttggggattttcaaggtggtcatctgataggttgggattgctgatagaatatatttgaccaaagtttctcttccaacccagtagtctagaggagatcttttcaagaaggggtaggaaataaattttgtttagcttccttgtgtgcaggggaaggcccaagtatgttgttgggaaggaagacaatttgccatggaaattctaaaatatttgttgcatattgatgtttgcacaagctatagggaggatctctattttggcaatgttatttcgtaggccagaaacttccccaaagagctccaggagaacttttaggttttcaatctccgtggagtctggctttacaaagaatgctacatcatccgcaaatagggagattctgaatctcaaatttccaattccaaggggagagattacccttgattgttcagctagtttcatgatattattgagtggctccattgcaatgatgaagagaaaaggggagagagggtcaccccgtcttaggcctcttgcatgtttaatgggctgcccaggaatgccaattacgagcacttttgaactagacttttggaagagtgtcgaaatcccatttctccttctagtgccaaaacctaattgtgtcagaacttcaatgtgatattgctagcttacagaatcaaaagcctttgaaatatctaatttgagaatgagtgttttgaattttttcctatgaagccttttgaccaagttctggacatacatgaaattgtcatggattgatcttttccttatgaaggctctttgattgatgttaatcatctcatgcattgtcggagtgagtccattggccagaatcttagagacaatctttgcaaagctgtgtactaacttattggcctgtaatggttaggtgaagtagcatcttcttttttcgggataaagcaaatatgagcataattcagatcatccaattggtttaggttatgattgatgaaagattggactgcctttaggaggtcaagcttgatgcagtttcaaagaatttaccaataaaaccatcaggtccaggagctttctgtgcctggatagatttgaacgcctgctctaactctgctagagtgatatcttcttcctggtcattaaggtcaactattgcaagctgatttgggtccaatttaaagttgattgacttatgtgggtttgcccaactctttgatgaaagaaatgttcagctcttccactttctctagattggaagaagctattccagaagtggtttgcaacacctggatgggtttgcaacacctagatgaagttctttcttcttcttgcattttcttttaggtggaatagctttgtatttgtgtctccttctttaatccaagttagtctagatctctgtcgaattttgattttattgagcccaagaattttgtgcttcaagctactgtgcagaatttgttcttcgatagaaaaggttcatgatttctggacaacacctagttggaagataacctcgtttgtgatggccagttgaagtattatgtctcctacctgtttcgctacccatcttcttatatctcgtgccaaacgtttcagtttcatgttaggaattgctaaagggtttgtggagttgattggtctttcccaggagcttgtgaccatttcttgaaaggaatggtagcttaacctaaagctctcgaaacagaaatggcttggcctaggggatccatcactgccctacaaaaggaggggagcatggtctgaacaggagctggataggggcaatagtcaagcaaactcgtagggcaaatctcaatccatgaaatagaaagctctgtcaaattttatatctcaatccatgaaatagaaagctctgtcaaattttatttgagttgggttgcttgaggtccctgcccaagtgaacattcttccctggagagtaagcacttttatttgcaaatgaccaatggcccatataaacctttgcatcatcctcaaatcaattctcgagttgtttttgtcataggttttgtagattggattaaaatctccaattattaaccaagaaggtaaaacgatgctcatgttgtgctcaagctcttgtagaaaagcgagtttctctgcatcactttgtgggccataaacagctatgattggccaaaatgtttgttcttctctcattgtgatggtagcagtgagggagaaaactcccaatgtgacagccgttaaccgaaagaaatctcatcaactgcaaggattatgcctcctcttattccttgggctggaaggaaaacaaaagtattccgaaatctacttcccatagattgaacaatgcagggtgtgttcacctcctgaattttagtttcctacaaacagacaatcgaggcacaatgttggttgatcaggagtctcagagcttccttcttggtcggtgcatttaatcccctaacattctaattaaatattttgcagtgtcgttaagccattaggaaacaaaataaggccactaagagcatccaagcatagcacaagggagaacaaacagacaaggaaaggtttcaagagcaagagcagcttaggtttcttctagcagtattcacagttggagatagcgcgggagaagaaaactgtactcatgtgaagatacagaagtgaaacatgcttagaacaagaataacagctttaaggtctttgcaacaacatccatagatagtgcacttcttaacatagcggggaaggccttatagccttgttggtgcatcaaaactacataacacatcatacaccaaaaacattccaggttcctagaggtttgcatcacacctcctgacttgatcactgggggtttgccgtccattatttatctaggtgcctactaggttggttgcagagtagcttcatgctggcagatcaattgtctacgtcttggcaactttgaccttgatctgtttgcagccatccatctgcgcaacgtgagtgacttcttgaaacattgtaaataaagttttttttgacattctcatcaaaagagtcactctcattcatgataacaaatttcttagaaaggatttcttgagctatggtttcaattttacatccattctttcttttcttttcaaccctttcgctgtgcctttgagtagaattaagggtcacctttgggcgatgggctcggatgcgtccaagcgacagacttgggagtagtgggacctagactggcgtcaagagggatgccaccatatccccaactatatccttttcaatcgtgctggctctcaggatggattcctgccttggttcataggttggcgatgcctcgtcatcagcattcccatccacggagaagttcagttggggtaggtttgcctcaaccagcatcgaatcatcatgaaccaactagttcgctggaacttcctaatggagaaaaaagaactcagttgggggcaaggagactggaataagaagagctagtgacccgtcattgggactcttgctgcggcgtgaagaacgaggcttgtaggggggagccagcagatgggagagagaaggcagagctagtgttttagagctgcgtcatggtgaggtaggataaagagaaggtctcacctctccgtgctctttggatcggcgattgtgacccatggagatcgatggctcccttgctctctgcctgccatgatttttcctggttgtagtagctgtgctcatcacccctatgcactctgccgctcgagcagccagtgatatagccctagagagagcacgagcgtctcctgtggcatggtcttggtcgcccaccgccaccatctgggtcatcctccaggcccctcaccgcgctcagctccggcctgcatggaataggaagtggacacgagtgcgtgcgagaggcatcgtcctagaccacgtaggtccattcataggtcttgtagagcatgggttggaggtcttctagggtgtctaggtggaggatgaccgggtaggtccatcccccttcagtctcggcaatggtgggttgcatagcgggtcgatgtccaggaatggcatgtcaatggggatcagctcttcatctacattggagacgcccagccaagcttcttcttgcatccgcttcagtctcaatgaagttgatggagcacttgggctcgacaagcttcgccgtcaccccctcagtgtgaccatgcatcgggatcccctcaatgcataggcgcacacggtagtgacagctagaaggtctgatgaccctcatggtgtgagtcccaagctcggagatggtaggaacagctagaagagcggtcaagccgtagagtgcacggaataaagtccctatcagcaggcctagccaatgtgaggaaggtagcctcatcaacgcagtcactgtggttgtccaagcaccacgcaatgaaggagcagcacgagaacttttgccgaagcctctcgacctcgtcagttgcagccactgtcaccgtggctgccactagccttttttccaatagttcatccatcgcaaccggggttccacgaggggcggccactcgagaatccggcagggccttcttggtgaccgaaggttggtgggggagaggtgggaactgagagggatttgggagaagaggggggagcaagcaaggtggcaggtgaactttgtcccctactcttcgcttggagcaattaaggacttcatgtccaatccctctacaaaaccagcgtttgaagggctctctgcaatctttaattttgtgatctggagcaaggcatctgaaacactttccttccatatgtttaaagaaacgagctcttccttgcttgtgttggtcctgtggatctgcttgagcactaagggattgctgtcttctccactagtgttttgctttgacttctttccactagggatctgagataatttgggaggatcttttaatctactgagatggaggatgtgacgaggtagagattacacttccgctcttgagtactctaggcgtatcactagcgagaggcaatttgcttcgcctggtagataacctcttgctcacaagcaaactttggggggcagcagctaaaggaagagagtcactggctgcaattgaaacctaactgactggggtcagtggagcattgatgctttcagcaggagtaatcaagacttctttgaacgttttgtagaaccgctgctagggatggttctggatttgctcatcacgtggaggaggcgctaggctttccaggtgtgaaaccagatctagatctgaggggaagagtggcttaccttgtggtggaagacgacattcaagacctgagagaaggtttgagatgttacggggtggagagaagttgggcaggagagaggtctggaggtactggctggccggaggtgggggtggaggtggtggcgacagctagttgctggtgtcgagggtgggtgtctgggctaggggacgacatatttattgctactccctccgtctcagaatataacaacctagcaccggatgggatgtattctagtactatgaatctggacagccccctgtccagattcgtattactatgatgcgtcccatccgatcctagattgctatattctaggacggagggagtaatcacttatcatgtcattagtttggtgggctagggcctctagctatagctcaccacaaatggaatccattttttttcttaggccaagtgctcccttagaaactgttcaagccagtctcctactcaagtatagcaaaccaaacaagtctggatcaaccaaaatccaacaaaccaaactcatcccatatcgaagaagaaaacaaaaagaaaaaggtagcacaagatctgcaactaggaatcacgtgtacaccttgtcgtcatctgcctgctagcactagtagccacaagatagcacattgtatggaaaattaattcaaccgggtaggttaggaggccgatgttttggtgcgtacgtacaaggatgtcaagcttgccgccgaacatggcggcgaccctgccggcgatcgcctccgggtcagcgcgcacctacgcgtcggacggagacggtgacggcgagcttcttggctctccactcctccagacacctgttcagggtagcctcgttccgggcgcacgtgtgcaccgtggcgccgaagctcgccagttcctccacgatggcgcgcctggatgatgcatttatacatgcttaatcagttaatctgctgccatcgatttaactagcatctactaatacgccgaagcaacgattcgatgacttggtgaacttattcatagtataattagatgttaaaagttaattagaatcaataacaatttaacactggctgaagagctagataattaagagcacaatctgaagagatagatctgtttcactcttcaattctgaaaacagatcgatgggaaagcttggattcggcgaaggaagacgaattaattacccgattcctttgctgccaccggtgacgagagctgtggcgccggcaaggctccaccgcccgacctccggcctgctgcttgtggacatatcggcgtgcctccggtttgtgcgtcagacttgtgtgttagtgagacagcttgcagttgcagcacagggtcgagtacttctaaaggcgtaaagcattagccgtctgcactaggtgcttgtctagtccgctggccctgtccgcctccttgtgtccatctcatgaatatctttgacgtgtatttgttcagatttttctttaaaaaatactattttttatgggaaaagagagtatagcatatatcggcttgtcctgagttatccattgactttagacttgtttagttctctgagacaactccgcatccgctgtccactaaagaaacgggatcggttatctgtaatgggtttaaagcatcatctctttcggacagggcacccgtcactaagcaaagatcagtaatgtgagaaaatatcttaatcgggcatccggccatcacgaacgaatgactctcatctctaatgggcctaagctatagcctgtcacggatgactctcatctctaagcacccggaaagaatttttccggtcggtcacccattccgaaattgctctaggccaagcacgcttaatctcatagtttttttttaagattggattccgaaaaagaaattgtaacttgttggcatgagtattctattaatcctattaagccctgggcaaggatgtcacaccctagcattccctattcatatacatttattcatatacctaactatcaatatatttaatacaaccacattcatataacatccattttgatcatatatttcaccagcaaaaccgagttaattgcatcaaatatatatttagcaagtattatcacgagtagggtaaatcagacttctaggcaaaaatgaatttcaaattgaattttatggtactagatgaactcatctgaaaaagttgtaaaaaacaaagttgtagaactaattgagatctaccaattttatttagggcaattgcatatttgactctgttttgaaagccaactactaaattgaccctgttttttttaacttagcttattttaccctgcttttcaaaaacaaacatcaggcctgaccctattctgtcaatccaacgtaacagtgttaacttatggctaaaaagacatttatgcccttgcgtatttgaccgtgatttgttttctattcggtctaatttcatacacttagttgtttaaaaataacattttaacatatttgtgacacaaaaatttgacgaagaatcgataaaactacaactgaagtttaactaaattttggcagcatatattatccatcacaaattacatatactgaagaaaaaactaagagctagctagcctgcggccctggagtgcgtcgcaccaccgccggccgatgcccggagaggtggaagccactggccatagaggcgcaggggtgccgacaccgttcctgtcaccacctcctcaaatctcatcgtcactggctcgccgctgatgcaccgtcgccaatgcgaggaagagaggccaccgtcggcaccagcacagtcgccgcatggatggagagcaggtggaggagcttggcttgcatggtcgccggtgtcgggacattactccgtcgcctggaacagctaagccgccgtggccatcgactgcatgaagcagctgcttcgcgcgtgtgccgccgccgccgccacaaatccctccgcgccccggcactgccgccgctcagctggtgcggatcccctccctccccgccggcgcagatcccatcccgtcgccgctgctgctccctcccaccacgtcgtgctgccgccgctccctccctccagcgtcggcgctgctatttcctcatacgccgccattaccactcgcatttatgatacgagacatccagatagggtttattttggatagggttcctggagggtattttggataataattatattttttatttgttttttaatgaaagcttaacggagtagcgaaaaaagggtcagaccaagtgatcagttttaaaaaatagggtcaaataagaaaaccacaaaaaatagggtcaaattggtagttagcctttcaaacggggccaaataagcaattgtcccattttattttggtcatttttctatccgagtttgattaaactatataaaatttgaattctaaaatataagaaatttaaatatttttttgggtagtaaatgatttcaaatgaaaaaattatcaacaacaaagttgtatatctcctcaagatctataacttttactttggtctttctcccatataatattttttgaatagtttcaatttgaatttgaaaatatgacaacttcaaacaatattttcaaatactaaatgatttcaacagaaaaagtcatcaacaaaaaagttgtacaattcatcaagatctataacttttatttttgtcatttttctatataacatttttttgaacagtttgaatttgaatatgaaaatatgataacttcaaacaatattttcaaatactaaataatttcaactgaaaaagtcaacaacaacaaagttgtataacttatcaagatctataacttttgtttttgtcatttttctatataacatttttgaacagtttgaatttgaatttgaaaatatgacaacttcaaacaatattttcaaatactaaatgatttcaactgaaaaagtcatcaacaacaaagttttatatctcatcaagatctataacttttatttttatcatttttctatataatattttttgaacagtttgaatttgaatttgaaaatatgacagcctcaaacaatattttcaaatactaaatgatttcaactgaaaaagtcatcgacagcaaagttgtataactcatcaagatctataacttttatttttgtcatttttatatataacattttttgtgaacagattgaatttgaatttgaaaatatcacaacttcaaacaacattttcaaatactaaatgatttcaactgaaaaaattatcaacaaagttgtataactcatcaagttctgtaacttttattttggtcatttcttcatccgacaaagtgatagtaatatcgttaccaaaattcacatatctcttatctggttttataaactataacacggatatgtaaattttgtgaacaatgttactaacactttgtcggatgatgaaatgacaaacataaaagttatagatctttgtgagttatacaactttgttgttgttgacttcttttagttgaaatcatttactatttgaaaatgttgtttgaagttgtcatattttcaaattcaaactcaaactgttcataagaaatgttatatagaaaaatgatcaaaataaaagttgtaaatcttgataagttatacaactttgttgttgataatttttctatttgaaatcatttagtatttgaaaatattgattgaagttgtcatattttcaaattcaaattaaaactattcaaaaaaagttatatataaaaatgaccgaaataaaagttgtaaatcttgataagttatatagctttgttgttgacaatgtttccatttgaaatcacttactacaaaaaatttgttttgactaataaaatgaattattatactacagttaattattttgcacaggtcaactcacaaatataaacatttcatatgaaaaatggaaaaaaactaagtcatctcaattgggcataagtacagagcccgtcacgaatgagtcatctgtgacgggcctaattgttaccgattgagatataggcatacatatatgttagatgggtagtaaagtcaggcccgtcacggatgacacctatcagtgacgggccgtagtttaggcccgattgagataacattacatttctcaatcgggccctaagttggcgcccgtcatggatgacctaaactaaggcccatcagtgataggtgtcatccatgacggggttgacttttatgcccatctaacatgtctgtgcgacaatatctcaatcgggcgctttttcggcctcatctgtgacggcctgctaattctagtcatgttagctaattctaggcatgtcaggcgctaaggttctgtactagtgatctaatagatcatggaaaatcgggcgctctcctgtagctgccttatatgtgcatgttggctctctctcactctgatgcatgcatacatatgtaccgcctccccatatatgattgaccaccatacattcatacagttcttgctccacaagttctttctcctctctccgtacacaatttaaaccaaaatcatagtttcttttaaattaattattgatctttaatctaattacgtagttgtatttgatgaaattaaaacgttacaatcaaatctcacaacactatatttcaaataaaaatataattatattcttaattgaaacattgtttcatcatacatacaacatgatttatagcaggtgaaacatcacaacatttttttaaaacatccaaagaatacaacgtgcaacatttgtaaatgagctagtgaaacatcagataatatttattgcaatatctaaataacaccccgaaaaccacgtgcaacatttataaatgacatagtgcgacatccgaaattcttattgcaacatccaaataacaccatgtccaccaaacaaaaatacatttaaaaccttaaagtgtgtgttacacactgaaaattttgaatttcaaatatggaaaacaaaattttgaataattaaacacctttctcaaaatttcttcatgcaggttgttgtcaattgacaactgcatcacgtcgaaggacatggttcagttaacaatagttggaaagtaaaagcagccaggcccacctgtcaatggttgttggaggcgtatcacgaggacctttggccgggcctaccgaaaccagaggtgatcaaaagtgcgagtaggaagaaagcggcgaagatcggagaaactgcatgggcaaaggtgatatggcgaaagcagtaacatggagcctacaagctttgccaaagacagacctcgccatggggagacacggtcgaaggttcgaggcaaaagccttgccacggagagcacgagtttcgccaggcatcaggtctcaccacaaggaggcccaacaggccgacacaccctccgaagctttcgccaaaggccgggctgaaacactcaacccattaagggcccatataagcaaaagacacaggatacccatggagatgtccctatcataaggctaaccatgtaaattcccctgtaaacccaagaccttaaaacggagagtctgtaatagggctataagtagccccctaggacaatgtaacaggggatccaaaaaaattttactatgcaatataattgtctttacttccaactacagttgagagatccacgcctttcgacgtgatgcagttgtccattcgacaacagctggcgccgtgtcacaccctgaagttcttttcccaagcctaaattgaatttataaatgacctcaagaaaataccgatgtaaaagcaagagcgaaaccctaataaattaatgcaaataataatcggaattggcatgtggaatttatcttgagttctacatgtcgaaatgtgctaacaagatttttagtggaatttttagagctctagaaataattttaatcaattaaaaatgagcacaagcaatatttaatccctggaaattcatttcctcctttttctttttattttccctccttttccttttcgaataggccgctggcccattctcttcccctccccgctgggccggctgaaggccaaggcccagcagccgcccgcctcctccctcctccctttgggtcgccgacaggtggggcccacctgtcgggcccgtctcccagctccagctcccacaaccgccgccccgctcgctcccgcacctcccgggccacgtcggccacgtcgccgccttgccccgccttccccgcgcccactccctctctctcccgcccgcgcccgcgctcgagacggccgggattcgaaattcgaatcccgtctctctctcctccccacctctccccactccgccggcgaaatcgcggccatcccggccataatcgacccccgcgggtctatataaagcgcccccgtctccccctctctctttttcgttttgcaaccatccactcccgtgccctccacagccctagtgccgttgccctcctctccgccgccaccgccaccgctccggccaccgctagccgccgttagccgccgtgccgagccgtgccgtcgatgccgttgcgttcgccgtcgtgcaggccgtctcgtccacctctcctccgtcagaaaccgccgccgtaacccactccgcatcgtgcgccggtgagcaccgccatggccgccgccttcggctggcgtcctcgccctcttctatccacctctctctctctaaccccttttatcatgttcgctaggtggtttcggagctcgtgccactgccgtcatcgccctccgtcgctcgccgtcgtcaatcgccgtcggtgaggcacctcctccccttcctccctctctcccacgcagcttagccgccgtgccgccgcctagccgcttagccgccgctagcgccgtccgcgtcgccgcgacgtcgccgccctccgcccccagccggtcgccgccggtcgccgacttgcgccgccacggcatcgagccgtgccgccgtgcaccatggccgccgggccggcttgagccgcccgagcgcgccggccgcgtggttccgccgctgagggtagatcggggccgtcggttcagctgcccgcgtggctgccaggtggccgccacgtgtgcgccacgtcggcgccacatcagcgccacgtggtgcgctgccccttccccggtccatggacccagtccaccgcggaccgccacccgagtcactgacatgtgggcccgcatgtcggcgccgccccctctctctccctgggattttaattattgcgcaataaatcaattaaggattttaattattgctccgtttaagcccattcaagtcttagtaaatcaagaaaaatgcatagaatccattaaaaatggttttgttctctgtttcaatagtcttatggcctgtttgtattgtttgttttgtatgtcgcttagattccggttctcccgacgctccggtgtactttgaaatagtcgccgaggttcctccagcagcaaagcaaggcaagtcatgcattacgattgatcatattgtacccaatttacaaatgtcccgtatttctattaaatgttgcattgttttacaatgtcatgtgggatgggtcctactactcggccatatattgtttaccttttgccattgataacttaggtattaaaatgattagatgttggtttagggaatgcttagccatgcttagttcaaccagtacacaaagggggatcactttaatgcctagactttgattattggcatagctttggattagtaccaccgcaatggtgttgattaattaaaatatattaaatggttggctgtgggtgcatgattttgatggtcgcgcccatggcacttaaggaccggttcgcgggatgccctggaagaacttatcgtacttaccacaagccagcgtgggtaacggctgggcttgtagtgtagctttgctctagctgacacatccaggcaagggtgggcgtgatggagcgggacaggccctgcgacggcctctgtcgcttccggatttacgtaggcacgagaggggactgcccgttgcccgctggggacgggggtgaaacctgaggtgtggtgtgcttggctagagggggttatgcgaagggtcctgtcacggcctctttccggtatgttgtggtggcatgtcggcgcacagtaacgtgtcgtggggctctgtcttgtgggtacagttgtacacctctgatcagagtaaaactattcgaatagccgtgcccgcggttacgggtggtccaccagattcactgtgattagtctcaccctagattagcctaatggaattgattagttcaggaggatggttgggccagttgcaacgtggtgtagcgttggacagtggatgattaatattgattaattactacaactgttttactgctttcaactactgtttataaatgctcgctttatgcaaatgacccgctctagctatcctttggttatatcatgcatcatactcctattctggtatgacttgctgagtacggtggtggtacttagtcttgctctattcccctccctaaaccccagagtttgagtacgtgtcagatgatggcttctccgaggtgtaggcttcgtccgtgccatcgaggatgcctgtggagtggtgttcccgctgcagtccaagtcaaggcttagctccagttatcctttaattttccgttgcatttatgtaaaacttttatgatgtttgtaagacgtggatctgtatgtcaactttgtcgtttgtgtaccccggccggtcctggacgggggttttaatgcacattctgcttggaattctattcggaaatttctgggcgtgacacgccgtccgtggggacgtccgagcgaaaccactgagagtgagcgaaaccactgatgccaccaaaggaaatcgttaaggagagagttgccaagtgaaaggaaggcaacagcgaaggggagatggctggcgaagagggagtagagccttcgacttttgaagccgaagttggagctgcgccacccccagcagcggcgccatctcttccaccttcagcactgacgaccttgacagatgcggatacgttgaaagcggcggccacgctccagttcagggacgtgatcctttcgcctcaagtaccgggggcacctcaagctgccgccttcacctagctagccacgacgtcaacagcaatcatcaccttgcaagctgacgccaatctcaaagctcaagccaatgcagacatgggggctatacgtcagaacatggctaaactgcgagacacacttcgccagatgcaagagcagcagcaagcatacggagcagcaagacaagccaaggccaacacgcaggagtttccgacgctctacgctcagccccaagtttttcccccacatgctgcaccagccccggcgtactacgccaagcccgtcccggccgtcgctgtacgaccgccataacatgtgatttcggcgccggttcgtccagcggcacaccaagcccagtacccgaagcccactcacactccacaagcaatgatggaggcagcttcgaccttacaagcacagtttcaagccttcttgcaacaactcaatcaaccccacaacaatataccaagagcttcgcctctggcccaggacgagcggagcccaagtcaggggtgcgctagccgggcagccgttgggctagttcatcatgccaagttgttgacgtaaaaacacaaggcctgggagatctgcttaactccagtgcaggtccaaaacttgcctttgggtgtatgagcgtgccagttgatttgatcctgcaatcaacaggaaacaaagacaaagaaaccgcggttaaatccataaacgatagccaatcggctaggtgccgatgacatatcatttacctttgagccgatgtcatatgtgcatcgatcggcaattattaataagtaagaaagaacaaaatctactcgatcggctgtagatgttaacgatatataatccttaggtcgatatatacttaaatcaagtgattgggatagatcggtcgccatgtcgagacagtataaatcacttagatcgaaatatatattaacaacaagaccatatatgttcgtagcatagccgatcagatagatctagcatgtagcggctaatgctccgatacgactctatattaagatattaaagtaagtaaaatataccaaacgaaagcctaatatacttaaatgctacaagatcttagcataaaaggtagaattaacatgtcaatcaagcacataagataaaagtagttaaattaggtaagatcggctgaaactccgatgctaccctaatcggcaaccaaaagcaggctagagattgagattctaatcacgattcataagatcaaactcaactgatgcagctataagtatgaaaagaaggacaatatctagacaatcaagccgttggatgtttcatagagtggtagatatcctatataatctaagtcaacatcggtatttaacctagtcggctgccttctattaacagacgttagccgattgtaggttagatggcgatattgccggagattatataagatatatgataactcgacgaattatagcaacaagattagagtatcatgaagatggaagcactaatcccgagaacgcaagccaccataacaagttttacctcttgttgaagatcgaaatcgatgcagctcaacccaaaagcaagaactcatcgaaacaaaatgaaagtaaaagggtggcgatgccccgagattgtattgaacgtgtgttagtttgattacatggggctcgaggtctatttatacccgagatttacaaaatatgtccacattggacacgactcttatctctaacaaactctaatataccataagtctttacggcagacttttgcccaaacatatctctaaggaaattacataaaatatcctaattaatagatataattgccttctcaggactacccatgcgtggcagtcatcatgaagcttattaactcaacccgacaatgtattcttcgtcatattgtcggattcggctcaataggctaaccctgtccaactcggactttgctgatcctgatcacagctgattcggacttcagccgattcttactctatttccgaaacaatcttggatttagattccgcttcaatctgatctctatctttgatactcagattaccaaatttggtcgttaacacatgcccaccaagtccagaatattggataatgtttcgaatttgccatacgtcgactccgagagaaatccgcacttgccgttttccgaccgttacacagtgctttaaatactaaccgttgtccccgagatatctcacacagtttcctccattttcaccgccgaagccaattccgtcctctctctctccggcaatcccctcggtgcgcaaggcgatttcctctccggccaactttccgcccacggcgatgtcgacctctcccagcccgtccgccgcatcatcagccgagtacgcagaggtaagttctcatcggctagatcctcttctttcgtatcggattggttttccctttccatatcttgttttcttcttctctgttcttttggatccgtagcatctctccaacctgatcgcagttccgagcctatctgacgagaaccattactttctcggcccagtcggcaaccttgatcctactgagttcatcattggcgaaaccaatagaattcctttcagattagccaacctagatctaggtcactggaagaataccttcaaatcatggccatctctcgagaaaacttcacccgagaagagctggattacatggtacaagcgcatgtcgtctaacaagaaagttcactgggacgaaattggaatcggccaagcgcttacccttaccatagccaattcagctaaagatgaacctttaatggccgccgccacctatttctggtccaataccatcaacgcttttctgttcaaccaagggccgatgactccaactttgattgacatcaccatgattaccggattagacgtaacttcattgcctaaccctgtgagtatgaacaccaagaaccaatttgatttcaggaccaaaagcataggtggttggtctggctatgtagcggcatacatgggcaaagggcctgtcactcctcggaaacatgtggctttcttgttgatgtggctagaaaagttccttttctgtggatccagttgatgtcctacaaccaactggcaatttgtagccgaagccctagaatcaaagaaacaatttcccttagacaaaattcttcttggctacctgtaccaagtgttaaataatgcatgggccaaaatagctatcggcttagtggtaggagcaggtggcccatggtggctgctgcagacttggctgaatctgatggtcatgaaagttgtcaatcggccatctgtgatagaagctgaattcctaagattagagccgatcatagaagacgatggagaggaacgcacccatcgcaaatgcacatcctatcgagggtatgcttccacactagccgacacaggggcaaagctatcagctgaactgcttaaggattggttctgcagtttttatgaaggctttcagaaagatgctccaatttggttcccttatgaggactcagcacttctagagctcccatcggactttagatttgaagacatcaaccacgagagatacgaaaagtccagagaagtcttctcggctgcaataagcccatgcatccttcctgtcggcattcatcaagggaggaatattcaagtctcttatgaattttatcatccgatgagttctgctagacagcttgggatgggtcagctaccaatcggcttgttctttgccgataaaattcaatgtcgaggggaaatttcatcaaccttaatgatggatcggttactcaatctcgaaggacctcctttgggcagtattgaaaatatagagctggcaaggttcaggagtaagaactttgacagatggtgggggtgaatggaaacaacatatcttccatcaaccagcttctatgtaaatgacagatctgttccccgatgttgttcctcaggtatatctttgctcttgtcaattctgtttgaacaattattagccgacttgaaacttgactaatttctcttctcgtcttgcagacaacagaatcctctccccctcgcaagagcaatagtggcatagatatcgaatacgctccaggtctcattcccaatggaggtgggtcatctccccctgtcatcaattgtcatgcccccaaaacttcaagtatgctccaagggctcattagagaactagctgatgccggtaaaaagagaaaaaccagagcatcggctatagacccattggctccggctccaaataagaaagccaagtcaaataagaccaagccaaccgatgatctgtctgccgtagatccatccattgaacaagctctggatgaagaggatattggagaagatgttgatcaagctgaagctgggataagcggtactgaaaaaacaccatcggcttcacctaaacaaactcctccgactccttctgctccagttcatttttccagggtaaacaactctccttgatttctttttgcaaccatttcatttatagccgattgcttatagattttataattgcagaaaaagaaaactactatgagaaagaaatcggtagcaacaactctcaaactggctccaccagtaagatgttcttaaatctttcactagttgatcatcgccgatcttgtctaacaattgtctcttttcagcctcctcctccttctccccatgtacagctatcatcaagtgaccaaactccatcggctatcatcagctagaagcatcatctctagacagtttggtagtagactgtggatcaattaggactcggctacataaagttcaagctttgatcccggaagaacatgccgacgtcctcactccagctgcttatcttgaacaatatcaattcaaactggagaaggccaagctgagattagccgaacgtcgggagcgcagggatattgaagccacaatccaggccaatcggcaactcgtgcatgaagagaagtccaagcttgatcagctatctgagggcccgatcaagtctaatattgatcagcttgaagctcgtaagattgagctcttggcacaactccaagaatgcaatgctgatatgaccaagtccctaaaagtcatctctggaaccgatgctcaagatacccaagctattgaagaagtagaacacattaggcaaagagctatatcggcgatctagcgctacttgtctcagtgatattctataataggatgtagtaaatttttgtaatcggctaagatactctggcacttgtagttaacttgtcttgatttatgccgattaatataactccatgtttttgctcaagaatttgctcaaaaattttgcaacttttgcatatatatgtgcccccctaattttacaatgtcgaaggcattgatgaaattatatcttgaactaagggcaatataacaatatcggccatttgtacatcggcaaaccacaaccgattacaataggaaaataactaagggcgatataaccatatcggccatcccaaggcaatgcaaacacatcggctattatgtatcagtagtaccagccgatcatgcattaacccaaacacttgggtaatatttcttcaagtattttccattgagcgctcgtccataaacttctccatcgagtccttgcaacatataacctcctttagacacaactttatagatttgaaacggtccttcccaattcggcgactacttgccgaatttgctatcccgagtgccaatcggcaaaatcaatttccatacaagttctacctccgaaaaagacttggctaccactttcttgttgtaatgtcgagcaacccgttccttatccttagcaacttttgcaagggctctgaatctagattgaaccaagtcttccctctcatcggccataagattataatactcatcggctgtcaaatcattttgcaactccgttcttcttgagccgattctaacttctcatggcaaaacaacctcatgtccataaacaagtttataaggagggacttgaatcgatccatgacaagccatccaataggaccataatgcttcggccaatcgagtatgccactgccgaggataatcggaaatctctctcttaatcaatttgatcaaactcttgttagacgcctcggcttgcccattagcttgtgcataataaggtgagaattcaacaattttatccccatgctaccggcaaactgaacaaactcatcggacacgaagattgacccttgatcggttgtaatagtttgaggaataccaaatcgataaattatatactcttgaataaattgtatagcatatccagaatcaactttctttagaggaatcgcctctacccacttggtaaaataatcggttgccaccaatataaactatcaatgtatcatttttgcactcatactctcctgccaactgactgatcaccagtaaagaatcccccataatttcaatagtatcggcttcaacttccttgagtaattgtaaccctttgagaactgcctcatactcagcttgattattggttgcataaggcttaatagtataggcaaactcaaaacttgccccccgaggaaaaattataaccaagcctataccacaaccatgagtgcacactgatccatcaaagaacaaagaccatggcacaacctcaaccgagccgattgaatcatcacgatgatcaacgatcaaattctgttaaggaaaatatccactttccaacttttccttttaaaatcggagccgataacatgtacttaacgacatcggctttgcatatgacagtgcattcgttggacaatatataatgccttaacattgtacaggaaaaatacaagcacaaacacaacttctccacaggggaatatctcgtctctgcatccaagagccgacgacttaaataaaatacaactctttctttcccttcaagctcctgaatcaagactgagccgattgacttctcaccagctgatagatataatctaaaaggtaatcccttttgtggaggaatcaaaactggaggagagctaagatattccttaatactatccaaagccttctgttgcactgcctcccaagtaaacttttggtcggctttcaatcttaacaatggtgtaaaaggctctaaccttccagacaaattagaaataaaccttctaacaaaatttatcttgccgatcatctcctgcaattccgtctattttctggagactgaattttcttgatcgcattaacactcctttgagttatctcaatccccctctcatgaacaagaaatcccaaaaactggccagccgatacaccgaaagcacactttgttgggttcatcttcaagccatatttcctagtcctctcaaaaaccttccttaaatcggctatgtggtcctctatctctttagacttaacaaccacatcatcaatgtagacctcaaccaaccagccgatcggatcatggtatatgtaattcatggcccattgatatgtagctccagcacttttcaagccgaaagtcatcgtaacccattcaaacaagtcgattgcaccaggacacctaaaagctgtcttatgtatatcttcttcagccatgaagatctgattgtatcctgcatttccatccataaaactcaatatcttgtgccctgaagcagcatcaaccagctgatcggctactgcattggatactcgtcctttggggtagctttgtttaaatccctgaaatcaacacacaccctgactttgccgtttttcttgataactggaattatactagaaacccacttggcatatcgacaaggacgaatgaaaccagcatcatataaacgtttaatcttagccttgacaggttcgagcatgtcggctttgcatcttctcggaggttgttggtgcggcctaaaccccggtttgataggtagccgatgttcaacaatcgatcggctgagccctgacatctcataatactcccaatcaacacaatctctgaattccttcaagagctctatcaacttggttctaaattctagagataagttcttactgataaatgtcggcctcgatcgatcacctggacctatgtcaatttcttccaaataatcggctgacatgaaaccctgtccttgcttgtcatcgagatcatctactgtgtccttggtgtagacgtttgaaccctccacaacgccctcaaaataataacttgggctctccatcttcaattggttgtatatcacaatcggacacatttagaaaatctccttcccaaacctttccagacaagcaatctaggccatccatctcccaaagagctaaatcagcactggcaacgttaactgacctgtcggctggtacaatttctatcttgtcgacttgccattgaatcaagcattgattcatggttgaaggaatacaacaattggcatgaatccaatctcttccaagcaacaagctgtaggaacccttcccatcgatgacaaaaaacgttgtagggatagtcttgctgccgactgttagctctacattcaaaactcctttggtttcggatggattgccaccaaagtctttgagcaccatgtttgtcttgatgagatcctcagcattcctgcccagcttcctaaacgtggcataaggcatcaaattcaccacggccccaccatcgaccatcatcttagacatcggcttcccattgacataaccgtttacataaaatggcttgagataccaattctctgtcccttttggcttctcaaaaactgcttgttctggtgataaaaccaacttagccgatgcttcctcaacctcatcaacatcggcttgtttgactccaaattctgcaggcagtgtgaaaaccatgttaaccgatgcagttacaacactattccctttagccaatctttttgcttcatcggctgtggcttcatcggctgtaggaacttgattcttaacgcgccactcctgctgcggcttcgttttcttcagccgatggttgatttcttgctcaacctcttccctgttcctcaacctttgaacccttctcttctgattctttgtaaaaataccagaaggacaccattaagtcttcctaccttcattgtcctcttggtcacgatcttgatttactgggcccaacctttgatgaacaggaacccttgcttgccttagccaattgcctttattatatgatcggcttgaacttcctgcaatattgctgtacctaggacaatcctcattggatggcagcctcataccttcattccaacagaatctaaagaactcacaaccccaatgaggatcaagaccgctatcatcttcctcataatacttttcctgatgctaatcatatttcctctgatacttattgataatcatagccgagttcatttgaaaacctcgagcttttcctccatcggctgttcgaccagctgtatgtaccatattgacaggaaaaggattgccatcaaccttcatcggcttattggaatcatcaaacttgattttgcctccctcaatagccgcctggatctgctgtctaaagactttacaatcattggtagaatgagatccagaattatgccacttgcaatatctcctcttgcctagctcctcagccgatggaattgtatgaccagcaggaagttgaatatgtttttcccgaagtaacaaatcaaagatcttatcagccttggtgatgtcaaagtcatacctctcttcttttccagaactcttcacccattggcatggtataaccttcttgctcctaacccacttggctgctgctacctcggaatcatcatcatcatcatcagatccatatatgtaggtaaccttttgtgcaagatgtgacaaactatcaaagtcctgngatgagaatttctccctgattggagctatcataccctaaaaagccaaatctgctaacatcagtcaagcttaagttgtagcacttattcctcatctctctaaacctctgaatgtagtcttgcacaggctcatcatgcctttgcctaatcgctgttaaatcagacaatttcatctcatgaaccccactataaaaatagctatgaaattcttctccaaatcggtcaactgttgattgatccatatggcaaagaagaaaaccaagtaaaagccgatccagacaaagactagggagacaacctaaccctcaaggcgtcgacagtcgatgctttaccacactgagctaagaatcggctagcatgttcataggttgagacactgtcttgccctgagaattttgaaaaatccggaaccttgaaccggctaggcaatggaaccctctcaaaccactcaggatatcgatgccgatacaagtttccagtgtcttttggcttgatcccaaattgctctctcatcacatctgcaatcatatcggcccatggttcctattgaggcaccccctgcacttgctgtggcacaggctcgaacgagttgtactgataagcgaattgaggctgagtcgatcctccttgttgatactgaacttgcggcgatggaggctgatactggtaattcaaattgcccccgtgataattctgaaagtttggctgtatattgcgcaccaaatgttcgggaataacttgaggtatcaccgattgatctggttgcacattatgaaccaaatgctctgggacaacttgatttgcagcgtgctgcctcggctgattgtcgggcgtcctgaacccagccgatgcatttaggaaaccttgctgctgaatcggctgagcaacttgctgcctcggtggcgtctgctgaatcggctgctgttgaactgggtcagcagtaggctgagttggtaaaaacatagctgcaacttgctcttgagttagccgattcacattttgtccactatgctgagactgctctctcaccaacaaccgaggattgattagttgacctggtgccgatgatggtccagcaggtgcaggagccgatactggtgctgttggctgagctgatggcacattgggagcaatcggttgagcagtcggttgattattagtgatcaagggccgatagtttgggaaaatacctcctggcaaataaaccggtcctgtagcctgatactcagctattgagccatcaaccatcgacttcaccatgtttgacaaggtattgactagtaccccagactgattcttggaagttgttaaattgtatatgtgcagtgttaccatctgggctgagatcctcatctttcactccctgagaacaatcacccttatcacctgagccatctgcagcacttttatcacctaattgagctgtagcatctgaaacctgttctacctccccatccttggaagaacttgtcctaggaacatcagcaactaatttcatcttatacctctaaacaattgttccttggcgggtctccatgaatgagttcaagaattggttctgtgtttctgcatcatcgcctcgagattattcttttgttcaagtgtcaatttgtctatagtgacgggcacgatgttgctttcatgaacttcggacccaccaagcttcgggatcctagatttgggaggaccctcttttgccagccgaagatggcgatgctggtggtttcttagcgatgagagaatgctattgcggttctgacttctaatctctcccactgggcgtgccaaaagcgtgttgacataaaaacatgaggcctgggagatctgcttaactccagttataaggttatgtctaagggagcatatatgttgcaagggcttgatggtgaagtctatgggcaagcgctcaatggcaagtatttgaagaaatattacccaagtgtttgagttaacgcatgatcggctagtattgccgatgcatgacagccgatgtgtttgcatcgccttgagatggccgatatggttatatcgcccttagttgtttttcatggtgtaatcggttgtggtttgccgatgtacaatggccgatatggttatattgcccatagttgtttttcatggtgtaatcggttgtggtttgccgatgtacaatggccgatattgttatatcgcccttcgttgttttataattttatcaatgcttttgtcattgtaaaattaggggggcacatatatatcaaaagcgtgttgacagaaaacacgaggcctgggagatctgcttaactctagtgcaggtccaaatctcgccttcgaatgtatgagcgtgccagttgatttgatcctgtaatcaacaagaaatagaagcaaagaaaccgcagttaaatctataaatgtagccgattggctaggtgccgatgatatatcatttatctttgagccgatgtcatatatgcatcgatcggtagtcattaataaataagaagggactaaatctactcgattggctgtagatattaacaatatataatcattattttgatatatacttaaatcaagtgattgggatagatcgatcgccatgccgagacaatataaatcacttagatcgaaatatatattaataatgagtctatatacgttcatagcataaccgatcagatagatctagcatgtatcggctaatactccgataccactctatattaagatatgaaagcaagtagaatatactaaacaaaagcctaatatactaaaatgcagcaagatcttaacgtaaagggcagatttaacatgtcaatcaagcatataggataaaaagtagttaaatcaggtaagatcggctgaaactccgatactaccctaatcagcaaccaaggagcgggctagagattgagattctaatcacgactcataagatcaaacttaactgatgcagctataagtatgaaaagaagaacaatgtctagacaatcaagccgttggatgtgtcatagagtggtagatatcctatataatctaagtcaacatcagtatttaacctaatcggctgccttctattgacggatgttagccgattgtaggttagatatcgatattgccaaggattatgtaggatatatgataactcgacgaattacataaacaagattagagtgtcataaagatggaagcactaatcctgagaactcaagccgccataacaagttttacctcttgttgaagatcgaaaccgatgcagctcaaccagaaagcaagaactcgtcgaaataaaactaaagcaaaaaggtggcgatgcgccgagattgtattgaacgtgtatgttaaaagttacatagggttcgggtctatttatacccgaaaatcacaagatatgtccataacggatacaactactatctctaacaaactctaagataccataagtctttgcggcagacttttgcccaagcatatctccaaggagattacataaatcatcctaattaatagatacaattgccttctcaggctctatccatgtgcggcaatcaccttaaagcgccttaattcaacccgatatcatacatcagtatgcattgtcggaatcggctgcattggcttacctagctcgactcagacccagccgatctggactccagccgattcctgttctgtttctgaactcgatctccgcctccgactttgtttcgatctaatcttctttcccaatgccgatattaccaaatttggttgttaacacatgccccccaagtccggaatatttgataatttttcggatttgctgtaaatcgactctgagcaagtttcgcactttgccgttttccgaccattactgccgtgctttaaatactaaccattaccttcgagaaatctcacaccgtcctcctccgttttcaccgctgaaaccaactttgccctctttcgctccggcgatctccccaatgcacaaggcgatccctaggcgatttcgttcccgactagatctccgctcggggcgatgtcgtcttccaccagcccttctaatgcaccatcgggcaagtacgctgaggtaagtcctcaccagctagatcccttttcctctcatgaaattgatttctccttttcttctcatgttttccgcatcccgattcctttggatttgcagcacctttccaacctagtcgcgattcctagcctttcacacaaaaaccactattttcttggcccattcggcaatctcgaccccactgatttcatcatcggtgaaaccaatcggatcccctttcgactagccaaccctaacctgggtcactggaagaatacattcaagtcttggccatctctcgaaaaacctactcctgataagagctggaccacctagtaccgacgcgtatcggctagtaagaaagttcactgggataaaattggaatcggccaagcagtcgctctcaccatagcaaattctgctaaggatgaacctctgatggctgccgccacctacttctggtccaacaccatcaatgctttcttattcaaccaaaggccattgactccaactttaatcgacatcaccatgattactggattagatgtaacttcatcggctaaccctatgagtatgaacaccaagaaccaattggacttcaagaccaaaagcataggtggctggtctggctatgtggcggcatatatgggccaagggtctgttacccctcgagagcatgtagctttcttgttcatgtggctggaaaagttcctcttctgtggatccagttgtggccctacaaccaactagcaatctgtagccgtagccttagaatcaaagaaagaatttcctttgggcaaaaatccttctgggctatgtgtaccagatgatgaacaatgcatcggctaaaatagccgttggctcaatagttggagcaggtggaccatggtggctgctgcaaacttggttaaacctgatagtcatgaacattgtcaatcgaccctctgtgacagaagctgaattcccattgccagagccgattgtggaagatgacggagaagagcgcacccatcgcagatgcatgtcatatggagaatatgcatccacatcaaccgatgctggagcgaagctatcggctgagctacaaaaggactggttctgcagcttctacgaaggttttaagaaagatgcacgaatctggtttccttatgaagactcagcagaccttgaacttccatcagactttagatttgaagacattaatcatcgaaaattccaaaaatccagagaaattcctatagctgcaatcagcccatgcatcctcccagtcggcattcaccaagggagaaacatccaagtctcctacgagttttatcacccaatgagcttggccagacgacttggattgggtcaactcccaatcggcttattctttgccgacaatattcagtgccgaggacaaatcgcatccactctaatgatggatcggctacttaacctaccaggaccccctctgggcagtattgataatattgagttggcaggatttagaagcaaaaattttgacagatggtggggtgaatggaagctgcatctatttcatcaatcggctgcaatgtatatgatagatctattcaataacgtcataccccaggtaaactttgtcattactaaattgcataaccagttagccgattcattacttgactaatctcttgctcctgttttgcaaacaacagagtcctcccctccacatcaaagtaatagtagcaagaacattgaatatgcttcaggtttaattctgaatggaggtggactatctcccactctccttcacggcctaactagggaaccagccgatgcaggcaagaaaaggaaaactagatcatcagccatgagtaacttagccttggctccaaagaaaaagaccaaattcaagaaaactcaaccacaaccaactgatatgtcgactgatgatctgcccgccttggatccatctattaaacaagctttagatgaagaagaaattggtgaagatgttgaccaagctgtagccaaaatgagtgacacagaaagaacaccatcggcttcacccaagcaaacgcctccaactccttctgcccccgttcattttacatgagtaagtacctctctttgacttcttctgaaattacctccctctttggctaattacccatagactttgtggttgcagaagaagaaaactgctgtgaagaaaaaaccagcagcaacaattgttaaatcggctccaccagtaagatgtccttaattcttttacttaaacaatctcaaccgattctatataacacttgtctatttcgcagcttcctcctccttctcctcctgtacagcaatcgtcaagtaatcagactccatcggctgtggggagtcatcacgtcgaagaggaagaacaaccagctgcttctgctatcccagtaagtttccctttgtctcaacaattagatcagctataatttacccagctcttattctttccgaaattgcctctgcaggctctagccgatctcttctcttttgacatcagagattaccttgatgaggcagaagaagacacttcaagcaaagcccaagctcccctatccgatgatgtgagaaaaacacttgaagacatcgctcatcggctagaagcctcttctttagacagtttggtagttgactgtgggtcaattaggacgcggctgcatgaagttcaagctctgattcccgaagatctggccgatgtcctaactccagccgcttatctcgagcaacatcagttcaagctggaaaaagccaagctaagactagccgaacgccatgagcgcaaagagattaaggccataatccaagcgaattggcagcttgtgcatgaagaaaaaaccaaacttgatcagctatctggaggtccaatcaaatccaatattgatcggctcgaagctcgcaagattgagctcttggcgcaacttgaagaatgcaatgccgagctagatatggaacacagaaatctagccgatctcccaaaatcaattgaagaacaaaaagcaaggctcaaatcggctatcaaaaatgttgctgacctaaccaagtccctgaaagtcatctctggaactgatgctcaagatgcccaagctattgtagaagtagaacaaattaggcaaaggcctattttggctatccagcgatacttgtctcaataacttttgtgtaataggactcagaaattttttgtaatcagctaagatgctctagtactttactgtcctgaaattcctttgtgccgattaatatgactttgaaattcgctaaaaaattttgcctcaaaaaatttgcattgcattttgatatatatgtgcccccctaattttacaatgacaaaagcatggataaaattataaaacaactaagggcgatataacaatatcggaaattatacatcggcaaaccacaaccgattacactatgaaaaacaactaagggcgatataaccatatcggccatctcaaggtgatgcaaacacatcggctgtcatgcatcggcaatactagccgatcatgcgttaacccaaacacttgggtaatatttcttcaaatacttgccattgagcgctcgcccataaacttcaccatcaaacccatgcaacatatatgctcccttagacacaaccttataaatttggaacagtccttcccaattcggcgaccacttgccgaatttactatcacgagtaccaatcggcaaaatcaatttccatataagttctccttccgaaaaatctttaggtaccactttcttattaaaatgccgagcaatacgttccttatccttggtaacctttgcaagggctcgcaatcgtcactgaaccagatcctccctctcatcggccataaggttgtaatactcataagctgttaaatcattttgtaattccgttcttcgagagccgattctaacctcccatggcaaaacagcctcatgcgcataaagaagtttgtaaggagggacttggatcgatccatgacaagccatcctataagaccacaacgcttcggccaaccgagtatgccattgccgaggataattagaaattgtccgcttaatcaatttgatcaaacttttattagacacctcggcttgcccattagcttgtgcataatatggtgaaaaattcaataatttgatacccatgctatcggtaaactgaacaaactcgtcagacacgaagattgacccctgatcagttgtaatagtttgtagaataccaaatcagtagattatatgttcatgaacgaattgaattgcatccacagaatcaactttcttcaaaggaatcgcctccacccacttggtgaaacaatcagtcgccaccaatataaacttatgtcctttactcgatggtgggtttatcataccgatcatatcaattccccaacctctgaatggccatggcttaagaataggattcatagtcgatgccggagctcgctgaattgccccaaacttctgacaatcttgacaccccctataatatctgtaacaatcctccagcattcttggccaaaaataccctgcacgccgaagtaaccacttcatcttatgagccgattgatgagtaccaaaatttcttcatgaacttcgctgactgcaactttagcctgatcggcagtcaaacacttaagtaacactccatcaatcgtccgataataaagctcatcatccaacagagtatactttaatgccttatatctcaatttcctagaagccgattgagacggattatgcaaatactgatgcacatcatacctccaatcatcggctgtcattgctgcaatttcaaccttaacatctttgatcatgagcttataccctgatgccccttgggccaaatcattagcttcaatattttgttctcgagagacatgctttaaagtaaccagccgaaactccttcattagttgttggcacttctcattataaaccatcaatgtatcattcttgcattcatactctcctgccaattgactgattactagcaaagaatcccccatgatttcaatggtatcggcttcaacttccttgagtaattgcaaccctttgagcactgcctcatactcagcttgattattagtcgcatacggtttaatggtataagcaaactcgaaacatgccccctaggggaatttctgagccgatattatcaaaatgcaatgcaaattttttgaggcaaattttttgagcgaatttcaaagtcatattaatcggcacaaaggattgtcaagacagtaaagtactagagcatcttagctgattacaaaaaatttctaagtcctattacacaaaagttattgagacaagtatcataggatagccaaaatagccctttgcctaatttgttctacttctacaatagcatgggcatcttgagcatcagttccagagatgactttcagggacttggttaggtcagcaacatttttgatagccgatttgagccttgctttttgttcttcaattgattttggaagatcggctagctttttgtgttccatatctagctcggcattgcattcttcaagttgcgccaagagctcaatcttgcgagcttcgagccgatcaatattggatttgattggaccttcagatagctaatcaagtttggtttttttttcatgcacaagctgccgattagcttggattgtggcctcaatctctttgtgctcacggcgttcggctagtcttagcttggctttttccagcttgaactgatgttgctcgagataagcggctggagttaggacatcagccagatcttcgggaatcagagcttgaacttcatgcagccgcgtcctaattgacccacagtcaactaccaaactgtctaaagaagaggcttctagccgatgagcgatgtcttcaagtgtttttctcacatcatcggataggggagcttgggctttgcttgaagtgtcttcttctgcctcatcaaggtaatctctgatgtcaaaagagaagagatcggctagagcctgcagaggcaatttcggaaagaataagagctgggtaaattatagctgatctaattgttgagacaaagggaaacttactgggatagcagaagcagctggttgttcttcctcttcgacgtgatgactccccacagccgatggagtctgattacttgacgattgctgtacaggaggagaaggaggaggaggctgcgaaatagacaagtgttatatagaatcggttgagattgattaagtaaaggaattaaggacatcttactggtggagccgatttaacaattgttgctgctggttttttcttcacagtagttttcttcttctgcaaccacaaagtctatgggtaattagccaaagagagaggtacttacttatgtaaaataaacgggggcagaaggagttggaggcgtttgcttgggtaaagccgatagtgttctttctgtgtcactcattttggctacagcttggtcaacatcttcaccaatttcttcttcatctaaagcttgtttaatagatggatccaaggcgggcagatcatcagtcgacatatcagttggttgtggttgagttttcttgaatttggtctttttctttggagccaaggctaaggtactcatggctgatgatctggttttccttttcttgcctgcatcggctggttccctagttaggccgtgaaggaaagttgaagtcttgggggcatggtagccgataaaagggggagatagtccacctccattcagaattaaacctgaagcatattcaatgttcctgcaactattactttgatgaggaggggaggactctgttgtctgcaaaacaggagcaagagattagtcaagtaatgaatcggctaactagttatgcaatttggtaatgacaaagtttacctggggtatgacgtcagggaatagatctgtcatatacattgaagccgattgataaaatagatgcatcttccatttaccccaccatctgtcaaagtttttgcttctaaatcctgccaactcaatattatcaatactgcccagagggggtcctggtaggttaagtagccgatccatcattagagtggatgtgatttgtcctcggcactgaatcttgtcggcaaagaataagccgattgggagttggcccaatccaagtgggtgataaaactcgtaggagacttggatgtttctcccatggtgaatgccgacagagaagatgcatgggctgattgcagctataagaatttctctggatttttggaatttttcatgattaatgtcttcaaatctaaagtctgatggaagttcaaggtctgctgagtcttcataaggaaaccagattcgtgcatctttcttaaaaccttcgtagaagctgcagaaccagtccttgagtagctcagccgatagcttcgctccagcatcggttggtgtggatgcatattctccatatgacatgcatctgcgatgggtgcgctcttctccgtcatcttccacaatcggctctggcaatgggaattcagcttttgtcacagagggccgattgacaaccttcatgactatcaggtttaaccaagtttgcagtagccaccatggtccacctgctccaactattgagccgacggctattttagcagatgcattgttcaatatctggtacagatagccgagaaggattttgcccaaaggaaattctttctttgattctaaggcttcagctacagagtgccagttggttgtagggccacaactggatccacaaaagaggaacttttccagccacatcagcaagaaagctacatgctctcgaggggtaacagacccttggcccatatatgccgccacatagccagaccagccacctatgcttttggtcttcaagtcaaattggttcttggtgttcatactcataggtttagccgatgaagttacatctaatccagtaatcatggtgatgtcgattaaagttggagtcatcggcccttggttgaataagaaagcattgatggcgttggaccagaagtaggtggcggcagccatcagaggttcatccttagcagaattggctatggtgaaagcgagtgcttggccgattccaatttcatcccagtgaactttcttactagccgatacgcgttggtaccaggtggtctagctcttatcaggagtaggtttttcgagagatggccaagacttgaatgtattcttccagtaacccaggttagggttggctagtctaaaggggatccgattggtttcaccgatgatgaaatcagtggggttgagattgccgattgggccaagaaaatagtggtttttgtgtgaaaggctaggaatcgcgactaggttggaaaggtgctgcaaatccaaaggaatcgggatgcggaaaacatgaggagaaaaggagaaatcgatttcatgcgaggaaaagggatctagctggtgaggacttacctcagcgtaccggccgatggtgcagtagaagggctggtggaagacgacatcgccgcgggcggagatctggtcgggaacgaaattgcctagggatcgccttgtgcgtcggtgagatcgctggagagaaagagggcaaagttggtttcagcggtgaaaatggaggaggacggtgtgagatttctcgagggtaatggttagtatttaaagcacggcagtaacggtcggaaaacatcaaagtgcgaaacttgctcagagtcgatttacagcaaatccgaaacattatcaaatattccggacttggggggcatgtgttaacaacgaaattttgtaatatcggcattgggaaagaagattagatcgaagcatagttggaggcggagatcgagttcagaaatagagcaggaatcggctggagtccagatcggctacgattaggatcggctgggtctgagtcgggctaggtaagccgatgcagccgattttgacaatgcaacctgatgtatgatatcgggttgaattaaggcgcttcgaggtgattgccgcacatggatagagtcctgagaaggcaattgtatctattaattaggatgttttatgtaatctccttggagatatgcttgggcaaaagtctgccgtacagacttatggtatcttagagtttcttagagatagtagtcgtgtccgttatggacatatcttgtgatttttgggtataaatagacccgagtcctatgttacttttaacacacacgttcaatacaatcccggcgcaacgctacctttttgctttagttttatttcgacgagttcttgctttcgggttgagctgcatcggtttcgatcttcaacaagaggtaaaacttgttatggcggcttgcgttcttgggattagtgcttccatctttatgacactctaatcttgtttatgtatttcgtcgagttatcatatatcctacataatccttggcaatatcgatatctaacctacaatcggccaacatccgtcaatagaaggcagccgattaggttaaataccaatgttgacttagattatataggatatctaccactctatgacacatccaatggcttgattgtctagatattgtccttcttttcatacttatagctgcatcagttaagtttgatcttatgagtcgtgattataatctcaatctctagcccgcttcttggttgctgattagggtagtatcggagtttcagccgatcttacctgatttaactactttttatcctatatgcttgattgacatgttaaatctgccctttacgttaagatcttgctgcatttaagtatattaggcttttgtttagtatattctacttgctttaatatcttaatatagagtggtatcggagtattagccgatacatgctagatctatctgatcggttatgctatgaacgtatatagtctcattattaatatatatttcgatctaagtgatttattctgtctcggcatggcgaccgatctatcccaatcacttgatttaagtatatatcgatataatgattatatattgttaatatctacagccaatcgagtagatttagtcccttcttatttattaatgactgccgatcgatgcatatatgacatcggctcaaagataaatgatatgtcatcggcacctagccgatcggctatcatttatagatttaactgcggtttctttgcttctatttcttgttgattacaggatcaaatcaactggcacgctcatacattcgaaggcgagctttggaccagcactggatttaagcagatctcccaggcctcgtgttttctgtcaacatgcttttgatatatatgtgcccccctaattttacaatgacaaaaacattgataaaattataaaacaactaagggtgatataacaatatcggctattgtacatcggcaaatgtcacgaccggaaataacccaacgggcgttccttatgtgtgtgcattattccttgtcccaggaggcaaggtacaccaaaagttgatacaattcagagtttgacaagcggaagcgtacatagttaatttattacatgggcagcgaaggcccagcacacaagaagacaaacgaaaaacagcggaagactagggcgacgaccacaggcgcttgacggcaggcacgagctagacacaaaagcctttatcttccaggggctcctcttctgggtttgggaaaaattgagcaagactgagtacaaccaccgtactcaacaagacaaaaccacaagtgcagaataaatgcaagggagtacaagggagccataatatagggggttagggtttgcagtaaactacactaaaagacacttagttgctcaaagctattttgtaaacacggtcctagagctatacaatattattaatcaaggccgtgaacccacacgaacctgccttaacccaaggcctacgatgattcagaccgaactggcaacccgaccctgggtcccagctcatcccaagccaacccaggccaaccattccacattttagttgttaagcaggttttaagaattaaaaacactaacttgggtacattgctcggcttgcccataaccgagggcgcggctattcgaataggttatactctaatcagaggtgtacatctttacccacaagacacatcttcctcacgtgtaaccacgtgccacataccaccatggtatacggacggaagacgtgacatagtttccaacccatcctagccatagacaagagtaccgacccaaccccacctacggccggaacccccgggacaggtaggcaggactaagcccctagcagcaggacaccggccctgtgccatgacatctcgactaccgggccgcagctcgtgtagccttcatttgtcctagagatgtccatcgacccccgacttcgtccatctccatccgtgtacttttgtttataaccagactgagccacaaactaagccttacccactagacatgtggaagtacggtagtgctttgcaagagaggcccgaagaccggtccttatatggccgaggtgctactatcaaaaccatgcaccccgagcccagcctaaaaccattttgagggttttgaatagaggggaggtgtgaatccaattccacaatgatccaacaattccatagtgtccaggtgatgagaatactcccaaagtctagagttgtaaaaccacctaatgttgcctaattaaccagcgaagcatctacctaaaagcatactagtggtaccatgagtagagtgtccactagttggggtttggtttaatctagggtgaacaaggtaataataacaataacaataataaggtcataacaaaggtaaataggcatggctagataaaacagtgataacgcgtgaatttaagtaaagcgataatgcaataatttaaatcaaaataattttataaactaggattcaatatgctcaaggatgatgtgacttgccttgctcgctttcccaaacgtcggcttcaacctccacgaagagcggatcttccgaagctgcagcatctacacgaccaacgaaaaagaaaaggcttttactctaataaactccatataacaagcaggaacaaagcacaaaaatgggttcttgacttcttaaggaaaaattagagacttgaacggtccaattccgagttcaaatggccaagttatggccatttgaagtttatatgctctttaaatgaatatttgcgaatttcttcatttaaattttaatttaaaaaggggtttattgcgtcagccaagggggaggggacgcgcggaccgggtccacgggagtggggcccacgcggcagcctcacggcccacagtggaccgggcgcacctgggctcgcaccagccggcgccgtgggtcccacgtgtcagccgcacccaagggcgcgggcggctgacggccgggccccacgcggcagccactcggcgcgcacgagggcggccacgctggcgcggtcggcgggaggcggcgcgcccgcgccccgatggtcgccgccggcgaccaccggcacggcggagcggcggccgagagaggggagggaagggggaaaggaggcgacggtccacggctcaccctaggtcgacggcggcgacggaggaggcggccggagtggagggaggcggcggcgcggctcgggtcgatggcgtcggcggcgctccggtggttggcgaccgaaacggagaggtgaacgaggttggcgaggatgcggtgaacccgaaggaggcggcgccgaggtgggaggcggtccggggagacgacggcggcggaccgaagctcggcggcgacggcggagagagagagtgacgtcgcgagctcaaatccggcgaggaggaagggcggcgagaggcagaaacggacgaaggaggtgcggggagggtttaaatagggttggaagagggagagagtggccggaggggaaggaaaccggcgtggcgctctcgggctccatcaatggcgccggcgggattaggggagggtttccaaacgaatccaagggagagagggatgcaaaattgggtggaatgggagaggggatcacggggagtgattccccccactttattgcacgcggggacggcgggaggcggcgggattcgcggcggcggcggcgctagggtgcgggggaggcggcgggagcggtgggagaaaggggatgacgggtgggccccacccgtcagcgagggtggcgggcgggcctgcccgtcagcggcgcgcgcgcagggagaggccgagtgggccgcggggagaggagagagagggggagggagatgggccgaattcggcccattagggtttttctttttataaaatcattttaactttgtttatttcttaataattattatttgtgctctgagaattccactaaaatttatttacacattttaggcttttaggaaatatacaaaaatcctctaagccttaattgacttttaggaaatttatttacacgttttgggacgtgacaaacctacccccgttaaacggaatctcgaccccgagattcggaagaactggcgaagagatcgggatgggctgactttagctcgtcttcacgttcccaagtagcttcttccttggcgtggttgctccattggaccttgcaaaaacggattacccggttcttggtcctgcgctccatggtgtccaagattttcactggtctctccacgtaggtcaagtcttcgcgaacttcaatttgctctgagtcggcctgctcggatggcactcgaagacatttcttgagttgcgacacatggaacacatcatgcacgttgcccaatgatgcgggcagctccaactggtaagcgacttctccgcgtcgagcaatgatacggaaaggacccacgaaccgaggtgcgagcttccctttcgtctgaaaccgacgtacgcctcgcaacggcgtgacccgaagatagacaaagtcatccactgcgaattccaggtcacggcgtcggttgtctgcataactcttctaccgagactgggccaactttagattctcccgaatggttctgactttcgcttcagcttctctcaagttatcagtcccgaacacttggctttccccaacttggtcccacaatagcggtgtccagcatttgcgtccatacaacgcttcatagggtgccatttgtatgctggcttggtagctgttattgtaggagaactcggcataggggagactcttatcccaggtcttcccgaaatctagaacacaagcacggagcatatcttctaggatcttatttagacgctcggtctgtccatctgtctgcgggtgatacgcggtgctgaaatttaatcgggtacccaactcttcttggagtttcttccaaaagtgagaggtgaactggtttccccgatcagatacaattttcttaggaacgccatggagactcacgatcctagcgaagtagagttcggctagtttgttccctccataggtggtcttcacaggaataaaccgagctaccttggttagtcggtccacaacaacccatatagaatcatatcctccttgggtttttggaagtccggtgatgaaatccatcccaatttcatcccatttccattctggtacttggagaggttggagaagtccggccggtcgctggtgctctgccttgacacactggcacacatcacaaagggccatgaactctgcaatttcccgcttcatactaacccaccagtatttccctttcaagtctaagtacatcttcgtactgctagggtggatggaataaggactttcgtgagcttcctgaagtatcaggtgtttaagttccttgtcgtccggaacgcatacacgatttccgttccatagggttccatgttcatcttctatgaaaccagcggctttacattgtttcatatttttgaggatcccatgcatatctggatcattcttctgagcctcacggattcgatcgagcaaggtaggcttggcttccagcgtagccaagaatccacgaccaactatgcttaggttcagggcatccatctgttgattaagttccggtggaatgccacggacgccaagagtgttgcaatggctttttcgacttagagcgtcggcgaccacgttggccttaccaggatgatagtggattcccacatcataatccttgatgagttctaaccatcttctctgccgaagattcagatccgactgagtgaagatgtatttcaaactcttatgatcagtacatatttcacagcaattcccaatgagatagtgccgccagatctttagagcatgaaccacagcggctaactccaaatcatgggtagggtagttgccttcatgaggccgaagctggcgtgtggcataggctaccacatgaccttcctgcattaatacgcaccccaatccttggcgcgaagcgtcacagtacaccaggaagtccttacgagtatccggtaagatcaacactggcgaggaaaccagcttttctttgagagtttggaacgctttctcgcattgtgggctccacacaaatttttcttctttcttcagcaactatgtcatgggtcgagcgattttggagaagttctcgatgaatcttcggtagtacccggccaaacccaaaaagctgcggacttgagtgactgtcttgggtcgcttccaatcagtgacggcggtcactgttttggggtccacagcaactcctttagcagatatcacgtgccctaagaatttgacttcggacaaccagaactcacacttgctaagcttggcatacaattgatgttcccgcaactttcccaacaccaaacggagatctctgattgcgagtacaccaggatgtcgtcgatgaagaccacaacaaacttatccaagtattccatgaacactttgttcactaaattcatgaagaaggcaggagcattagtcagaccgaacgacatcaccgtgaattcatacagcccatatcgcgtggtgaacgcggccttcgggatatcttcttcacgaataagcaattggtgatatccggagcgaagatcgatttttgaaaagacagtggcacctttaagctgatcgaacagatcatcgatccggggaagagggtacttgtttttgatagtaacttcattgagagctctgtagtcaacacacatcctctttgtcttgtccttcttttccacaaaaatcacgggagcaccctagggggaagtgctcggccgtatgtaccccttttcttttaactcttccaacagtttcttgacttcggccagttcatttgctgccatacggtagggtcgcttgtacagaggagtggttcctggagcaagatctatccggaacttaatctctcgcttgggcggcataccgggtagttcttccggaaacacatctccgaactcactgacgatcgggatttttgacagtcctatctgatgaagttcggaactgccgacagaggttgggggtgcaaagaaaacaaccggttgttccggccctcggtacagagtgacagtgcgtcttgcacaatccattactccttggaattgagccaatcaattcatcccaaggatcacatccaagttcttggtgtctagaagaatcagatccgagggaaaaggaattccctggatttctataggaacggcagggctataatactttgctgtcataacccctccaggggtggtgatgagcagagggttcctaagcctttctacccccaactgatttctccccacgaatggcacagatataaacgagtgggaagctccagagtcgaacaaaatggtagcagggatggaatgaatgaggaacgtaccaacgatgacgtctggagttgtcagcacatcctcggcagtcacgtggttcacccgaccccgaatgacatccttaccaccgttgttggggcggggaggcgcttggccttgctggcgcctcggctttgggtatttatccgcaaagtgcccgggctcgaagcagttgaagcacagacgctgctgaccttgaacgtttctgcggccttgtccaggctgcacggctgacgtaggagaacggggtgcatgggtcccttgctgactctgctgctgctgcggctgtgggacgcgcaccacgaattgaggttggggcgcggagcgaggttgctgctgctgttgctgctgctgcgaggaggatccccctggatagggattggtgtagcggatcctttggttagccccctgttggttgcggaaattcgccaggcgacgcttctgcgactccagttccttgtgtttggcttccaagcggatgctcttgtccaccaaacgctggaaattcggatagtccccggagactagacgcacggacagctcagggtccattcctgctaagaacttctcctgcttttcctcatcttcacgaacatcctccggggcgtaccgggccaggttgttaaactcatgcaaatactctatcacagagcagttgccttgcttcaactctcggaattcccttttctgaagggccatgacttcggcgggcacatgggtcctctggaaagcggcggtgaagcgggcccaagtaataggctgcccctctagctgcgtagcctgaaagtggtcccaccatagagatgcgggcccctgcagttggtgagcggcaaagatgactttctcctcatcgttgcactgcacggtgtctaactttttccccacggcatgcaaccaatccaaagcatccacggggttattggagctagagaaggtaggtggacggatgcggaggaactctgcgagtttagaatgttgcgggggtggtggtggaggtggagcattatgttgtgacggattttggatgtgatggaggaaggcagccatcatgttggcctgctgggcgaagatttgggtgagaatggagttggtgtctggtggtggtggtggaggcgggggaggaggtggaggtgggctgccatggttgttgtggttgctaccttcgggttggttgccatcaccggtagtagcacttctcctggttgtcaccatctgaaaatcccacacagacccggcaaacagagagagctgactattaaaactaatcacccacgactaccataattcttgaatttattactgctattaagttggttcactaaggttcaggttgcttaagcaaataaaataaagacaggctccgacacagttataccacacaccggtataaccatgccccacacgactcaagcagaaaaaccaacgagaagaacatacgcgcaagcctactaactgctcgtctacttctgtgacgggccagggcggaaggtgagcaacaacacatcctccgtgctaccaacgctagaggctccctcctcctgaggaaccaagggcgcgggcccggcacgaggggtctcgacgaagcaggtccacgccagggactgacgaaccagctcgggcctagaggtactcttgcgggcagtgatcttcaggctgcggcagacgcgacggcgcttggggcgacagacctctccctgggcgatcttgagctgacacagctgcgcctccactgcgtctaggtccttcttcagctgcagattctcctgtcgtagctccaggatcttcatgttgttctcgaccaacccacgacgcaccatctgatggaagtcgatacgagccgcgtcgtacgcctccaccatgcgcgccaggtgcatgatggtagcgtcatcctccgagctagcatccctgaaggtggcgtagtcacgggctcctccgcgacgagggcggtagtggtagggcgagtgctgcaactcgtccgggtagcgctggtgaagagtgccgatggtgaggagagcggcgttctggcaagcggcggagaaagaatctccacccgcggtgactgccaacgaagtcctctcgggtgagccagtgagaatcactgcagtgacctcccaagcagcgtggggctctgcatcgtcaccctcctattccgggagctgcttgccctggtagtccactccatgcagataccccaagacaacgcacatgccccgcagctccaaaacgaagccagtcaggtccagaccacgacggttgatgctgccggccatctacaaacaaaaaacaaaagagaaaagcaacattttaaagattagattatggtgataaatgaagtagcaggacagagagagactagaggattttcacaaataaaaaaggatttttatttcgaaaatattgctaaggcttgggatctaaggctcgttctagggtcaagggggctctgataccaacttgtcacgaccagaaataacccaacgggcgttccttacgtgcgtgcattattccttgtcccaggaggcaaggtacaccaaaagttgatacaattcagagtttaacaagcggaagcgtaaatagttaatttattacatgggcggcgaaggcccagcacacaagaagacgaacgaaaaacagcggaagactagggcgacgaccacaggcgcttgacggcaggcacgagctagacaccaaagccttcatcttccaggggctcctcttctgggtttgggaaaaattgagcaagactgagtacaaccaccgtactcaacaagacacacccacaagtgcagaataaatgcaagagagtacaagggagccataatatagggggttagggtttgcagtaaatagcactaaaagacacttagttgctcaaagctattttgtaaacacggtcctagagctatacaatattattaatcaagaccgtaaacccacacgaacctgccttaacccaaggcctatgaggattcagaccgaactggcaacccgaccctgggtcccagctcatcccaatccaacccaggctaaccattccacattttagttgttaagcaggttttaagaattaaaaacaataacttgggtacattgctcagcttgcccataaccgagggcacggctattcggatagattatactctgatcagaggtgtacaactttacccacaagacacatcttcctcacgtgtaaccacatgccacataccaccacggtatatggacggaagacgtgacatagtttccaacctatcctagccatagacaatagtaccgacccaaccccacctacggccggaacccccgggacaggtaggcaggactgagcccctagcagcaggacaccggtcctgtgccatgacatctcgactaccgggccgcagctcgtgtagccttcatttgtcctagagatgtccatcgacccccgacttcgtccatctccatccgtgtacttttgtttataaccagactgagccacaaactaagccttacccactagacatgtggaagtacggtagtgctttgcaacagaggcccgaagaccggtccttatatggccgaggtgctactatcaaaaccatgcaccccgagcccagcctaaaaccattttgagggttttgaatagagagaaggtgtgaatccaattccacaatgatccaacaattccatagtgtccaggtgatgagaatattcccaaagtctagagttgtaaaaccacctaatgttgcctaattaaccagcgaagcatctacctaaaatcatactagtggtaccatgagtagagtgtccactagttggggtttggtttaatctagggtgaacaaggtaataataacaataacaataataaggtcataacaaaggtaaataggcatggctagataaaacagtgataacgcgggaatttaagtaaagcgataatgcaataatttaaatcaaaataattttataaactgggattcaatatgctcaaggatgatgtgacttgccttgctcagagacaacggccttccgaaccttcggcgacgaccgcgaaccacgcttcgggaacctcaggaacgacagaagctacgcgaagcacacaagcaaagctacaaacctataaagaagcaataacaatacataaaaagaaagcacagggttctttaggttataacaaacgttaagagacttgaacgggtcgattcggagcttgtatgaccaagacatggttatccgaaatttaatgctgttatatggtgatttgcggattattgtaattatgttttacaactataaaacatgagcaagcgctagcctggaaaagacaggaaggctgcgccgttgacatgcggaccccacatgtcaacctaaaggaccacggtagaccgagtacacagagacggtccacgggtcgacggaagcggaccccgtgtgtcaactgaggcgagtggccgacaaacggactccactagacaccacgagggctgcacacgagcaaaccacgcggctaccgagcgcgcacacaaacacggtcaccacacgcacaagcgaacgactaccgacaccggtacacgggtaccggggtcgacaaccacacaacgggtacggggcgacaccgaaaggacgaggacggggcagcgagagaagagattcttaccaccacccgacgaggcgagggaacgacaacaacgaacgggcgcggcggagacggccgggaacgacggagacgaaaggcgaggggacgacttcggcggcgatccttggacgaaggcgagacgcggccggcccaacgcttgacgacgcggagccgaggacgaagacgacgacggggctgcagcggctcacttgacagaatgcggacgatgaacgcgaacggcttgacggagggacgaacgccacgacgatgaggatgacgaccgggaccggcgaggaggcaacgagggcagccggcggcagcttcatggagacgaggatggcgcggaacacgccgctgcgatgacgacgatggtggcggcgcagcgagacgacgagccggcgaggacgaacgaccgaccggaggagtcgtcgacgaggacgaacggagacgacgataacgaacaccggcggggttcggatggaggggaggcgaggccgagggcaaccttgacgctgtgatgccggaggtggagatggcgacgtcggccggcgcacgggcacagcggaagaggctgccgaaggcgacgtcgacaaggaggaaggagaggccggcgcgggcgacggcggtctccggacgaatcagagggtaggccggggtggaggtcgacgcggcgacgctgagggaggagacggcgcggccgacccacacctgagcggcacggcaggggcggctagaggcagtgggtggcggcaatgccaccggttgccggcggggacacgcctccggtggtttccccgtgaaacggaggtctgaccgggggagaggaggcggctgcgaggccgaacgcggcgacggcgcgaccggacggtgctcgggcgaggagggagaggcggctggaggccggttggcgccggagcgagagaaggagaaggcggggaaaggtggagaggccacgggagagcgcgggagggggctaagacgatagaacggagcgaggagattccgttttataggggaggagagggagccggccacgggagaggcggggaacggcggcggaattcatggccggcggccatggaaggtggccggggttggcgcgggcgttcccgacgattgggggctcgaatcaagggggaaattggggggaattgaagaggaaggaaaggggattaattccccctaattaatttggaatgagccggcttgaatggggcggatttggaggaggaacgtctctaggtttgcacgggagagagaagaggccgtgcgggaggaaggagacgaccgaggtgggacccacgcggcaaggcgcgcggtcagcgcgcgtgcggcgctcgtgcgcacgcggctagggcaggagggcgctgcggctcgggcaggggcattgcttgggccaggcggccggcccaggaggagaggagggagtggcggcctgggagagagagggaggaggagggagctgggccgagggggggaggggaagggcggcccaagagagagggagggaggctttgggccagacttggcccaaagggaggagggggatttatttttagtttttctttttagtaaactttgttaattgttgttgttgcttaagaaatattttcggtgctctgaaaattcaagtaaaatttgagggctcattttagaccaaggagaatttaacgaaaattctctaggccacattcgaatttttcttgtacgtattttagtgtttgccaatttcttttcgaattttaattaattatattattccttttagaaaatgatttttatttggggatgaatttattaggacgtgacataccacaaccatgagtacacaccgatccatcaaacaataaagtccatggcactatttcaaccgagccgactaagtcatcacgatgttccacaataaaatcagctattgcttgtccttaatcgccttcggcgactcatacagaagatcaaactcggttaaggaaaatatccactttccaacccttccttttaatttttgagccgatagcatgtacttgacaacgtcggccttgcatataacactacactcgttggacagtagataatgcctcaaccttggacacgaaaaatacaaacacacgcataacttctccacaggggaatatctagtttcagcatctaagagccgacgactgagatagaatacaacgcgttccttcccttccaacgcctgaatcaaagactgagccgattgacttctcaccggccgataaattcaacctaaacggtattcctttctgtggaggaatcaaaacaggaggagagctaagatattccttaatattatccaaagccttttgctgctctgccccccaagtaaactgctgatcggctttcaatctcaacaatggtgtaaaaggttctaaccttctagacaaattagaaataaaccttctaacaaaatttatcttgccgatcatctcttgtaattctgtcttattctctggaggctgaatcttcttaatcgcattaacactcctttgagttacctcgatccccctctcatgaacaagaaatcccagaaactggccagtcgatacaccaaaagcacattttgtcaaattcatcttcaggccatattttctggttctctcgaaaaccttcctcaaattagctatatggtcctctatttctttagacttaacaaccacatcattaatgtagacttcaaccaaccagccgattagatcatgatatatgtaattcatggctctttgatatgtagctccagcactcttcaagccgtaagtcatgacaacccattcaaataagccgattgcaccaggacacctaaaagctgtcttatgaatgtcttcttcggctataaaaatttgattgtatcctgcgtttccgtacataaaactcaaaatcttatgtcccgaagcagcatccactagttgatcggctattggcattgggtattcatctttcggggtggccttattcaaatttcggaaatcaatgcataccctgaccttgccgtttttcttgataacaggaactatactagaaacccactcagcatatcggcaaggacgaataaaaccagcatcatataatcttttaatcttagccttgaccggttcaagcatgtcggccttgcatctcctcggaggttgttgatgtggcctgacccttggtttgataggtagccgatgttcaacaatcgatcggctgaatccaggcatctcataatattcccaagcgaagcaatctctaaactcttttaagagctctatcagcttggttctaaacactggagataagttcttactaataaatgtcggccttagccgatcgcctggacctatgtctacttcttccaaatcatcggccgacatgaaaccttgatcttgcttgttatcgagatcatctaccgtgttcttagtgtagagatttgaaccctccacgatgccctcaaaataatagcttgggttctccatcttcaattggctgtatatcagaatcggacacttttagaaaatccccatcccagacttttccagatatacaatcaaggccatccatctcccaaagagctaaatcggcactggcaacattaactgacctgtcggctggcacgatctctattttgtcgccttgccactgaatcaaacattgatgcatagttgaaggaatgcaacaattggcgtgaatccaatcccttccaagcaacaagctgtaagaacctttcccatcgatgacaaaaaatatggcaggaatagtcttactgccgactgtcagctccacatttagaacacctttggttttggatagattgccaccaaaatctttgagcaccatgtttgtcttgatgagatcctcggcatttctacccaacttcctgaatgtagcatagggcatcaaatttaccgtggccccaccattaaccatcattttagacatcggcttcccattgacgtagccatttatatacaatggtttaagatgccgattctctgtcccctcgggtttctcgaacactgcctgttctggtgacagaaccaacttagccgattcctcttccacctcatcgacatcagcttgatcgatcccgaatttggctggcagggtaaagaccatgttaaccggtgccgtcacaacactcttcccttttgccaacctctttgcctcatcggctgcaacatcatcagctacaggaacttgattcttaacacgccactcctgccttggctttgctttctttagccgatgattaatttcttgttcaaccccctaaaggcgctccctgttcctcaatctttgaacccttctcttctgattcttcgtgaaaataccagaaggacaccattgattcttcctaatcacattgtccttgtcgatatgcttagtggccatgatcttgattaattggacccaatctttgatgaacagaaactctcatctgccttagccgattgctcctattatatgatcggccggagttctcgatgatatcactgcacccagggcagttttcaatagatgacaacctcataccttcattccagcagaatctaaagaactcacaaccccaatgaggatcaaaaccatcatcgtatttctcatgatgcttctcctgctgcttgtcatacttcttccgatatttcttgaaaatcttagccgaattcacctgaaaaccccttgcatgggccctatcggctgcttggccagctgtatgcaccatattaacaggaaaagggttaccatcgaccttcatcggctttttggaatcatcaaacctaatcttgcctccctcaatgaccacctgaatctgctgtctaaaaaccttgcaatcgttagtagaatgggacctagaattatgccatttgcaatacctctgtttgcctaattcctcagccgatggggttgtatgaccagcagtgtcacgaccggaaataacccaacgggcgttccttatgtgcgtgcattattccttgtcccaggaggcaaggtacaccaaaagttgatacaattcagagtttaacaagctgaagcgtaattaattaatttattacatgggcggcgaagacccagcacacaagaagacaaacgaaaaacagcagaagactagggcgacgaccacaggcgcttgacggcaggcacgagctagacaccaaagccttcatcatccaggggctcctcttctgggtttgggaaaaattgagcaagactgagtacaaccaccgtacttaacaagatacacccacaagtgcagaataaatgcaagggagtacaagggagccataatatagggggttagggtttgcagtaaacagcattaaaagtcactttgtaaacacggtcctagagctatacaatattattaaccaaggccgtaaacccacacgaacctgccttaacccaaggcctacgatgattcagaccgaactggcaacccgaccctgggtcctagctcgtcccaagccaacccaggctaaccattccacattttagctgttaggcaggttttaagaattaaaacactaacttgggtacattgctcagcttgcccataaccgagggcgcggctattcaaataggttatactctgataagaggtgtacatctttacccacaagacacatcttcctcacgtgtaaccacgtgccacataccaccacggtatacagacggaagacaggacatagtttccaacccatcctagccataaacaagagtaccgacccaaccccacctacggccggaacccccgggacaggtaggcaggactgagcccctagcagcaggacaccggccctgtgccatgacatctcgactaccgggccgcagctcgtgtagccttcatttgccctagagatgtccattgacccccgacttcgtccatctccatccgtgtacttttgtttataaccagactgagccacaaactaagccttacccactagacatgtggaactacgatagtgctttgcaacagaggcctgaagaccggtccttatatggccgaggtgctactatcaaaaccatgcaccccaagcccagcctaaaaccattttgagggttttgaatagagagggaggtgtaaatccaattccacaataatccaaccattccatagtgtccaggtgataagagtattcccaaagtctagagttgtaaaaccacctaatgttgccgaattaaccagtgaagcatctacctaaaatcatactagtgttaccataagtagagtgtccactagttggggttttgtttattctagggtgaacaaggaaataataacaataacaataataaggtcataacaaaagtgaataggcatggctagataaaacagtgataacgcgggaatttaaataaagcgataatgcaataatttaaatcaaaataattttataaactgggattcaatatgttcaaggatgatgtgacttgccttgctcactttcccaaacgtcggcttcaacctccacgaagagcggatcttccaaagctgcaacgtctacacgaccaacggaaaataaaagggcttttactctaataaactccatataacaagcaggaaaaaagcacaaaaatgggttcttgacttcttaaggaaaaaaaagagacttgaacggtccaattccgagttcaaatggccaagttatggccatttgaagtttatatgctctttaaatgaatatttgcgaatttcttcatttaaattttaatttaaaaagggtttatttcgtcagccgaggggaggggacgcgcggaccgggtccacgggcgtggggcccacgcggcagcctcacggtccacggtggatcgggcgcacccgggctcgcaccggccggcgccatgggccccacgcgtcagccgcacccgagggcacgggcggctgacggccgggccccacgcggcggccactcggcgcgcccgaaggcggccactcggcgcggccggcgggaggcggcgcccgcgcccctatggtcgccggcggcggccgagagaggggaagggaagggggaaaagaggcggcggtccacggctcactctaggtcgacggcaacgacaaaaaaggtggccggagcggaggaaggcggcggcgcggctcgggtcgacggggtcgacggcgttccggcggtcggcggactcggcgagggggtggacggggttgacggcggtgcggcgaagccggttgaggcgacgccggggcgggagacggtcccggcgagcggagaaggccagccggaggtcgtcggcgacggaggtcccggcgagagggcgacggcacgagctcgattccggcggggagtgggtgcggcaaggggcggaaacgggcgagggaggcacggggagggtttaaatagggttggaagggggagagagcggccggaggggaaggaaaccggcgcgggaggtccggccgccatcaatggcgccggcgagatttgcgggggcaaatctgcccgtttgaacacgagagagagagggaaaaatggggcgaaagggagaggggatcacagggagtatttccccccactttattgcacgcagggacggcgcgatgcggcggatttggcggcagcggcggcgcttggcgcgggcggagcggcgggagcggcgggagtggcgggaggacggggatgacgggtgggccccacccgtcagcgagggtggcgggcgggcccgcccgtcagcggcgcgcgcgcggggagggaggctgaataggccgcggggaagaggagacagagagggggggtggatagggagatgggccgagccagcccaagggagggaagggggacttttagggtttttctttttataaaacctttttaactttgtttattttttaataattattatttgtgctctgaaaattccactaaaatttatttacgcattttaggcttttaggaaatttacaaaaatcctctaagccttatttggcttttaactttgcacattttaattcttggaggctttcacacggattttaattattctaggcaacatttaagggatatattttagagtcgttttgggacgtgacaaacctaccccccttaaacggaacctcgaccccgagattcggaagaactggcgaagagatcgggatgggctgccttcagctcgtcttcacgctcccaagtagcttcttcctcggcgtggttgctccattggaccttgcaaaaacgaattacccggttcctggtcctgcgctccatggcgtccaggattttcaccggtctctccacgtaggtcaagtcttcgcgaacttcaatctgctctgagtcggcctgctcggacggcactcgaaggcatttcttgagttgcgacacaaggaacacatcatgcacgttgcccaaggaggcgggcaactccaactggtaagcgacttctccgcgtcgagcaatgatacggaaaggacccacaaaccgaggtgcgagcttccctttcgtctgaaaccggtgtatgcctcgcaacggtgcgacccggagatacacaaagtcatccactgcgaattccaggtcacggcgtcggttgtctgcataactcttctgccgagactgggccacctttagattctcccgaatggtcctgaccttcgcttcagcttctctcaagatatcggtcccgaacacttggctttccccaacttggtcccacaatagtggtgtccggcatttgcggccatacaatgcttcgtacggtgccatctgtatgttggcttggtagctgttattgtaggagaactcggcgtaagggagactcttatcccatgtcttcccaaaatctaggacacatgtgtgaagcatatcttctaggatctaatttagacgctcggtctgtccatttgtctgcgggtgatacgcggtgctgaaatttaagcgggtacccaactcttcttggagcttcttccagaaatgagaggtgaactggcgtccccgatcagatatacttttcttaggaacgccatggagacttacgatcctagcgaagtagagttcagctagtttgttccctccataggtggtcttcacgggaatgaaccgagctaccttggttagtcggtccacgactacccatatagagtcataaccgccttgggtttttggaagtccgatgatgaaatccatcccaatttcatcccatttccattctggtacttgtagaggttggagaagtccggccggccgttgatgctctgccttgacacgctggcacacatcacaaagggccacgaactctgcaatttcccgcttcatactaacccaccagtatttcccttttaagtctaagtacatcttcgtactgccagggtggatggaataaggactttcgtgagcttcctgaagtatcagctgtttaagttccttgtcgtccggaacgcatacaccatttccgttccatagggttccatgttcatcttctgtgaaaccagcggctttaccttgtttcatattcttgaggatcccatgcatatctggatcattcttttgagcctcgcagatttgatcgagcaaggtgggcttggcttccagcgtagccaagaatccacgaccaactatgcttaggttcagggcttccatctgttgatgaagttccggtggaatgccacggacgctaagagtgttgcaacggctttttcgactcagcgcgtctgcgaccacgttggccttaccagggtgatagtggatccccacatcataatccttgatgagctctaaccatcttctctgccaaagattcagatccgactgggtgaagatgtatttcaaactcttatgatcggtatatatttcgtagcgattcccaatgagataatgccgccagatttttagagcatgaaccacagcggccaactccaaatcatgggtagggtagttgccttcatgaggccgtagctggcgtgaggcataggctaccacatgaccttcctgcatgagcacgcaccccaatccttggcgcgaagcgtcacagtacaccatgaagtccttgcgagtatccggtaagattaaaactggcgaggaaaccagattttccttgagagtttggaacgccttctcgcattgcgggctccacacaaatttttcttctttcttgaacaactgtgtcatgggtcgagcgattttggagaagttctcgatgaacctccggtagtatcctgccaaacccaaaaagctgcgaacctgagtaactgtcttgggttgcttccaatcagtgacggcggtcactgtttcggggtccacagcaactcctttagcagatatcacgtgccctaagaatttgacttcggataaccagaactcacacttgctgagcttggcatacaattgatgttcccgcaactttcccaacaccagacagagatgctgttgatggtcttcctctgattgtgagtataccaggatgtcgtcgatgaagacaacaacaaacttatccaagtattccacgaacactttgttcattaagttcatgaagaaggcaggagcattggtcagcccgaacgacatcaccgtgaattcatacagtccataacacgtggtgaatgcggtcttcgggatatcttcttcacggatacgcaattggtgatatccggagagaagatcaatcttggagaataccgtggcacctttaagctgatcgaacagatcatcaatccggggaagagggtacttgtttttgatagtaacttcattgagagctctgtaatcaacgcacatcctctttgtcttgtctttcttctccacaaaaatcacaggagcaccccagggggaagtgctcggccgtatgtaccccttttcttttaactcttccaacagtttcttgacttcggccagttcatttgctaccatacggtagggtcggttgtacagaggagtggttcctacagcaagatctatccggaactcaatctctcgcttgggcagcataccgggtagttcttccggaaacacatctccgaactcactgactatggggatttctgacagtcctatctgatgaagttctaaactaccgacagaggttgggggtgcaaagaaaacaaccggttgttccggccctcggtacagagtgacagtgcgtcttgcgcaatccactactccttggaattgagccaaccaattcatcccaaggatcacatgcaagttcttggtgtctagaagaatcagatccgaaggaaaaggaattccctggatttctataggaacggcagggctataatactttgctgtcataacccctccaggggtggtgatgagcagagggttcctaagcctttctacccccaactgatttctccccacgaatggcacagatataaacgagtgggaagctccagagtcgaacaaaatggtaccagggatggaatgaatgaggaacgtacccacgatgacgtctggagttgtcagcacatcctcggcagtcacgtggttcacatgaccccgaatgacatccttaccactgttgttggggcggggaggcgcttggccttgctggcgcctcggctttgggcatttatccgcaaagtgcaataatttaaaacagtgataacgcgggaatttaaataaagcgataatgcaataatttaaatcaaaataattttataaactgggattcaatatgttcaaggatgatgtgacttgccttgctcactttcccaaatgtcggcttcaacctccacgaagagcggatcttccgaagctgcaacgtctacacgaccaacagaaaataaaagggcttttactctaataaactccatataacaagcaggaacaaagcaccaaaatgggttcttgacttcttaacgaaaaaaaagagacttgaacggtccaattccgagttcaaatggccaagttatggccatttgaagtttatatgctctttaaatgaatatttgcgaatttcttcatttaaattttaatttaaaaaaggggtttattgcgtcagccgagggggagggggcgcgcggaccgggtccacgggggtggggcccacgcggcagcctcacggtccacggtggaccggttgcacccgggctcacaccggccggcgccgtgggccccacacgtcagccacacctgagggcacgggcggctgacggccgggccccacgcggcagccactcggcgcgcccgagggcggccacgccggcgtggtcagcaggaggcggcgtgcccgctccccgatggtcgccggcggcgaccaccggcgcggcggagcgacggccgagagaggggagggaagggggaaaggaggcgatggtccacggctcaccccggggcgacggcggcgacggaggaggcggccggagcggagggaggcagtggcgcggctcgggtcgactggtacggcggtgctccggcggtcggcgaccaaaacggaaaggtggacgagatcggcgaggatgcggcgaagccgaaggagacggcgccgagctgggaggcggtccggggcgatgacagcggcggaccggagctcggcggcgacggcggagagagagagcgacgtcgcgagctcaaatccggcgaggaggaagggcggcgagaggcggaaacggacggaggaggtgcggggagggtttaaatagggttggaagggggagagagcggccggaggggaaggaaaccggcgcggcgctctcgggctccatcaatggtgccggcgggattaggggagggtttccaaacgaatccaagggagagagggagggaaaattggggggaaagggagaggggatcacggggagtgattccccccactttattgcacgcgaggacggcgggaggtggcgggattcgcggcggcggcggcgctagggcgcgtgggaggcggcgggagcggcgggaggaaggggatgacgggtgggccctacccgtcagggagggtggcgggcgggcccgcccgtcagcggcgcgcactgggagggaggccgaatgggccgcgggggagaggagagagagagggggagggagatgggccgaattcggcccattagagagaaggagggattttagggtttttctttttataaaatcattttaactttgtttatttcttaataattattatttgtgctctgaaaattccactaaaatttatttacacattttaggcttttaggaaatatacaaaaatcctctaagccttatttgacttttaactttgcacattttaattgttggaggctttcacacggattttaattattctaggcataatttagaggatatattttagggtcgttttgggacgtgacacatattcctaatgcttataatgatgtttctaggggatatcctcccgatacaagacaaggccaatataatcatattgcgccacaaacacaacctattaggccaccaaacccaccgccaaatcaacaagggcctaataacatggaggatatgattagtgatattatgaggaatagattcgggattgaaactagaaatcgtgctagaacttacaaaaagtcatatcctgattattatgataatgtgctgtttcctcgaaattatagagttcccaaatttgccaagtatagtggtgaggatggtaagaccacatgggagcatgtaggtcaatttttggcgcaatgtggtgaggctaatagtgatacttttaaattgcgcttgttttctttatctttatccggtaatgctttcacatggtttacttctttaccagcaaattctattcatacttgggctcaattagaagaacaatttcatgattatttctatactagagaaactgagcttaggttatgtgatttgacatcggttatgcaaaagtataatgaatctgtcattgattatattaagagatttagagatgttagaaaccgatgttatactttgaatataactgatagagatttggctggtcttgcttttaatggtttagttgctcctcttagagaaagactagatggccaacaatttcttgatgttagtcaactcatgcaaagggctctggctcaagaaagccgggttaaggataatagaaaacttgctagaccatttgataaaaagcctaatgttaatgtggttgattacccttaagctaatgatagtgaggaagagggtgatcatgatatttatgttgccgaatggtcatggactaacaaaaataaaacttttgtttgttctaacctaatcccgactcctcgcaaagatcggcaaagtgaggttaaatatagttttgatgtggccaagtgtgataagattttttattatcttttgcaagagaaacaaattagattacctaaaggccatgtcataccttctcaagaagagttgaaatgtcgagcatattgtaagtggcatgattctcattctcactctactaatgattgcaatgtgtttcgacgacaggttcaatcggccatagatgaaggacgattgaagttcaccgatggctccaagatgaagcttgatcatgatcattttccggtgaatacaattaatttcaatgataagaaggtgttgattcggccggagcaagccgaatctactaaggggaaggaagtggtcattggtgaaccaaggtccaagatgatagtgctaaagaagccggaggttggcgtttggaaagagaataggagtggagcttcaacttctaaagcccctaggaagaccaaggtgacttttaatatgcttttggagaaatatgaaaagcaaggtggtgagaaaattcgcaacaaagggaaaagaccaagatcacctcctaaggagcgatttggtcattcaccaagacggtcgcgttcaccttcgtatcattatccacaagatatgtcatggggttcctatccaatgccgccgtcgggttatccttatccttgcttcatgccatgggggccgacgccgccaatgttcaatcatatgcctcctatgcaattcaaccaagggaggggaggaccacggaggccaattcatgagcgtttgtcttcaccaaacaatagccgattttatggtaagaatcgggctaatgaagaaaagtgggaaggaaagcgcgtcaaggtggaggagaggacttcggaggtgattactatcaaagtggggtctcatgatgtgccaataccttctggagatggagttggagtgtccccaaacaagaaatccgaagccggtaccagttcttcgcagtcggccggtctgaccgcagccatacggctggtctgaccgggccatcaggccggtctgaccgccgacccgacagcggttcggccgatgcctcaggccggtttgaccgctcgccacatgttggtctgaccagcgcgtctggccggtctgaccggtggtctacggccggtctagccgggctccagcttcggtttgatgagagggctgcaaagggcgatgtgagggcttcatcgtcttcaagcaaagttaataaagggcattatttacctcctggaatagagccgaatcctaggtggatgcctaaggatttgacggctacacaaaagagaaggttgcaacgtcttcgggcccaagaaataagagagaaaaaggccgaagagcaaagagataaaaggtttaacgagttgcgaccaccaccggtatggaggcctaagtccatagagaaggaaaaaccggttgatataaatgagaaggaagaacaatcggttgacaaaggtgaatcatctccaaaagaagacatggatatcaacatggtgtgtatgttgcctatggagttttgtgctatggatgaagctgaggttgctcaattctcattcggtcctaaagatgcggtttttgagaagcccgatgagtcaaaccgtcacatgaagcctctttatctcaaaggccatgttgatgggaagccggtctctaggatgctagtagatggaggtgctgccgtgaatttgatgccatactcattattcaagaagttgaggcgtgaggatgatgagttgaagaagaccaacatgattctcaatggcttgaatggtgaaccaacggaggcaaggggtatcttttcggcggagctcaccgtgggaaataagacgctaccaaccgctttcttcatcgtcgatgtgcaaggtaactacaatgttattttgggtcgttgttggatccatgccaattgttgtgtaccttctaccttgcatcaatgtttaattcaatgggacggcgatgatgttgagattgttcaagcggatacatcggccgaggttgcaatggctgatgctacttttgagtggcatcataggaatatccaatgcttatcggggagggatctttctagttaggattttattagtatctccgatggcaaatttgtacctatctctataaagccggctagtgtagcacggctaagccatataaatttgtataatgagtaaagaggctaatttagagtggttacaaaggagggtgtaagaatatcggtctacaaagaacgatattggcgaaaccgttgaggattttgatgaagtagagaagcttagaaaagggtttacatcggccgatcctttggaagaagtagacataggtgatggaactaagccaaggccgacttttgtaaacaaaaatatgagagctgattataaggttaagataatcgagctacttaaagaatatgttgattgctttgcatgggagtaccatgagatgccgggtcttagccgtgagcttgttgagcatcggcttccaattaaaccaggttttaggccttataagcaaccacctcgtcattttaatcctttgctatatgactgagtcaaagaggagattgatcggttgttgaaggcgaggtttattaggccatgtcgttatgcagagtgggtatctagcatagtcccggtggaaaagaaggggagtgataagattagagtttgcatagattttagagatttaaataaagctactcccaaagatgaatatcctatgcctatagccgacatgatgattaatgatgcctcgggtcataaggtgattagttttttagatggcaataccggctacaatcaaatctttatggcggaagaggatatgtacaagacggcttttaggtgcccgggatttgttggtttgtttgagtgggttgtcatgactttcgggttaaagaatgccggtgcaacatatcaaagggcaatgaatttgatctttcatgatttgttaggtattgtcctggagatctacattgatgatattgttgttaaatcggatggtatggaaggacatgtagccaatttgaggttagctattgagaggatgcgccggtatggtttgaagatgaacccacttaaatgtgcttttggtgtgtcggcggggaagttcttaggattcatggtgcatgagagaggagttgagattgatcctaagaagatagaaaagattcatgatttcaaagcgccgacatgcaagaaggaggtccaaaagttgctaggtaaagtgaattatttgagaaggtttatttctaacctagcgggtaaaatcgatgcttttgttcctatacttcgcttgaaaaaagaagccgattttacttggggggcaaaacaacaagaggcgtttgaagagttgaagagatatttgtctactccacccgttgtgcgagcgcctaaagccggaaagccttttcggttatatattgcttccgaagacaaagtcattggtgccattttgacgcaagaggaggatggcaaggagtatatcattacatatttgagccgccgccttttagatgccgaaacaaggtatgtctttatagagagactttgtctatgcttatactatgcttgtaccaaattgaggcattatttgttatctagcacatgcatagttacttgtcaagccgatgttattaaacacatattgcaaaggccaattctaagtgggagaattggtaagtgggcatatgctttgatagaatatgatttggcttatgaaccattgaaatctatgaaaggccaaattgtatgtgattttatagtagaccatcatatagatattgcttatgagggagaggtttgcttaattgaagttataccttggaagatttattttgatggttcttcttgcaaagaaggtcaaggcataggggtagttttgttttcacctaatggcatgtgttatgaagcatcggttcgtttgaagtattattgtacaaacaatcaggccgaatacaatgctttattgttcggcttacaagttatggagatggttggagctaaatacgtggaggcttttggtgattcggaattggtggtgcaacaactcgccggagtctacaaatgcttggacggatcactaaataggtacctcgattcatgtttggatattattgtcaattttgataattttgctattacacatattgcttggcgtgataattctagagcaaatggcttggcacaacaagcatctggctataatgtgaagaagggattattttttatattagaagagtcggtgcttgattttaaatctttatgcgaaattggcaaaactggagaccaggggcggtctgaccggccgcatgccgccggtctgaccggcgaccccgagcggtctgactggccctgtgtggtcggtctgaccgggtttggacagagcgccggggggcacgtttcaatcaatttggaagccgaattaattgtgaattcggacatttgtgcccaggtgacagaagaagattggagaattcctttgattcaatatttgaaggatcccacacttaaggttgatcggaaaattcggcggcaatcgttcaaatacacattgcttgatggtgtcttgttgaagtgcttagatgaagatcaatctaaagtggctatgggggaggtacatgaaggaatttgtggaactcatcaatcggcccacaagatgaattggttgcttagaagagcgggattctattggccgaggatgattgatgattgcttcaaatattatagaggatgtgaggcttgtcaacggttcggcaatgttcaattggcgcccgccgccgtgttgaatcccataatcaaaccatggccattccgagggtgggctttagatttcgttggtcaaatttatccttcattatcaaaggggcataagttcgtgctagttgctacggattacttcactaagtgggccgaagccgtgcctttgaagaatatgactcatacggaggtaattgactttattttgaagcatattattcatagattcggtattccgcaaacattaactacggaccaaggtgcttcttttatgtcttaggaagtgaagagttttaccgaatcttatagtattaaattgttgagttcttctccttactacgcttaggctaatggacaagccgagtcgagtaataagacattgttgaagctagtaaaaaagaagattgaggaacacccaaagaggtggcatgaggtgctttccgaagcattgtgggcgcataggatatctaaacatggtgccactaaagtcactccttttgagttagtttatggtaaagaagccgttttatcggttgaggtaaatcttggttctcttcgttatatcaagcaagatgatttgtcaagtgaagattacaagacgttgatgggagataatcttgatgaagtcatcgacaagcgcttgagggcattggaggagatagagaaagagaagaagagggtggccaaggcatacaacaaaagggtgaaaggaaagttgtttcaagttggagacttggtttggaagacaatttttcctttgggtactcgatccaaggagttcggtaagtggtctcctagttgggagggtccttatcgagtatgcggcattgttcgagggaacgcgtattttttggagacacttcaaggggagcgttttcagcgagcaatcaacgggaaatacttgaagcaatacttcccgagcgtttggcaagacgcttaggaggtactatggccggtaattagattatcgtcctaagaccaaaaacatgttctatgcttttagattcacgttgttcatcaaaaaggcaggggggcatgtgtttatacccaaatttggcacctaggattaaaataggaaagattgccaaaatttggaagtctgccggtttcctccgagtgggccggtctgaccgccgtgtgttgggcggtcagaccgccggttgagggctggtcagaccggcggtgtgtggccagtctgaccggcagggccgagtccgattctgtttcatcgggtctcgaggtttctttgctcgggaaggcatgtttcgggtttcctttggcttctatcccgagttggacgtggaggagggcctgtagagggcaagaccaacccctatataagggacatggccggttcattgtaaaaaagccaatctactatcaatcgatcgaattgtttttttatattgcttttagttttctcttagtttgtccatctttgtcgggttgcgccataaaccgtccgccgtcgctgtgagagtgcgacagctctttgtaggtttgtcctgaaaaccttccgttttgcccacgagacgggtagttatctagaaatcggctccgctagccggtttagttatcaaaacccatctaggtttagctctttgctagatcgaggtggttggcgactctaggatcaccgcaaggcttaaggtgctgcgatcgtgcttgtcaacttgtcacaaaaagttgccaacaccgtcggctgagatgttggtgcagcggaggaaaccgcctgagttgatggctgaacatcggtaatcaaagaccgataatttggaaagacacctccttgcaaataaaccgggcctgcagcctgatgctcagctattgaaccatcggctatggacttcatcatgtttgataaggtattgactaacaccccagattgattgatcaaagcatgatgcacagcgtagtcaacccgatcttggaaattactgaaaaaatcttgtgccgcatcactattctgattatgatttcctccttgcaacccctgagcaccatcaccttgcactccatgcaccccgtcaccttgcactccatggactccttgagaattgtcaccttgatttcctagagagctgtcgatagcacttttgttactcagctgagccgagccgtctggagcttgttttccatctccatccttagaagaactggtccctggatcatcagcaaccacttctattttgtacttctaaacaagtgtccccttgcgggtctgcatgaatgagttcaagaactgatcccgtgcttgctgcaacattgcttcaaactctatcttctgctcaggtgtgaatttttctggatcgatcggcacgacgtttccttcattgacgtcagtcaaccctaatttcagcaccttttccttaacagagcctgggctagctggggatggtggtggtggttgtttctcggccatgaggacgaattgttggctgacttcttaaatgtcccaccgggcgtgccaaaagcgtgttgacagaaaacacgaggcctgggagatttacttaactctagtacaggtccaaatctcaccttcgaatgtatgagcatgccagttgatttgatcctgtaatcaacaagaaatagaagcaaagaaaccgcagttaaatctataaataatagccgatcggctaggtgccgatgtcatatatacattgatcggcagtcattaagaaataagaagggactaaatctactcgattggctgtagatattaacaatatataatcattatatcgatatatacttaaatcaagtgattgggatagatcggtcgctatgccgagacagtataaatcacatagatcgaaatatatattaataatgagactatatacgtttatagcatagccgatcagatagatctagcatgtatcggctaatactccgatatcactctatattaagatattaaagcgagtagaatatactaaacaaaagcctaatatacttaaatgcagcaagatcttaacgtaaagggcagatttaacatgtcaatcaaacatataggataaaaagtagttaaatcaggtaagatcagctgaaactccgatactaccctaatcagcaaccaagaagcgggctagagattgagattctaatcacgactcataagatcatacttaactgatgcagctataagtatgaaaagaagaacaatgtctagacaatcaagccgttggatgtgtcatagagtggtagatatcctatataatctaagtcaacatcggtgtttaacctagtcggctgccttctattgacggatgttagccgattgtaggttagatatcgatattgccaaggattatgtaggatatatgataactcgacgaattacataaacaagattagagtgtcataaagatggaaacactaatcccgagaacgcaagccaccataacaagtttgacctcttggtgaagatcgaaaccgatgcagctcaacccgaaagcaagaactcgtcaaaataaaactaaagcaaaaaggtggcgatgcgccgagattgtattgaacgtgtgtgttaaaagttacatagggctcgggtatatttatacccgaaaatcacaagatatgtcctaacggacacaactactatctctaagaaactctaagataccataagtctttgcggcagacttttgcccaagcatatctccaaggagattacataaaacatcctaattaatagatacaattgccttctcaggactctatccatgtgcggcaatcaccttgaagcgccttaattcaacccgatatcatacatcaggttgcattgtcggaatcggctgcatcggcttacctagcccgactcagacccagccgatccaatttgtagccgatctggactccagccgattcctgctctgtttccgaactcgatctccgcctccgactttgcatcgatctaatcttctttcccaatgccgatattaccaaatttggttgttaacagataccactctatattaacatattaaagcaagtaaaatataccaaacgaaagcctaatatacttaaatgctacaagatcttaacataaagggcagatttaacatgtcaatcaagcacataagataaaagtagttaaatcaggtaagatcggctgaaaccccgatgctaccctaatcggcaaccaaaagcaggctagagattgagattctaatcacgactcataagatcagactcaactgatgcagctataagtataaaaagaaggacaatatctagacaatcaagccgttggatgtttcatagagtggtagatatcctatataatctaagtcaacattggtatttaacctagtcggctgccttctattaacagacgttagccgattgtaggttagatggcgatattgccggagattatataagatatatgataactcgacgaattacataaacaagattagagtatcatgaagatggaagcactaatcccgagaacgcaaggcgccataacaagttttacctcttgttgaagatcgaaatcgatgcaactcaacctgaaagcaagaactcgtcgaaacaaaacgaaagtaaaagggtggcgatgcgccgagattgtattgaatgtgtattagtttgattacatggggctcggggtctatttatacccgagatttacaaaatatgtacacatcggacacgactcttatctctaacaaactctatgataccataagtctttgcggcagacttttgcccaaacatatctgtaaggaaattacgtaaaatatcctaattaatagatacaattgtcttctcaggattctatccatgcgtggcaatcatcatgaagcttattaactcaacccgacaatgtattctttgtcatattgtaggattcggctcaatcggctaaccctgtccaactcggactctactaatcctgatcaaagccgattcggactcttgccgattcttgctctgtttcctaaaagatcttggatttagattctgcttcgatctgatctctatctttgatactcagattatgaaatttggtcgttaacacaagtcaagcccaaggggcatcgcctcaaagccaactgccgcaattcgacccaagcaccgcggtccaagcacccatgaccttcgcacaagccgtgccctctggctacggagcggtcccactaccaaatcaagtttggaaccaagtcgtgttcgacccagctatggtgatgcaagctgctccgactgaccaacaaaaccagccaatggtgtttggcacggggcatcaatcaacagctgctgctcaacctcatttgcgcccccgtacccgcagctaagctggccttctcagcaaggcgtcatgatcaagtcggatggcgaaaagggtttgccgttgagttgggggatcaagaatcatcccatcccaccccagttcaagttccctcatgtcccaaggtattcgggagaaacggatccgaaggagttcctctccatctatgagtccacaatcgaagctgcccatggtgacgagaatacaaaggcgaaggtaattcacctcgctcttgatggcattgctcgatcttggtatattaatttgcctactagtagcatttactcatgggagcaattgcgcaatgtctttgttcttaactttcgaggcacttatgaggagccgaaaacacaataaggtcttctcggcattagccagaggccaggagaatcgacaagggaatacgtgcgccgcttctcgcaagcacggtgccaagtgcaagacataacagaagcctctgtcatcaacgctacttcgaccggcctacttaagggcgaactcactaggaagatcgcccgcaaggaaccaaggatgctcgaacacctctttcgcataatcgatggttatgcatgaggcgaaaaagataccaagcggcggcaagagatacaagccgaatatgacaaaacagccgcagccgagacggccaccgcgcaagctcacgcacaagctcaaattcaagcccaagttactagttcggcacccgttctgattcactcaacccctccggtgaatcaagggcagcctttaaggccgaaccatgccccgatgacatggaaaaatttagaactgatcgagctggcaaagcagtgatggcaggagaagaagtgcaagcccttcgcaaggagttcgacgctcagcaagcgggcggccagcaacaaccttttcgcaaaaagatcaggaaagacctatactacgccgttcatggacactcttcgcacacaaccgagcaatgccggaacattcggcagcaaggcaacactcaagagctcaggcagcagcaagccagggctgaagaggcaacgcgcgaagcggtcctcaaccaagcacctcaggctgaacagcgccaagatgcacagtgaagagtgatctaggtcatcacaagatcttatccccccctcgcaagtgtcgaaacgacaaaaaaagatgcaacttcgagcagtgcatagtattgtttcggcaggcgaaggggtcccaagatacttgacgcaacagatatccttcagaccgaaggatgctgaaggagtccttttcccacaccaggatcggttggtgcagagatggttggtattgaagttcggcatatcttgatttatggaggcagttcggctgatgtcatcttcgccggaacatatgccaagatgggtttgccgacactggcattgtcccaagcaccaacctcgctcagggggtttggaggcgaagtagtgcaagttttgggtcaagcccacctcaaagtcaccttcggcacacaagaaaacaagagagaagaagagatactcttcgacattgttgacatcccatacaattacaacgccatcttcggctgaggcactttgaccaagtttgaagcagtctcttatcacaactacctcaagctcaagatgcctagcccagccggtgtggtagttgtcaagggttcccatccttcggctaccatggtggccttatagatcgccatgtgggccacccggcacggcacggcccaggcccggtcgtgcctgggccaaggcttgtcgagccgacacggcccgaccgacgcaccgggccatgccgtgccagcccacgtgccgcactcacggcctaggcacggcccaacacgcctggggccgtgccgggccggcccgaaggcacgatggcccatagtgcttttcctcagaataagtctaattttcctccctcctattgggctgtgacatatatatagctaaaaaaagtctattttacctcccttttctttgggttgtgatatcaatagctaaaataagtctatttaaggtccctattctttggacagtgacatttatatgtttatttttagtccctatactttgtgtggcatgcctggcctgccggcccatcatgccaggccggcctgaccgtgccgggccagcccagcgtgccggaggggaggcccagacacggcccggcggtcgggccaggctggcacgggcccgacccaagtcaagccgtgcggtgcttgggccgggccaaaaagccgtgccatgggccgggccttcgggcctcgggccttatggccatctataggtggcctccttcgacaggggagttcataccttagaagtcgaacggcaagaaagaaccaggccgacgctgaaacccgtccccacggcaaggttgtctggttgcagatagatgactctgaccccgccaaaatcatatcactcggcggagacctgagtgaacaagaagtgaatagcatcctgatcgtgctcaaaaaaacattgatatc

SEQ ID NO: 6429 - DNA, 53324 bp, Oryza sativa
catcactgaattgagggtttgcatattgatttgctagaattagggtattttgtgagggataagggaccgagtgcataaatttaataccaacaaaaggtgtaaccaaaactggcaagacattgatcaagccagtaaaactgaaatttcagttaaacaggtgggtttctgccatcttagaataagggggtcaatgtggaagggaaggccagaagctcaatgtgcctggtcgtacagatgcacactctatagccttggcatgcgtcttggacaattttaagcaatgtatgctttatcatctcaaagttgatgatttctagtaatgctgattgggtgaaggagttacatgggtggagagagctcctggaggtctgcgaggttgagaaagaacatgagcatgggacttgtcatggttgtggttgggacgggaccaaacaggtttttgtggctggcccagccaagcattagtcaacatgcatgcccagcccttgaaattaaactgtagatgagaacttgttaattgtgaatttgaagaatgtgagccagtgatgcacttagctgtagatcattgtgctggagatttggtttccagcgcattccatttacaactaccaaatggctgaatcttcgatgtttgtttgaaatttaaattcaaggatatcgttgttttgacggctcaaacttcaaagtaaacgtttgctgctcattggatgctggttataagtgactagctggatcttccaaaattatcttacaacggtaaacttggatcgtgtagttaagaaatctgatgttcgttatattgcttattgtaactgggatttgcgtattgggttaattaagcgaagctatagtgtgtttaattgtgtgggacacttggagaagaacaaaaagcttctgtttctgttcctcttgattggtacaaggattgttcttgtattggaattgaactaagaaattatctgtgattgctttcttgtagttgtgatctgaatctttcctttgctaatgcaatttttgtgcactcaatatgtggtcaataaatcttatttctagtgtattcagagaataaaacaaaggacttatgtatctgctctttctgatgatagataattcttttatcagtattgcattttagattttaggttgagacattgcccggaacttttcttttgcctatttctgagctcttatgacctctttggcattgtaattgtcatgtgatcctcctaatgatgttttttttttccttttgctacaatggattgtcttcatgtattcgacgtgcatgcaataggcaagaacacatatcatcatgttacttgcgattttgcctttctgccacatttcttaaatcttgactttaaagtttgacagaggagagctaattttaacaagatttcaccttgtccttgcagatgtattatgttaaccaggaacttactgttgaggatttcctttatgatgataattacaagatgtatcttcctggatacaattcagatgttctcaataatctggaaagtactggtcagctggaatatccacagttcaatttgccacaagagttaccccctaatgcatatcttgatacgagtaactgtggacaaaatgctggagatgttttcctccacatgtcagacttgctcaatacaatgtctccagtacctgctgcattcctgaggcccaaatgcgctctcttggactgccctcggcctgctcaaggatcagaaaggtggcaagattattgcagcatgtatcatgctgatttggccgtgaaggaagagggtccaccaggcacaatgcctgtgatccgtccaagaggtatcgatttaaaagatggccctctgtttgctgccctcagtgcaaaaatccaaggaaagcatgttggtattcctgtctgtgaaggggctgcaactgcgaagtccccatggaatgcacctggtaagttattgctacataactcctcccattgtattggcatggacaagtgtttgaattaatcgctggttcatttctatcattgcagaactttttgatctgtacatttttgagggtgaatctattagagagtggctgttctttgacaagccaagacgagcatttgagagtggaaatcgaaagcaaaggtcattgccagattacaatggccgtggttggcatgaatcaaggaagcaagtgatgaaagactttgggggtctgaagaggtcctattacatggatccacaaccatctaacagctatgaatggcacctctatgagtatgagatcaatgattgtgatgcttttgccctatacaggcttgaattcaagtcctctgatgcaaagaaaactgctaaatcaaaattagcttgtaacccactgaatgaaatccagcagcaaatggttaggctgagtgcagatagccctgtcgaaaacaaacggtctgcccgcagcaggacaaaggctaacccaaatgatatcaatagcaacatctacttagttcagaacactacagttcaaggcagtattccaaatgcttatcaggcagtgtcacaaccggaccagatgacgtatttgaatggcaatgttgtttatgggcctcatctcccatacggttactcaactgaaagaagtgacttctattggagctcaaatgatggagcttgaagaagggtaaccatattttatcaacggcatatttggccttcaagttctaacagctccagctatacttatggggtctaatcttattggcatggcccccatcattctaattgtcatgggttgcatcaacatggaacctcttcgaaaatgcctgcgctgcagtcgtatttgtgcacaataacttcgacaatgtaatatagcctagtgtcttgacatagcatctcccttggtgcagagcatatgtaacataaattgccaggtttgctagacttgtaaccttttatgtgggtctatcagctatttgatggacccgtttatttgtgacgctgtatatgcatgaggctgttctgaatctgggagcaatgttggtggcctttgaaggcactaacctgttgataaaattgtgttctctatgattgaaccccaattacatgcttgagatgaaagcatcttgtagcaatattcagctggttcgttatctgttctgctatgctgtcgatggctaccaccatttttgctacagcaacgagactactggtacaacataagttgatagaacagcagatgcctaaactgatgaaagttgtcgattgaagtggcatggagccatcaatggttcgttctttgatgtctggtctggtcccaactgtctatctctgaaagagaagttattcctttgctgtccagctcctgacaagcctcccaagattccgatgggaccattatgttgccaatgaaaatagcgtcactggatgctcgttgatcgtgaatagaggctttatcgttccgtgaaaatgacaaatatctgatgatatatcggtacacatcagggattcagggtccatttcttatgaatggaggaagagtcattatttcgataaacttgattctaacatacacatctcccttaatttcctaatcttgggctgtgtaatagacgggaagatcttacgaataagacctcttttagactcctttggaacacatgaattgagaaaaaaaataagaacgagaaaaaaaaatcataaattggacgtcatgatatacacaatcttgtaggtattgaaatcgcattgaaattaaacatatgtttgaatattccacaagaaattgaataaattttaggggaaaatattattagaataaagttaagaggagagataaagtgccttctacttttctaaggaaataaacacaaagaggtttgagctcatatgtttgaaatctaaaaaaatgagggaaaaatgattccaaataaagtttgctagtccaatatttcgatgggggcccttattggttgcccatattttctaataagttgtttaatagcttattattgaataaaagtcaataaaagtttgtttacaggtaggatttgatatatgtgttcttttagcgacttaaaagccaatgctgaaaacaaaactacgttgaaaatatcttaaaattaactccaaaattaagtttaaatttttaaattttagctttggtttttggcttattagggcaaccaatgaggctttgagttatttgcaaatccaattctttaaagaaaactaaaaataaggggtttaggcccctttgattcaaagtaaattcatagaaattttagagcatttcattcctataggaatttttcctacaaagccctttgaatcaaaggaatgaatcctatggaatcctatgaaattcctatggaatgccttttcccatacaagttttagaggaaatttaacaagaggtaaaacctcatggaaaaaatcctttgagtctttatctcacctcaaaatcctgtgtttttcctgtggtccaatcaaacggttattcctatgtttttcctgtgttttgcaatcctctgttttacacttatattcctatcagaatcctatgttttttctattcctctgttttttcattcctgtgatttaaatgggccttttaaattctacaagaatcatatagaatagcgatcatatcctcgtcattccaacaccaaaggcagagagctacaatgctccatgccattaactatttgcctatttccagccgttggatcaaacatgggagcactagatcaaccgctacaatagtctacagtaaaccaaaacataacaaaccaacattattttagggtagctatggtaaagtactgtagcatacctcatattttaatgttcaattctaccgttcggcccctaatggctaacgatgtgaatctgcttctaccattcgccccttaatagcttagaataagtgacctaaataaatagtacaggaaagtttttgagaaaaaaaacatatttttagaagcgtgtagcaaataatcctcgataataattcaaccaataaatttaaaaagggctaaccatgtcatgaaaaagtagtattccttaacactcactcactcctttgaattagggtatttatgtgatgtccctaacaaaatgaatttctagctctcagaaaaataaaaacgtgagctagaaactcgagccttgatgttggccaaccacatccaaatccatatgtgatgtccctaaccttcttcaactctggagcgacgagagagtggtgataactacaacgagcgacagctagcgggcaagacgaggaacggatgatggcaacctccttcaactacggcagacgatggaatgacggtggtggcgaaggcgcgacagcctatggacaatacgtggagtaggcgacaacaacctcctttaactctgatttgacaagggaacaacgatgacgacagggcgcaacagctggttggcaagacgaggagcgagtgacagcaacctccttcaacaacgcacgatgatggaacgaaggcaacgacaaggcacgacagtcagcggcaagacaagaagggtatagtgatggcctcctctagctcgtgcgtcactgatctccactaacttctagagcgctgcaaccttctcaagccgcgacacggtggccgggaatggatgaaagacagggacgactgccgacgagcatttctaacattggaggcaagaagaagagtgaagagtgtagtgttcaggatggtattttagtttagatagtctgactgaagttgatattttagcaaagcccataaaactaataggattttaacaatttaggggctatttgattgatggccataagttgccacactttgccacacttgaggttaggcaagtttgaccatgttagatgagtgtttggttggcttccacaagtgtggtaagatttctattttgtaatctagatcccacatgtaagtgactctaaaaaatgtggcatggtttcattttgttggctagagtgtagtttggattttgatggcctcacctttggtaaatttagctaagaaagtatgataaatctagtcaatattagtacgtaaaccaaacagctcctaagcttatataatggtgtactacaagtgcaatttttttggggaatggttaccagtacgtacggtgcacgcactcgcgcagtcggtcgcgtcgcacccgattctcagcagcaccaccaccggtctccatttcctccccagattttctcgttcctcagcccccaccgccctgtaaaaagcggccgcggcggcagtagggtttcggattcccaccccgcgtgcagcttaggcgaaccctcctccctccgttccacacgccccagttccccgctctctccccctcacctcctcatcctcctcctccgctgccgccgccgccttcgccatgggcagggggaagttcaagggcaagcccaccggccgccgcaacttctccacccccgaggagatcggtaccgacgtcgcgccctttcctattttcgattcggccctgtttcgttttcactgagaaatctggtgccagccgtcagccgccgccgccgccggcatgggcgggctgctcgatctgatgctgcggcgggggggttcgggtttcgctaggctgggatgtgctcgtagaacacgagcggctgtgaatttgacttgaacgcgatgcatagagcgctttttttttgtgatgctgtacgggttagcatacaattcgatggtgtttgatggtttgggtcgtggaggagggagtgactcgttgatctaacatgggtcttagcttcggtgtttatgttgcctgattttgatgctcatgtagtcaggcacttatctgcatctttagatgcttggctctatcccatgatgcagtagtacagctcgattctgtttcttcgttttgatttattagttttataaattccagttcactgtttcagatcttcacggaataagggtttgtgtggagtttaaacgcagtgagaaatcgattgcacctctgtctttatctagtctcagacaaaggaactctgttgagactgtatacaggagtgcaataatatttttaagttcttgatgtacaattgaagaccatttctttttagtttgtgcttctggattttgatttcgtttttgatatcctgctaagtgcaatatatatatttttacttgcttctgatcatcttttccattcaaataactgcagctgctggtacttcaggtcgtccacgcacatttaagaaggttcgtccacatttctaccatgtgtcgctcctagatgaaccagaaaaaaaaaacttttttgtcagttacacggtttaggataatattaaactaaactattttgcttttggcatttcgtatttcaccgtgaacaatcattgtctgaatggataagaagaacaactatttcattggttagttttgtttgttgtcaaagcatctgttccagtgcaaagaatagcacatctaatcgcttgtatttatttatttatttatattctgggcgtttccagtatccacatggatgaatgttgttaatccgcagtaatgaaatcaagagcattgcaattgcaaatgtttactcaattatttgcaccaaaccttggtttgtttcaacactaccttgtcatattcgttctaatgaatgaactgagtatcaaatagaatttagctgaggaggaaaaggaggaggaagaagacgacatagaagaatctgaagaggaagaatctgaagatgagtctgaagggaaggctgtaagtaatcttactctctgcaagtatatgttcatagttcagttccttttcttacctatctgacatgttgtgcaacaattccagaaacataaaggaactgaaggtcttattcagattgaaaacccgaacttagtgaaagcaaagaatataaaagccaaggaagttgatgtaagttggtgactactgataatattttggactatattttctgttttcccccttgatcttcatactatttgatagttacgtctgaatctttttgttcatgtgtaccaattagtatatttttcatgcgtttgtccaacttactttgcattttacagctcggaaagacaactgagctctcgaggcgtgaaaggtaccttttcttatttcagtccatgcattgtgtttagctgttcaggaaaattttaaggtacaatacttcaaatatgtttgaattatagagaggagatcgagaaacagaaagctcatgagcgctatatgaagcttcaggagcaaggaaaaacagaacaagctaggaaagatttgggtgagaattcttatctatattatgtccacctcttcccttcttttggtgttccttgttggttgtagttacttatgtatttatatcgcatgcgacctatgagcgttcattaaatctggttcagtatacctatagaaacagacactgtaacaaaggaaaatagcttaacatgctagcatgatgtacaaaatttagtatcagtaacaatggataaatcagggccctttaacccagttgatatctttaatcagatataaacatcagtgggtttagatttgacatcttactggacattggatagtactgattcagtaccgatactagcattatactaaaaaaacaagttatatgtggacaaatcctacaattcttgcatatttttcagccgacttcactgatcttatggatgaagtttttgcgtcttgtttaatgatttttaaccaaaaatcttcttgtattctttctgaacttcgacctgaaaatttactaatgcaatcctcttagatgtctcacaatggtgcaaatgttttccttttactcttcaagataattgtctttctagaacaaagaagattctattttatatgtgagacgcacatctaccatttaatgtcagattcagtcagaactgtccatttgacattattatatatctttgtagaattggcattgtatattttttttgggtgcgttcaatattgaagaattacctgtgaattgccaacagccatgaccctttataattttgcaaatgcagaacgtcttgctttaataagacaacaaagagctgatgctgcaaagaaacgtgaagaggagaaagctggtacatctcccttgctatttgtatattgcttcatggttttggttttcttgtgtcattcagaattggttgcagacatatcatatatgaaaacatattgtttgatcatagcatcatggagtgtatattcaattgcttgtgaaattttgatgcctttgtttactagttttgataacattatgggtgcattttgcaggtaactaagtgtttagcactgagatgaagtgatgctcattttacacattcagttagtaacatgttttcttagattgcaatatgtatactgatgttaattttattcttggcagccaaagaacagaggaaggctgaagcacgcaaataactgcggcaaccatgtggacaatgaaggcgtgagctgcgtcggctggatatttatttcttatatatatgcccctagtatcttttaaactcggtctcgatttcgatatttccataaaattatgcattgactaactgtagtattgtcgacgtggcttgatgtaaacttgagcttggcagggtgcatatgtagtatgatcagtttatgcaaaatttgcgtttacttacgttgatatataaatcaagaacgttgtgaatactggagataatccatggtcatgctgcttaacattaagataacctagctatcttctttaggagaaaaataagactaatcatcattgagaacctgaaatttctcaattatgcccaacatcaagaagtcagctagtgtccatacattttgggctttgatctttgacaaggcaagacctgtaggtcgtagattcatactgagggggttgatcgtaggctcgttgcagtcactccatgctttcattcaaagatcgtaggctcgtagcagtcacttcaagctttcactcaaaattgcctatgcgcaagctgaagtagtgacatcctgtgattgctgattttgaatgatatgtagcgtcgtgcacttctggagttcttcatgggaattaatgagatataaaattaaaaccagatgactgattgattgacatgagaaagcaagcaaaaaaagaaaagaaaagaaaaaaaaagtaaggactcctttgaaacacaaatgcaaacagaaacataaggataggaaaatcgtagtatttaagtgccatgtcaccttaaatttatagatggaaaaacacatgaaaacaatagaaatgatcgttttgatagagtgcgggaaaaacacgggaatcagaaggaaaatgatcgtttggatggagcacagtaaaaacacatgaatgaagaaaaatggatgcaaatgaattttttaaagaggtagaacctcatgttaggaagtctccaatatttcagaatcctctaaaattttctatgtttggaggcaatcctgatgaatttggtgaggccatttctatatttcaaatgaattcttttcataggaatccaaccctccaaaattcctttgctcgaaaggagccttacataaaatttggttgcgattaattgagaaaagtaagtagataggagtatattttatgacaatttgaactccataaatagctactccctctgtttcaaaataaaatacaagcatttcacatttgatgacgcttaccttagttctaagagaatacatacttatcacatcaatcttcttttttttcttcaatttccctccacctccaccaagtattttctcctcaaccttattccaccgtctcttatttaatatgcgacacaaaagtcgtttctcctcaaccttattcactgctataacaacttggaaatacttatattaatattatgtaatagtaagaatattttaaaaaggggaagggagtatgttgtgtattaaaaaaataaatttcacaaagtcatatatattttaaccaaactattacaaaattacatatttaaatcagtgtatcacaaaactatagaattaacaatacagttattacgaaattatagatttaagacaaagtattgtaaaattgcatatacaaacttatctaaagcttgaatctaactttagtgccaagggtttaaattttaaaatatatagttttgtgataacaatcaataatattgtatgttttgtgataacaatcaatattgcaccagtagtttcatgatatttggtattaaatctaaatctatagttttgtgaaaaaatggtgctaaatactccctccgtcccataatataagggattttaagtttgtgattgcaatgtttgaccactcgtcttagaaaaaaattgtgcaaatataaaaaacgaaaagttgtgcttaaagtattttggataataaaacaagtaaaaaaaactaaataataattctaaattttttttgaataagacgagtgatcaaagagtgcaaacaaaaacgcaaaatcccttatattatgggacggagggagtatacagttttgcaatataatgtcttacatcataggtagatcaaactatatgtagttttgtaaaatttagctaaaaaaactaggaaactctacaaactcatgtcaacctgtcaacgattttatatctcagaaaaatatacgacgtaccaacgagcggtttcatgatttcatcagaaagcgaaatgttcgaatatacggcattacgtgtaaaacaatgctcatgacgaccttctgtacttctgtcttagttcatgcatcatagcgtttcaaatgatttcctttcatctctcagtaacacatgcccatacaaatgtgaacaaaaacaaccagcatcaaaagagactatagctgtcattttttcagcactcaactagaaaagaatactatgaccttcaagggcaatatctatggtcgttccaacaattactgtaaaaaggctatcaaaaggtataatcgccttccagaggtaatccatgttaccagcccacccaccctgttctgtatttctgttatagcagtagctccaatcacgggcttattcgttcttagcatgccgtgaatcattatcatcccacggctgaataaaattttcatgctgggtcatggtgaggaacgctggcagcacttgaaaaagctatccgccaacctatacataaataggatgcatctgcgccttttggattattatagactaatgtagcagcactcacaaaacttcgtttagtgtcactgaagcttcaatccattggtttgtttttcatcatcttacgtttcgtggcatccagatatttcttccgaagccgaatgaccttgggagtaacctgatgaagctcaaatgtcaatatgaaactccaggagcaaactggaataggagttggaacagttaagcttaaatcaagcaagaagattattttcttttggtaaaagattgggagtaatattccacaaaataagattattttcttaggataatctgcacttctaataaacaaaaaaaagctagcagcatgtagagtaacttaaatttggatttgaatgtggactaacatgcatatattgtagcatgcattttgttttgtaggctgcattcctacattccaacccatgcacagagaacacatctctaatttagatttctgataatcctttacaaatgctagtagcaaactatatagcagaaactgcaggtggatgcttattgattgctttctttgtttggttcttaatattgtttgtaacatgccattgtattatatggtagaaataacaatgcacccattcattagcctgcagaatctccgtctggcagaggatttttttctgaaatgtaagtggttttatacattggcaatagtcgtcaacaagtcatttcaaaatccaaaaaaaaaaccaggattttttttttatttctagagctaaaagtaacaagccaaaaaagaatcggaataagaatcgggaaaaatggaaagctcatctctatgcgctgcttgtgccacttagtcctcacacaagtacaagtagaatcatcaatagcaaatacagaaaacttgcctcaataagctcatctgcagcaacatatccaattgcctcttccaaactcatctgcatgattcagtgcctttagttaagattatgtaacaatcatttccgaggaagctaaaggaaggaagcaaatgacatttttcagcaaagaatgcacataatctagatttatggtctcctcagttcccaaaacccaagggagagtgtgacgcgaatattataaagcttgcaaggcttccgttggtattaagttgttaactagtgtttaaagcagcaccatttagtctgtagggtgataaagtgatatctcctgaatgctgatgtcttggtaaaagttaaaacacaacataccaatcgtggtggagaaagcctgacattttcatcctttcctggagctcgaatgtttgtaagttctttagttctcacaggattgatctgaacaacagaagagttatttagtttgtgtattagaagagaaacctaattcattgataagcatataatcaacttacatcaagatcactgtcacgtgagtgctctccaacaatcatgccttcgtacgccttaaagaaaggagaaagaaagaggaataaggaaaccccctactcttagatggtagatcatagtaacaaaatgaataaatgtcgatacctccatcccaggagaaacaaacagaataccacgagcttctaaactcataagtgcatgtgaagtgataagtcccttgccgacagatacctacatatacacataagagcacttacatttgtcatgttgagttgagcagaataaggtgcagttcatcaaatcctgcttacatttaatgacatattccttcttttatttcatttgcttaattcttggtttaaaaattcattgctgtctattattgcaaaataatgtaaaacttgtttggtatgaagacagataagagtaaacagaagaaattatgaaactgaaggaattggcattaccagaactccttttctaacattgcccagctgacctctgtatttagcatatgctgcaatcatagagaaaccaaggtcaaatactctcaataaaatctagttggtggcatcaatggcgtggtttacttcaaaaaaatgcataggcgagttaaggaaatcatctaggacttaataagaaatagcataccctggaaagcgcgatgcataaacccagttccacgtgtaaagctgctgaatattcctttgaatcccaccaaacccctgcatacataatgcatcatttcgtatcataaaaaattgagaaccagactgaaatacatggcaaaagacaatcgagtccaaaattggcatcaactataatatgcttttgaaggtgacacatcatgcagctggtaattatatgcactaatcacctagatgggcaggtcaaaaagatccgagttctcccagttgtccctggaacagggcccatgtccattacttcacccttcctgtgtgtcagggtttccatgacaaatccaacatgctcctcgtctacctacaatatgttcaaacattaacagtttatgaatacaagtttagaacaaagtaaacaactaaaaacaaagaagttcaaacaaggttccatatttctacctcaacagttacttcttcaataggctctaacctttctccacggtctgttctatacctatttcaattaatacataaattagttaatagtgggaacagtgctgccaaattgctcagatacagagttcgatatcagtggaaagtgtatttccacagaacagggaatataactacttcagggtgaaacaaagtaatagaacaaaatatctagctacaaacggttagcttctctaatactgttggaaagaaaattgaactaaagaacttcaggctgaagtgaaaacgtaagcatacaaagagtataatatgtggaatattggtgctcacatcacttttgggggtgaaactgaaagctcaaatccttcgcggcgcatattctcaatcaagattcctggaagttatgcagatcatcaaatgctatagttggcaggaaacttttcattatattgtacacgaggttgacgtatgaagtgctctcaaataaatcaagaaaaaaaagcagttaaatagcatatatcagaaaaagaagggatttcatcagtggtacatatacttacctaactgaagttctccccttccttgaacttcataagattctgataatggtccaggaagaacattaattgccaggttcgtttctgcttctgccattaggcggttgcctattttcgctccagttagctacaaaattttagatggacctcagaaaaagagggcagctattattgcttgatttattgaatacaaatttatattactatagcaccatacagattggtaattaggctctttccagactatgtgtagtcagcataggcaacctatgaagttgatttagaatagctgtggttggatctatctatgtcattcaaacaaaggagatcgaacgctggtgtgttttacttagaggcaccaaggcttccatactttgcatcgttatatcctaatttaaatttgaccgcaccattcctcagaaacaaatgacataaaacttcacattaaataaaagtatgtacatactgcccaaaaaccagcctggatagcattgcaaaaacacctaggaggctagtaccataccttggatttagacctccaagactaatggtgttagcttcttagtccttactctcacctaccaatttaaaacttcattcagaggactagctccaccgatagatttaggaaaacctatgcgctagtaactgaattcagatgattaaaaatgtatggtatgtttgccttctgattattttgacaggaaaattatgatctagtagtatcatgctcagcaagtcaacatttgatatctacccattatttgtagttcaagacttcaagtagtgactatgaacaagatctagtgatacaagttatattgcagtgagcaaatgttatattctctttttcttaaaaaggaaaaggtaaaataactaatatatttcagtctgcaacaaattttcagatccaatatgaattaactagttccttaaattttagaatcctgcatatgacatccccaaatccagagcaacatagtgcgtggaagttataacaccatctgattatcatggttccattaacatattagcagctcctacaggaatctgaaatctatcttaaaacaataacctaactttaagcaaaaaaacaaaataggaacatgaaaagcaaaataagaacactttgatgtataggaaaacaaaacaaatatgcatgaattttcatcaaaagcaaaaaggacaatgaaaacaatatgaggaataaataggaacactttgatgtctaggttaattgtttgctacttacatgagtgccatcgcggccagacagtggtgaatcattcacaccaaaagtcatagatattgtgggagggtccaactcaattgtaggaagggcagtcaaaatctatattgtacaaccattattagtacaaggaatatctgacaatagaaacacgttcagcagcacgaattagcaacctacatctgaatttgacacagtatgcccaattgctggagcagccaatccagccattgaaattatgtcgccagctcctgcagcctctactattaccatacttgttcctttctttttcatgagcttgacaacctgaatttgtttcagtagtttgcaaaggtccttaaggcatttaatgaatacaataatttaaacatattgaatgagaaaaaagtgtcttcagcgtttaagcattgccgagaagaagtgcaagaaattcagttaaacctttccatcttcgatcttctgaacaccatcatctgtgctacgaagaccatgcactttgtcaccaacacggacaaccccagatcttactcgtccagtcagtattcgtcctagataaaaatcgcgttccatcatggaaacctgtagaagactatgaattactggctccgcttaagaattaccagtacaaccttacataaatatcttcagaagaggtaaatttaagataaattctagggtggggaattagagaaaacttgcctgcaaaagttaaataacacacatttcggaacaagaagaagtgtgtgaagtcttaaattctgaaaaggaggtggaatcttacaaatagctattgactaagagtggagaaaacttggccaaaaacgaaggcatcattttgttttggttgctaaatcaagtggaactctattacaaataaacaaatcgccataatacttagtcgttcactcattctaataaacatgtcattagagatggatggagaattacaaaagaaatagcaagttttccctcgtctaaataaaatatccatttcagatgctgtgcaatacactaaccaacatttggaatggagcctcaaggtcagcttttggagaaggcacatgctgtaaaatggaatcaagcaatgcagacatatttttcgcattatcaggagggctcttggtgaattctagagaagcccagccttctttagccgatgcataaagaactgggaagtctaactgttcttctgcaaaacccgaataaaatagtgtcacatatttatgaaaaaacttccaaggcaccaaattgaagtactagaaatgcacctgtagcaccaagatttgcaaatagatcaaacaccaagctctctacttcattgcaggtctcttccgaaactgttggagtataattggttagttaaagagctatagcaaacataatatactagggatatatatatatgccaaaaataatgaatataatgctttatctatttctgagctggtgtatcccactgcagttggccatttttactttgtgggaagtgaatatatcgcagtagctcatctttcaaacaaaattattgctaacgctaaaaaacattcaatgctaataacaggctactcaaaaggaaaggccttctaactaaaaattacatgactggatatttctctttttctgtaaacatagaaaacaaaaggtagcctaattttgtgacgggaaatggaatattgtgtcattttggataaaaattattgtgtatttacccccaaagtatatgtttctgtttatctgcttaaactaaattacacatcaaaacttcatacttgctcagcttaagatcgtagcttgattcatatctaagacaattgaatcactttgttatgtacatgccatccattgctcacaaaatactgccatagtgagcagagcatctgagaataagcaaacctgatggcctgtcaaccttgttgagaaggagaattgggcgcaagccatacttcaaagcctttgaaagtacaaacttggtctgcgctaaaggtccctccccagcatcaacaaccaagaccgccccttcaaccattccaacaactctctcgacctgtcacataattggtgaggatcatgtcagataccatagaaaaatcatcatttcttcttgttcttaactgtatgaaattataaaagagtgctgagtgtgtacttcgccaccaaaatcagcgtgaccaggtgtatcaaccatgttgagttcgttctccttccaagagacagaagtgacctacacaaatagccgagacgaaaaaagtgagatgccacataaaaagttaccatactgaatgctatgcagctattggaccatcaatgaagaagtttcaacaaaaaaaaaaatcagaaggatgagataatgattatctcagcagatcagatttcgggagtgatttattgaactacaatagatgtgcaggctttacggagtacagaatgagcagagcagttgaaccataagtgacataaatcctcccagaaatttacttacgcactgaaatctgccaaggtgctcagcgatgtataacagggaaaacagtagcgcaagtttgagaatggcctttgaagcagatctcacttccttccccaagccaacattctaatccctcacgtgatgcacgcagtatgttcgacggaatggacatttaacctctcgtgtgccctcactaaccacgcggcgcgcgcgagtggtggaaggtgggttaccttggaggcaatggtgatgccgcgctcgcgctcgaggctgatggagtccatggcgcgctcgtgtgggatgtcggcgccgcactgccgcaggagccggtccatcagcgtcgtcttcccgtggtcgacgtgggctatcaccgccacgttgcggatgcgggacgggtcgagggcgcctccgggccccagggccggggaggcggctgccgacgcggcggcggccgagtagaggcggcggaggagcggcgagacgtagggcgccggggacgaggcggaggtcgggaagacagggctcgtccggctcgccgccgagcggaggccgcggagcagcatgcccgtggccatggcgttcgcggcggcggcggcggcggtggcgtgatatttcgcgcggccgggagaaagggaggcggctgcggccaagggttttattcgggcgtgtcactgcgacagtttaccaaatgtataaaagcccatctgaccacaggcctgggtagtttgtcctgggcttctttcggcccaatctctctcccgtcgagccggccgcctccgccgctggggcgttccacttcccgacgggcgcaggcggccggcgtcgactctctcctgtccaacaccatagttgtggcggccgatgctatcgttaaggatcgcggccgcctcgcgcctgcgagggctgctgggcggcggcgcagcgaccggggcgcgcacacgcgccttctcctatgggagggtggtggatgccgctgcccgggacggcgagctccgagttttcgtggtcgccggtgaggtctcaggcgactcgctcgcctcgcgcctcatggcgtctctcagggcgctctcaccggtccccgtccgttttgctggtgttggcgggtctggtatccctccctttccccccattttcgtttcagtacttctgtggaatcgatgtactagggcattataacttgagtttgtacattattttaggttgctcttaaatcggaccagcatttgtccaactttttgtttgatttgatttttcatgtcaattttcataggtccattgcgtgcttatagattgtttcgtttcacatgaacataaacaaaacttccattgttgctatgcttggcatgctcacacagtcaaagaaagacttattttggaaccgcttacttaaagtttttttctgaatgttgttggaaattaaattctaattgtattgtacgtagagctagattcatcgatgcacacttgaaatgctcaaatttgcatatggagagcaagacagagtttcagccaataccttgagacttgagcaaggtgtctagcatttagtggagagacaagcaacagatttttcattgtaattcttgttacaatagtatgtgatgctcttctctcttgtagtaggtttattaggttgtagcacattgaagaaacagtaaatttttattctaagcaatcctcaatgcttggcatataagattggaaaagatgaagagaaaagaaagaaaattgggagcaaaatggaattccagagttaggggattggattgttagatgctgacctatataagggtattcggcaagtctcttggatctaagcaacaaagatcaatctataatattccccctagttcatcaactcatcctacattccgcttctcatccctagcagccgatgccgcccggctatccttctggtggtgtttaatgcaattacaccttgcccataacagtgtgtatccatctgtttaattatgaagaaagttaactttttgtgtggtcaacattcccatgtaataattaattcagcatcattgcatcatttcacttctccatctatctgagttaatccaaacccaatttcaagttggattccatggttttactgcaagtatgatccttgagtttcttgcctcttaaatggagctcaatccagactcaatttcaagttggatcccatggctttacttcaactctgatccttgagtttcttacctcttaaatggagctatggactcttttctttgatgtagggaattaatgcgcaataaaggcttgcagtcactttttcccatggaggaaatttccataatgggattgtgggaactgctgccacacatatataatatcaaggtgcaatgttgttctgtctcatactctcatgctttgctttttgttcatgttctctggacttgtattttaattatgctcattttggttttacagaggaagattgaggatactgcagatgctgctgtattgtttcagcctcatgctgtagttactgttgattcaaaggggttctcttttcgcctcctgaagcaattgaaatgtaagtctattagcataagcattttttacaataccattcctaatttctcgtgagcaaatatgataaacactttctgttgtctaggtagatacaatcaagttgcccgtcctctacatgtccactatgttgcaccatcattctgggcctggaaagatggtgaaagaaggcttgcaaagttgcataattttgtggaccatttgttgtgtatccttccatttgaggaagaaatttgcagattaaatgggttgcctgctacatatgtgggccatccattattggatgatgctattggcttgaatatggtatggacttacgtgctttgtttcaacatcagtgccatcagcctaatatatttttgttgaattttaagacattgctgtccaaatctctcaacagttttactgcactttcttaagtgtcttctctatccagttatctcgttaagatttctttgcataaatgctttgcactacacaatgaatgcaccatctactacatagaatggcaatttaatgtaccagaatgtttctctctataaccagtagctattaaattactactgccgatgcatagcagcagtataagagaataaaggtaaggttttgtcatttattcattttataaagtgatcattctcattgatgtatagctactagtagcttcttttctagttcagttgttaagatatgtgcacaagcatctagtgtcttcatgggaatgagatgaagatgattgtgcgaaggatgtactattgtctttctactctgttaggaaaaatgttggcacggatggaataactagtaatggctgtcttatcgcaggtgatttaaatatttcacgtgatcttttatcaactaagcattttgatctggatactattgtctttctactttgtttcgaaaactgatgacatggatggaataactagtaatggttgtcttgtattgtagatgaaatatttcacattttcatttataaactaagcattttgatctggtaatctggagatgctcatggcatgtatataaattgctagtgctaatccactgacttgacttacatattctttatgcttgccaaaataatataggagaaggaactatcttctgtcaattccatgcatcaacgaagtggtgaagattttcgacaggagcatgaaatttccccaggtagattgtatgtgtaattatttgggtgtgcttcttttagtggtaatgcttatgttttgtttttgttttctgcttgtatttatcagttctatgaattatatatctgttatgtggtttatccatttctatgaacttagccgaggagacagacagcatcacagttacatgttatctgttaacagtgcaacttcaaatctgcaaactattcggcagttgcaactgccatttaattttgggcacacttgcacaccatcacttgtcaagtgctactatactatctttctgggtaatgtagtattgtataagtgaaaactcatggctgctgcatcaaggtttaataattcctatataattcggtgctgttagagtagtcgttgcaaagtaatctattttttgtagcaagttctaagtagcttactcataatatggtgctacaatcagatcagctttcaataatgagatgcaaagcattttttttacgggaaatgcaaagcatatattacacagatatttcaactttcttgtgaattgcatttatcataattttcacatgcaactctggtaaaacatatagttaaacctgaaagctacatgtataactgagcacatattgttttctttttatacactgcaaatctgcaggactatgcctggacctggatccttgcatttatcatgttatcttgtgcatctaggcattcactgaaatcatatctggatatactgctccaaattacatgttatcttgtgcatcaatagctagttagttctcctctatgaagctgcatcaatttttttttcataggcttaatcttatttgcatttttactctgtgttatttatatgtgcttgttttctaatgagaaaatccacttttgctagattccacaatcataaccatactgcctggaagcaggatgcaggaggtagcccgtatgcttcccatcttcttgcaaactgtgcaacacctaagtcatacatttaatgaactgtcactggtcatcccagttgctcctcatcgggatgtgagggtatatgttgataatgttgttcgatcagggccatttccagtggtactgataactggggaaacactaaaagaaagatatgatgcattcaatgtaagctcacatgattttagttctcgagtgccaattcaatttttgggtactattattttgaaatttggttatgtttcaaagtatcttatctccccaatgcttatatcatggacttttgtttttttacggaaggtttcatatcatgcactgcacctgtaccctgtgcttgctccagaacagtgttaatttgacaaagttccctgaattgctaagtctgtatctgaagtacattttcttgttgcaatatgcagacaaaaagttatctaatctagaacactgttgattactgcagctagtagattgtcccatgcatgttgttttaacatattctgtccctttcactcaggcagtatatgaaacaattccttaaccacagtaagattcagcattattatgaatgattagactagttatacacataagaaagattgtgtcagtactagttctttgttttctagagaaaaacatatttatttcttgtgaggtaccatatttttgttaaggtgcatctgttacgtcttttttttctcaaacacgtatctgctacacctcaagccaacatatcttatagtagttatttctattaatgaaagagaaacatgaaatttatatgatgtaattgatagttaatatgtgagacagatagcaacctaggtgggcttcttgtgccagcagcccagtactcgtcatgaaatttcattggtaatgtaattgcgtgctaaataccgcaggtctgcagtcgatttcttgcagtttccagaattcatgtgagtaaactgaagagtgttgtttcgtcttgcaggctagtagagcagcattatgcacttcaggaacagctgtcatggagctgatgttagcaaagctaccctgcgtggtagcttaccgggctcatttcatcacggaatgtttgattcatctgaggaaaaagatagactttatttctctacccaacattcttttaaactctccaattgtccctgagatcctttttggggcttgcacagcggaaaatctagctgcaaaactaaggtaatgtcccccacccaaagaaaaaactcatagatatgaacatagttatctcccatggatagcatccatatgggtataggtagcagtattcatatagattcatatgccttgacatgcctgttagttaacacaattgcttaacgtgcttccattgcttctttttttctgaatgatgttcattcttcattattgagaaatagtatgtatgtattcgacacttggacctgatcatatttcatcccattttgatctgaccagtgaggtcatttgtaatgatgaagcccgtcagctccaagttgaatcagctgaacagttactggagatgctttatgaacctatcaagcaacgaggtggcctatttcaagaggagctgcacaactcgagcctgccgtcaaatatctactccccaagcacgattgcagcattgacagtgctttatacagataaccatcaacaagcggtgcaccagaattgagtggatgtcctcagtagcagacaaatatttttatcagccgtgatggtcgctattgcgtgcaatctcatcttctccgtctgctgttcgtgatgaagagtgtactttctgcagatcctattggctgccctaggcccacaattggagaggcaaaacgagtttttaggtaaaaaaggcttttcagttcttggtttctgattctgaagtgccgcatgaagtcaggtcagcatcgtattatcattatggaggatgggaacgcatgtgttctggtgggtttagtgcgggtcctggtcatcattctgcgatgatgcgtttggcgcaagattcttccatggttagaatttcctggagtgaacagttggcagttgatatgtgagaacaattacaagagatttttcggatggttttgatactttcatggtcatcgaaattacgagatgaagtatgaacggatgcacagtaacgtcatcaggtctgggcttgcttgatggctgctctagccatagaggatcctcggtcagtgagaaagcatagattcccacgtagccggcgatcacgtcacggctgagctcatctaggtggtggcccatgcacgagacggcgaatcttccatggaaaatatttcgaaaattgttgcttcggttttaattacaagttgccggcattgccagtgttccacttgggaatatctaacgcttttcttataacgattttacctgccaactgcagcatggcatggggaaaagtcttgagccatcgtgtacttaaattgtgtaatcatctggtgccactagctatccgtgaacttcaggagtaagttgatctagaatggtgactggtcaatggaggccttgtaattgtaatttgtaaaacaatctaatgatgtaacatctcaaggcattgccagtgtggtcgcggtgcatggattcgtttccctggcatctcggtaagaaacagtaatatttcagtatttcacagtgataagtgattattagcattggacccggtcactcggattctgttcttttcaagagttcatacataggtcatttttttaatgtaggtttttaaaggttgtttatgaaaatggtcttaaaagtattccttttttatgaacttggctttacacaggctaaactgtcatcaatctagaacgctgcactttgatgatatcttggacatatcgccatgttacaatattttcttcgtgcttggaaagcacgattgatgccttcaagtgaaactttgctcacggaattggtatcacaccacgaaagatatcataaaaaatgtgagcactaagcacagagtaacaaactacatgacatgctcttggtaccactgtaccatcaataaggcagaacattaccacactaacactcaggccaagtgcctactgcaaattaaccctgggttttgatcctcatcctacgcgctgtacatgtcaaactgatcttcatttcatatcacgcactcaccgtcgctcatgccgacctgcttcgcggccgcggcggcgccgcgacgggcgccgtcaccggcgacagccggcgggaagttgagcagcgccttggcgccccgcatgcggaacgcggcgcggtcgtacgccgcggcggcctcctcggccgtgccgaaggtgccgagccacagccgcgcgccgtgccgcgtcgggtcacggatctccgcggcgtacttcccccacggccgccgcctcacaccgcggtagtgccgcccgccagcggcgccgcccctcgccgccgctcccctgcctccgcctccgccgccgccacccttgcgcccggcggggtggccggcgaccaccggcgccgtcgtccgcgcgcccagctccggcgacgacgacgacgacgacgacagcgccgccaccgcggaggcctcgcggaggacgtcgaagaggaccatgtccagcgagtcgttctcgttgagcgggaggtacgacgacggctgcccgttggccgcgcgcgccagcgacagagacacgtccacgcgtggcggcagagcaccggcggcctggagcgcgggcgcggcggcgaggcgatcggcaccgacgccggcgccggcgctaaaccccaaggagagagacatgcggggctgtacgcgcggggcgcgctagctcatgagacgatcgagagaggtggatggatggagagaccgagagagtggtttgcagtgtggtgtgtcaggtaggaggcgatgcgtgatgttgtcgcgctatttgaacccgaggaagagctagcactggaagtctggaactctggaaatggaaggattaattatttttaactaaagtggggccatcatgtgtcatgcaaaatgtgatttcgcaacctcctcgggtgcaaatcatgtggttcggttcatgcatgctttggcctttggccaattactcccatttttctacgtagttttgctgatgaaatcggccaatcggggtaggcccatccatccaccgttggagcagccagctagcgagcagtagcagatattctgtacggagaggcacacggcgagcaaagctaggcttttcatgtgtagctaaattgtaatatcccagttggattccttgcatctcacgtaggcaaagatgtaatatagcgctctgtttattaatgcacggatatgcatgtatggttacctactctagtgaccaatagaagaagatcctcctctaaggctgtgtttggctctcagggttgggaacacatatactgcacacgaaaatggaacggtgcattagcgcgtgattaattaagtattatgtatttttttttaaaaaaaagatcaatatgattttttaagcaactttcgtataaaaactttttgaaaaaacgtttagcaatttgaaaagcgtacacgaggaactcaagggtatcgaacacagcctaacttaacttcgcatgcaattgagtcactgatatataagtcccactttgttatgttccacatgtcagtggttcaattacatagtagttagagcacctgcaatggtaaattaaggtgctctctataaaacatgtacatctcaacaataaactagattaatagtaaaccatctcaatagtatgtctacatgggtatctatagctctctaatctattgcctcgtttttctatatagactatctccaggttagtatatagctttgctctctctattcatttaatttctttcaagtaagaaaatatgctgatatgaatattttgtagagagactataaataaccattatgggtgttcttaagttagaggatccctttataagggtccaagggatgggaggggttaatagcagttgatttcgagtcggctcatgctgtctcgctactactccagcttttaactttcttttcctccattattttttctttcatttcattgattcattctttattttttcagtagcgcttaatagctttctcgtgggggcattgacaggatgtggagactgcgtggacgctttttagcgccatatggtacacacacgtctgaattcttgggcagaaaagcaatacaactaattcttggccatatactccaaaagagaagaccagagaaagaacttgggaaaattcactgcagagccgtggcgtgatttggcacgtcttccttttcagatcggctaattattctggatcttctgtgaccgatcgaggccatcgacgtcgtgccggtgcggcattacgtacgcgcgcaaacgtaaacgagagtgagagtggccgaagcgacgacgagaggataggggcagcgatcgattgggccaggccagtggaaccttccaaagccacgtacggagacagcggtcgtcgtcagctcgtgttgttcgcgaagggccaagagcgttttctaatggctactacttctagacacagcgggcagacttgagctacccgctccctcgacgatatcggtcaaggcctcaagggtcaaaggagcattattgatccatccgtttcataaaagcaacgtcgtaatatagagtgcaacccattattcaaatttatagtagtagaatatgttatagcccgtgttttatttttaagagtgaaggagatatatttgactgtcattaccggatcgatgtggctctctctaataatcacccatcataaatgcatctaacaaggttatttgtgcatcgttgcattctcaagaacgtggcaactcgttagattaaatttaaggttatatatatgtgtcgcactatcaaacccagtggagcgcgcaatcggtaataggctcttccctgtcggcctgttagaccattaacattgggagcatcgatagttcgattcctgatcaaaagaacaaaagggaaggggaaaaggaaaaagaaaaaaaacacgtagattgcgcgaccgttgacgatcttcggcaagggtatagcacaatggtgttttggaaagagcgattcatcgaggtagcagtgtatgcttaagtataagttgtcatctccgtgacacatgctttatttttctaagatcggatggagaggcaagagggggatgtgagggagggaagacttgtattcgattctatcggccgacaagttatgctcgtgcgggagtagtcatccatttcattgcgagttccgtcttttgtgtactttctttatcacaaaatttaaaggatttatagattcgtattaggatgtatctatctcatgtatttaacatctctatatgttaaagctcacttgtgataatcccttagggtgtgtttggttggtgggatatatccggataagacatggctgccactttttggagggtgtttggatgctgggcgagagtgggatagggcggcccagaggggaatattccctccagatgctggatagagggatccggctgatttggccggatgcaaccgctcgaggctcgggtgagccgagcaagcgagttgcgtgactcgcgtcactcctcaccaccacgacgcgagcgaggcgacgagcgcggcagccggcgagaggggcgacgagctcggcggccggcgagagaggcgacgagcgcggtggccggcgagagtggcgacgagctcggggcggcggcaggaggaggcgagctgcgcggtgggaggaggcggccggcggcgggaggaagccggtgggaggaggctgccagcggcgtcggcgagcccagatctggcgctgctttttttttcttttttcttttttctatgtgtatttataatggaatgtgtatttataatggagtgtgtatttataatggaatgtgtattatgtattaatttgatgaggtatattcaccatctcaagtgagaggtgaccacacctacaaatccaccgtacttcctccaaccaaacaaaaaattggatcaccagatccacctttgttcctacaaccaaacaaaaaattggatcgccatattcacacaaccaaacaaaaaactagaccgccatatccagcaaaatatggaccgccgtatcccatccaatcttgaccaggaaccaaacacacccttaatttttcagtgggtatggttgacttgacggacgtactactccatactaagtcgcttaggacaatgtttaagtcaaatcttgggaatataaatcatgaataaccctcaagttgttgagtttgaaaatataaaaattatatgaatagatttgtcttgaaaaatacttttataaaagtatacatatatcacttttcaataaatatttttatagaaaaaaaaatcaaagttatgttttggagaccgtgtcgttgtccaaaacgacttcctttacgagtatggagggagtactgtttggttcggtcgggatggacccgaactccttgagatcagcacacccgggcggactgcgagcgcatccaacggcagatgacgacccaaccaccaagtcgtcgccaagtctcctcctccgctcccgccactctcatcctcctccacctcctcgccggcgccgccggcgccgcaccaccgctcgtcggcgtttctcctcaaggtgacggcagagccgcatacctaggcgttcgctccttcatatcttttccttactcgacctgaccaaatagcctctgcagacgaggcgtacttcgcgccggcggtcatcgcctgcagggacggctcgggatccttcccgaagcgccgcctcaacgacgggtactgcgactgctccgatggaaccgacgagccaggtctcccaccgcctcgatctctgtttccgattcggcccgaccttaactgcgaaatgcgaacttcggggtcttggggatctggtcgatttcgcgtgtgtgacgagatctgatggaatattgcgttggatgttaaaattggtgtgatgggaatatttatcttgttatggatttattacttgcgatagtacaatcctttttttcccaattcaccaaggagaaaaatgtgcgattttgttagtaaaaaaggatgtgatcttgatctttcagaggacatgaggaatgtgcgatttttacagtgctttcgaggattgcttttgctgtgttttacgccaactccgtgctaatgcaaatcatagattactaacatatttagctgccagctacattaaatcaagtttattgatagtattgtggcctgccgttcgtgtacactccctccgggctggtttattttgggacggagggagtacagctgaggtgagccagtgaccggccacaccgccacagcattcatttgtgacgttctgaatgctaacatagaaaattcttccacatctatgtgtttatctgttgcttcatagtagttgataatagcaccaatgcaaaagatgttcactaatataatgctgtccctcacattatttgtgtcatccaggtacttcggcttgtccagatggcaggttttactgtagaaatgctggagacacccctcgtttgttgttctcgtctgttgtgaatgataaaatatgtggtatgctattgcttttttcacaaaacaatgttaatatcaagagaatacagttttttttatcctatgttcaagttctctgtttcaaaaaatccgcttccatttactttcatcaatagcaaattttttttactgtgttttgttatgctcttatagattgttgtgatggaagtgatgagtatgaaagtggcatccgttgtccgaacacttgtaggaacataaatgatgttagaaaggatgatgatgttggtataaacagaaagggtgttatgaaggatgacggcgttggtatgaacataaaggatgttgcagaggatgatcatcatgataggaaacgtactctagatatagaagatctcatccaaaagctaaaaggtattatctctgttcagcatgccacttagatgtagccattccaatggatgtgcattttgttaaatgtgattttaattgtcctgtttgcaggattaaaaatggctgtagtcattgagataggtcttgttatatgtacatttgcagtctgcttcgctcggcgccgtaccagaacacggaggagacattatattttgaaacgtaagaaaacatcgcccccccctgcatattaaatcattttgtcttgtctagtaggaattctgtagatatcattttttgaagtaaagggcaggagcgctgccaaagtgccattcaatggaagaatatgattacaatagcgacacaccaatgcctgccacagaagggcctgaccacttaggccagtggcaaaactatgattacactagctagataagctcattttgtaaacatcatattctataacctaatttacttggtctataattcataagatctttacttgccaacgaacttatgatttttgaaattttattggcatgtctatttccttggcgtttaacccagtgagatgaccctctgtgtttaacctgtccgtttctgataacataaatgggagagggttcacctctctttctcaaaaagaaagaaaatcagtgtgtatttattgatagtgttatttgtgtaatattcctactatgaccagatttctttgccgcataagtatatggtaaaagtgtagttttacaaattaacctttcaggaccatcagtagctttatcaccatgtgaagctgctgtgaacacatagcccaatttattttcagtttgtgatgaagtattctcggaaacagtataaactcaccatagaatttgtgttttattttcaggataggtgagctgtcactcagaaagtccaaagattgatatggagtacaatgatactcatttgcaatcctcgaagtctccaactctccaaggatgacgggaaactggagatagaagaagggatttacacgcttgctcatcgagacgtctggaacatcaagtcgaggaaaaaaggcatcacgttgtatgagtacgattatgtgttatttttgcccgtattttaggtctcctcagcagagttgctggttgaccaaggccaggagatgatgaaatccatgtagagatgtaggataaactacgtgaatatggcatcagctggcgacgcattattgcgaggccttcctaaacttctctgtaactgtgattctgtgaagtgcactgcaatgattttaagttttaaacagctaataacatagatataaaaattttattcataaattaattttcgttgctttcttcattttattgtggcttatcaacaaggctcctcaaattgcacatgctaaactgctgctcccttgttctcgccataagctaatactaagggcctgtgggagagtttttgcagctgcaacttctctcaaaattagaaactcctaccacagtctagttttttattcagattgtaagaagtggttgtagaatccaaaaaatgaattataaactagaagaatccaaatccagaaataaattataagctagaagaatccaaaaaataaactataagacagaagctaaaatctcagcttctccatattcttacaagatctcagcttctccatattcatagaaggggttaccaaacagctatttttcaaaatcttaacattacaaacctcaagaagctcagtgtcgcatcagtttgactgcatttggcccgtttggggttattacatatgggcttcggcccatgatggaaagtccagcccatattcaaccattccggccgattagggttttacaccacctctctccgtgctcctcctctccacactcgcctcccctataaaagtcctggacgccgcaaaaccttccgcgccgccgccatctcggaccaccgtagcacgccgcctccccgcccagcgacctcggcaactccggcgaagatgggcgccttcagggttagcaccatctctcccgcttcctcccctccacttcgagggctggtttgatctcgcgagatctgatctgacgtttgcttcgttcttggtttttgcgcggcgcagttccaccagtaccaggtggtggggaggggcctgccgacgccgaccgacgagcaccccaagatctaccgcatgaagctctgggctaccaacgaggtccgcgccaagtccaagttctggtgagggttcggatccccctcgcgaatgcgccattgtttcgcgcttggtttaggtgtttggatgtcgttcagtgacgttactttgtctgcgtgcaggtacttcctccgcaagctgaagaaggtgaagaagagcaacgggcagatccttgccatcaacgaggtgatctattctttcccaccttaccttagtctcatgcgtgcatctcggtgctttcctttctgcagagtataatggcgtattaatatcaatgttgagcgaactacttagttctgcacttttgactctatatagtgtgttcttaatcggtgaaacgaaatgtactagtcatttcatgtgccatacaatgttattgctaatttttacacgaatgctagtctatttcactgatgtctttttttccatgctcggtgttagatttgattgcctactgctagacttattgtcgttttttttcctgatgtacaactgtgtatacttgtattatgacttattctgattcttctgctgtacatttaccccttggagattttatgataaattatgattgtggatacacaatgatttaaattggctgagttagttcacgcttagtttattatcagctttttcaatagtttacctgataatatttccttttgttgttttatctgcagatttttgagaagaacccaacaactatcaagaactatggcatctggctgcgttaccagagtaggactggctaccacaacatgtacaaggagtaccgtgataccaccctcaatggtgccgttgagcagatgtacactgagatggcttcccgccaccgtgtcagattcccttgcattcagatcatcaagactgctactgtccactttaaactctgcaagcgtgacaacactaagcagttccacaagtcagatatcaagttcccactggtgtacaggaaggtcaggccccctaccaggaagctgaagacaaccttcaaagcttcaaggccaaacttgtttatgtgatccaagtcgccttccatgttctgtaagatctgccagtatggtgtagtcgtagttcagaacttaagatgaatcttatccatatgaagcctgtttttgaaaagttctggtaggtccatgctgcggtctctctaggttctcgtatcgtatcctggtatccttttcttttgctttgtgatcatctgatgcctcatactgacaattcccagtttgcgttgatattggtttactgaaatattataacgttgctattttgctcactgcttatggtagcccaattgaataatccgtaaaatcatagtctgattgaactgtgtttcaattttcttgctgtatatgctaatcttagtgacttgcatcaattgggtgttatgtgcttattacgtaattctgtaaaacgaaaaatacaagttaattcttcatgattgttttttgtttcatgctttcatatttcattggttatttgtttggcacaaccgcacaaagctttagctatctattttggctgatattgggtatgcatcattttactgatagggatattgattgatgctggataaaaatgtttttcttgcatcacattcaaacttttgagtagttaggatggcaactttgccgaggttaccaacagttaatttggttccctttttttccctgttgccaatatctgattaactcttgggtgctctctcttttccataaacctagtggtttattggataagcatcctagctaacatcagctgctaaaataaagtagttttactttttaagttctcttactagtcgcattgtgaggttttgttaggcaactttgccgaggttaccaacagttaatttggttacctttttttccctgttgccaatatctgattagctgttaggtgctattctttccataaacctagtggtttaatggatgagcatcttagctaacatcagctgctaaaataacgatgtacttttaagttctgatcattctttcgttttgttttcataatctaattcaatgttctgtgactccataaatcattttttttacttgggctttatatctcttcctaatgcaagacggtatgcaaattttggtcatttcaattatgtacaaactcatcccagttgcatttgctacctgtgaagttgttaggcaactttgccgaggttaccaagacatgtttggtttcctttttttccctgttgcctatatcattagttgcttggttgcttgaactccattgacctatttggttttttgggtatgcatccatgccaacatataatattttccatcattctttttacacttagcactgcccaaatgttggtttggttcgtggactgagattctcgggaggcttttatgttttttgatcgaatggttcgtggtttctttgctggtttgtggttattttatcttcttggagtatatgtttgtcgagataattgttgatgtaaatgcagtcgtaaagctcttaaacgaactctaccaacagctcttattccgaaaaagtagctaaactgaaggatgaagaactctggttgggcggccgagcacctgcagcatcggccactgccttacgagtacttttcgtctgtgaggtcgactcgacatcaacccttgtaattccgtctgtgtggtacacaggatttgttatttagtaattgtaaccattcaaattatctactgctattcatttaaagttttcaacttacctagaagtgttttttgtcgctcgtcaatcgtcatgataacgaatgctcatacaacaaactgaaccagacgatacggacgaaactgcatgaagctagaatagctgtgtgttctagcagtgttgtctcgtagtaatactgtacgtaccagatcgtccagtacattcaaaattttcaccaagtgaagaactgagttctggaatcgttaagtgaagaactgagttctcgaatcgtgtgtgatttgtatagttccgagattagtactccctccgattaaggttttaatacgttgttagtaaaaaaaaggttttaatacgttttaattttagttaaagttaaagttaaactgttttaagtttgactaaatttatagacaaatataataatatttataatactaaattagtttcatcaaatcaataattaaatatatttttataataaatttattaattgaatatattttcataataaattgtctggggttaaaaatgttactatttttttatacaaacttggttaaacttaaatcagtttgactttgattaaactcaaaacgtcttataatctaaaacagagggagtactctctctgtctcattttaagtgcaactatgattatccgtatccaactttgattttccgttttatttgaaaattttttaaaattagtatttttactgttatgaaatgataaaatatggatagtaatttatacgtgacttatattttagttttttttaaataagacgaaaaatcaaagtcacacttaaaaggaaatggggcggcggagggaggactagtccactgataagtgataacgcatcattcaaaatgatcccgaagtgaaaaccgataaattctcaaagaggtgtgaattagaagtcaaactgcatcgacccagctgtccatggtcttcttccgttcgccctcgctttcttcccgcaccaaccccgcctaccgctccaccactactactacaccatcccctccaccggctccccctcaccaaacttccctccacgcctgcttcgcccaactcgttctcttggagcacctaactcgagctgagctcccttcccgcggaattcgggtccctccctgatggcggagccggagcagcagcagcagcaggcgaatcccgacgaggtaccgatcagccccacgcgaacgaggccattttcttctctcttgtagtatgtggtgtggtgagagtgagaacgcgcggcgccgtttctttgtgcaggtggtgctcgggcaggagaccggcggcgcgagggtggcgatcctcaaccggccgcgccagctgaacgtcatctccgatagagtggtgcgatttctttcgcttcgtgcattttccgatcttatgccggaagcagcagctggaagctgtaattggctgggccgtgctcggtttctggttgcaggtgtatctcctcgcccagttcttggagagctgggagaaagatgaggatgccaagctggtcatcttcaaggtgcgcgcactgctgccctcttagcaccctgcattgataaagctctagggcagaacataactaattataattcagacaaggataggttttagcctagtgatgtcatgcgtgatttgtttccaggagacagctcaaacaaatcatttaccttactctagtttgtttcttcaaagtccttgcaatgcatggagcacttggctagtagtacaaactatgtagagaaacgtgttgcttgtttaaggattcggtaaggtgtgcctggtcaacatttggactttactcagtagttagtactgatacataaggtaacgttttgatatggataagtttggcaataagacagcgatgaaatgaggcgtatcatgtcacaaatgaaactttttgttatgactttgtatgatacccatcgattggcccaagcatatgaatgtatggtctgctgatgaacagggggctggacgtgcattttccgctggtggggatctaaagatgttctatgaaggaaaatcaggtatggatatgatatgaatgtttcagtgtagcagtggtaccacatcacatgaccttactgtataatttgatttccatccccaagactcacatttgcgcacacttgatggcatttaaacctattaacagaactcctttgcagatgactcctgtctcgaggttgtttacaggatgtattggctttgctaccatatccacacgtataagaaaaccgcggtgatgccctcttttatgtttgtgggaggactgttttctaacttgggggcgaattctgtactcaaattctatggttttatttcaattcatgcaggtggctcttgttaatggacttgtcatgggtggtggtgcagccatggttgctccactgaagtttgcagttgtcacagagaaaacagtatgcaacactagtccatagtccagttcttttggaggctttttttattccatattgtgttatatgtttgtttgttggtttgctgtatttatctgtaaaagtgtaaatcacccctctacatgtcactatctcttcaattcagctagtattattattttggcaaaattggttatatagcatcaaaagttcacgtttttggtatgaaaaaaatagaaaggagagaacactcctattcttgaaacggacccatttggtatcatgattactctgtcttgggagtttcacggtgatgttttttgtgtgtttaggtcttcgcaacccctgaggctagtgttggattacacacagactgcagcttttcttatatccattctagactccctggatatttaggtaagtactgaattgcattttccattcagaggtcaaaccatcaccttactacaggcgtattgtctcttgagatgtaatgagaaatctgatagtgacttgtgtgacaaattaaacatatcttaggacaatatggttctgtaatgtatcacttgacatagatatttgtgccaatatgcttattctctttgaataattcttaggggagtacctggctttgaccggtgcaaggttgaatgcaaaggaaatgattgctgccggtcttgctactcattttgttccttctgaagtaaggcattcagcatttaccattcatattcacgatggttccggtgcatgatttcctcgattgttctacatgtagctcgacaaatcaaaatgtttgttgatatattgtctttctgtggttggactaaccaaaaatgattataatgtgaatggcagaaattggaagaacttgaaaaatgcctgctgaatttaaacacaggagatgagtctgctgttcgagctgctattgaagagttctcaactgatgttcaacctgatgaagatagtattttaaacaagttaagaactgatgtccttttccaaatgtaacttgctgcgcatgcatttattattctattattgaaataaattgacactggaatgacaatcttacttcgataggctcccaactatcaacaaatgtttctctgctgagactatcgaggacatcataaaagcttttgtaaggattctttcaattacttgcttgaaaagtgttgagttcctcagactatagaatattcatcttggtttcatgctacaaaataatctaaacaacaataagtggacagtattcatcttatgcccaaaatatatcatcgtcaaccaatagcttctggaaaaactagacacagtacactcaccaatcaccaccagtcttcactgtcctataacaaggcaatcaactttttcctgcaaatcataagtagcgtcttttgttgttgttgttgtttgtaggaatcagaagggagcattgatggaaaccaatggatcgctacagtactgaagggcatgcgaagatcatctcctacttcactgaagatgactcttcgatcggtacaaactctgacatcgtttctaatgctgatgattttgtctcgtcttaataatatttgtgtgcttcttatgtatggtgaatgcttaaaagctatagtagctgtccgcttctccttggttaacaatttatttatatgttgtgcagtgtactaatttttgacatcttgttatgtattgtggtgcatttacagctcctttttgcacaaggcaagaatgtattcttaatattaatggttgttttaattcttcagatcagagaaggtcggaagcagagcctgccggaatgtttgaagaaggaattccgacttacaatgaacactctccgatctgtagttactggcgatgtctatgaggtactgtgatttgccactatatgaataagtaacggtgattcttgatacaggcaagactaagatgtcattcatcataatatttgcacctaaaacttggcagggaattagagctctcagcatcgacaaagacaatgcccctaaggttctctcatacacactcttaaacatgtctagaaatttttatttttcatactgttttttaatttttgttgcgatacagtggagtcctgctacccttgaggaggtcaagaacgaggacatcgaccgtcttttcgaaccattcagttcagaaaaggagctccaagtcccatctgacgattccaacaggtgaacaattgctccaaaatccatttcttttctctgcccttcacacaaacaacagtgtatcctaatcatctgcactatttccaattttgacatggacaatgcacagatggagtggcaaatttgagcacacagtctatggcagaacttcagagtaattggcagcagaaatagatgttcatcatcctcacaagcatgttttaagtactcgtaaccccatgtattctcatacttccctgtataacattgtaacacaaaaaattgaaaattacataacgcacgaagcaataaagcatctcaaatgttttgttacatcctgaagccaatgaataagaacttttccggcgtgtgatctctgtaaagagaattgcaacctaagggttaaagtctagggagtgaatgtatgtccaagagagaccagtcatgtagcgacttgagagccctatgagcagttgggctccacaggatactctaactccaagtagtattgtttgtacttggtagttttcttctgagtgggggctttcctcactgacaaaattctcctcacagcagcttcttggtctttcgggaactccaccgccatcttcttcaggttcgttgcttgagttagcagaaagataaagagttccttctggtaccgttgaggcctgaatccaagaaacttgagctgctccaaactcttagttaggcatgataactttgaaagcctctcctcatgatcagcaaaatttggcaatgcagtgtcgtcttttgcatcaacagcctaagcatgaatggcaggtagataaattagtggtaaacttactgatgaaactcaatatagtaaagatgctaatgtgaatgcaagagtgaatgggtgatattgcataccgaaagagtcaactgttgcaggttggggcaactctcaagcagcttcagaaggaagatgagttctctttcatttgagaaatccaagctcactgacagtattctcaagtcttcaaattgtacagccaagtttggagtgtctttatattcagatgacaacaactacaaaataagacaaagataaatgaccttctgaaagagcaagagttacacatgtgttagaccatattcacattccgatgttcagttgtgtgatttacactccagctatctgtgctataagcatataatgttgacatataaattatcgcttcatgttaatatctatcaaaaacgcattttatcaacaccgtgtcatttgaacagtgcttaaacatcaatgcaacattgcaaataggagaatacgagtattactaacctactacaaagctcaatgtctgaaagttatacagaacaacacatttcctgattagcggtttcactatggccctgtccagagaaaagcaaattattcatgacagtgcgaagcattgccaaggaatatttggcctagataactcctacattaaatcattctattatggatgtaatctaagaactgttttacattaatcacaacttaaagcacatcacaaacagttccctatttcatcagaactacataaactaacatttgtgtgaaacacatcagagcagctaattaaccataggatgcaagcaaaacatatacaagggagagcgcaccttgatggccatgcccctgagcgtgaggcaggtcaaccccgtgccagcatccaagaacggccgtatcctgaactgcagtttgacgcgcggcctggcgatgtgcaggtatgccttcctgatttccggtgcaggatccagccgaaccgactgcaccttggggcgcgtgtacagcgtgatcgtcctcagacccgccattttcaccgtgacctcacgctgctccagagccgacttaaacaggaggttcctcaccgtggaggactccatactgcagctgccggcgaatcccatgcagtacaccatctccagcgtctcgagcacgggcgcggccttgaggatgacgctgatcatccgctgcgggatggcaacgtggtggagcttgagcgtgcggaggccagggcacgcggcggggcaccatcgcgggagcgcgcaggagtcgagggagaccacggtgagggagcggatggagaggaggttctggggaaggaacgcgctgcggggcaggcggacggcgagctcggagaggccgcggtcggcggcggcgtcgaggaggcggccgaacgcggaggaggagaaccggcgggtctggggggcgaaggagaggcggcggatgaaggacggccgcgcggggagcgacgggagcggcagggccgggtcggcgacgagcgcggagtcgacgcggccgaactgggacgggaggacgcggaagcggcgggagagggcggagagcgtgacggcctggcgggtcgtgaggcgggagaggatggcgaggatgacgtcgtcggggaggccggagaggtagtcgtggccccctccgccgcggcggcggcggcgcttgcgtggggttcgtgccatcggtgcggcgcggtggaatcggagggggaggagattttcgtggatggatccggaggggaggggaggggaggggggcaaaagagtcaggagcttctgatttccgaaccggtcgggcctcaagtagaggaaaccggtcgcacgcgcgataggttttctggtttctcctctctttctgtgtgtgtgtttatttacacgcacaaggcaagtttgactacacgtgagacccacaggagtccaccggtgatacgagccctattggttcagtgagggagggaggtgatacgagttaacaggaggaacaacgagatatgagatcttttacggtgctttgaaaggtaccctaggtatctccttaacgaattgttatccacagttaatctttaaagggtaatttaggaacacaaatttttattaacaagggtagcttagtaattgctcaaatcccacccgtcacccaatcaaccaagccgtcgcaccgttgattcaagattaaccctaatcaaccaagccagcccgtgcgacggtggcaaccggctggcgcgacgggctcgtcggcggtgacggcgacctactgctgcgtacgtcagctgcgaccggtgggcgctatgggcgcgtgcgtcggcggcggcgacggtgtccagctgctgctttcgtaggcgcgtacggcggcagcgagcggcgggcgtgtgaggcctcggcaagcggcggccttttacgacagcgacaaccagcagatcatgtaggttcctctcgcacgcgagcgttctaattcttcctctcgtttttttttcttcctcctgctgaaacgtttgttgcttctctcaaaagttctgaatttgtaagaatacgcttttgccctttaccgaaaaaaatttaataaaaaacaattaccattttaccctcccaccttccatacctggctcacccttttaatacattttttcaggtaccttctctttctgtccgttagatcattgcagatcaatggtcctaattaattccaagcattgaagaagatctaacgagatattttgaaatctcttaaccacaaaaccaaaaatatgtatctttaaatttacataaaccatacactcaaggtccaacaacagtataatggatggtttcgctgacatggcatcctagtcagaaaaaaaattaaaaaaagtacatggagcccacatgtcagttacaaatcattttccttctccttctcttctcttttctctcttctctcttctcttcttcagtgagggaggccggcgaactccccatccctcccaagcctctctgctcgccacccgccgaccgctgtcgcgctcacatgccgcccgcatctgcgctcgcccatcgctggcctccctcactgaagaagagaagagagaagagagaaaagagaagagaaggtgaagaacagagaagaaaaaagatgtgcagctgacatgtgggcctcacatttttttttaactaggataccagcgaaaccacccatatatactgctataggatcttgagtgcatgatttatgtgagtttagggatatacatttctggttttgtggttaaggaacctcaacaaatctcgttgttaagttgagagacctccagaacatattcctgcagggagtgacaaggcccattgtgcgtttcgatcctttttccatagtgaggcccacacaaaataggccctaataatgagtagagcaatctcttgagtctttgacacagttctccctcacgagtaaaatcatctctatgtgctgaatgaaggaagtctcagggcactcacagtgcaagcaccagagcccatgtcttagcccaaaaaaagacccaaagacactctttcccacagtgcaaggattctattttacgtaacctaattgaatggagatactgtggaaggaaaagaatcccacaatgggcgttaccctacgcgcgtgggacacgtgagccgaacgcagtttatttcctcacctacccttctctcctcactgctcctcctccttctctccttctaccgccacgcctctttcacctcgcctcccacgccgctcctccttccggtccgccgccgcgcctcctcgcctcccacgctgcggcggcacgccggggacgcctcgcgctcctcccccacctcccctcgcgccttcgctccttctccgcgagctcaagaagctcgcaggaagccatggcgagtctcgcatccggccccccatggatgacgtcgtcaccaacgcgtcgcggcttcttcctggacgacctcgacaacttcatcgctccactaacgcatcgcggcttctcccctgcgacgcctcctcatctcccccaccagggcggcgtggaggcagggaggggtcggcgtggccaggggcgtggcggcgctagccccgccctagagtgtggtggacgggctcggcgatctcggcggcggccgggaggagggcgcactcctccttggcgttcttggcggcgacgttcttgattttttttgtgtgattttgtgtgactcttgattttcttgtgtgattttgtgtgactcttgtgtgattcttctggtaatcaccgtgacgatctgtgttcttgattttgcttgctaattttgaggattcttggcgcgggagcagaggaattggtggcggcagagggaaatcggtatggcgggaatgggttttgggagggtgaatcggggatttcgcgctacggtttcgacgcgagggcgaggctacgccgcccacaacgcgcgctacccgggtcttctcctcgctgcgcgtcctggatttcgcgaggttttgcgtcgctcacctaggggacgaggaacctagtttaggcgcgggtccaagtgacacggcggcaaaaatccaacgtggcgcgacgaggtcccggtccagctcaccacactgtgagagcactgtgagaggcctcatgtcgtgcatacacaagtactgtctagagtttgtcttcttggagaagacccagaaaaaccaacctttgtatacaaaaatgcttaatagacatagtataagacacccttggatactatcccatcgtcatgtgaagtagcaaactatgttatgatccccttgatcttgtttacgcctttggatttaagatatgtacttaactttttagattagatagttttacctttgtgttactttggataccataactctttatcaagtaatattgattacatcggctatcgcacaccaatgacctcaaaaagtaatatgtagatcacacattcaatatagggtaagttgtatgtgaatggataatagagttggaataattcatagtactagtatgtatcgctccataagttattttgttgtaaatgctcacttacctaacttaggtactatttgtttcagcttaagattattgtaatctcttattaaatcagattactctaaactagattataataagctgacatagaataagctgccaattgtttggtttctctggattattagaggcatctaaggccttgtttctttcagcttggaattattataatccagattattgggagtaagctgaaagaaacatacaacttattgaagtagcttattataatctggtgcccagcttattataatatgataaactcatttaggtgagctttttccagattattgggtgaaaaattacccaccatgccaccccactccctctttagacttgcaaacccaataatctaggctctaataatctaggaaagaaacaactaaccgcttattctactacagattataacaatctagtttatagtaatctgactcaataatctagaatataataatcttaagctgaaagaaacagggcctaagagtagtgggtctttagccactcaataatttggaaaaagctcctctagtgaagattattggattatactaatctagtttatagatttgttaacaaccaaatttggtaatatcggcatcgggaaagaagattagatcgaagcaaagtcggaggtggagatcgagttcggaaacagagcaggaatcggctagagtccagatcggttatgattaggatcggctgggtctgagttgggctaggtaagccgatgcagccgattccgacaatgcaactcgatgtatgacatcgggttgaattgaggtgcttcaaggtgattgccgcacatggatagagtcctgagaagtcaattgtatctattaattaggatgttttatataatttccttagagatatgcttgggcaaaagtctgccgcaaagacttatggtatcttggagtttgttagagatagttgtcgtgtctgttatggacatatcttgtaattttcgggtataaatagacccgagcactatgtatcttttaacacacacgttcaatacaatctcggtgcatcgccaccttttttgctttagttttatttcgacgagttcttgctttcgggttgagctgcatcggtttcgatcttcaacaagaggtaaaacttgttatggcggcttgcgttcttgggattagtgcttccatctttatgacactctaatcttgtttatgtaattcgtcgagttatcatatatcctacataatccttggcaatatcgatatccaacctacaatcggctaacatccgtcaatagaaggcagccgattaggttaaataccgatgttgacttagattatataggatatcatttatagatttaactgcggtttctttgcttctatttcttgttgattacaggatcaaatcaactggcacgctcatacattcgaaggtgagctttggacctgcactggagttaagaagacggctcggctcagctgagtaacaaaggtgctaccgacagctctctaggaaatcaaggtgacaattctcaaggagtccatggagtgcaaggtgacggggtgcatggagttcaaggtggtggtgcccaggggttgcaaggaggagatcttaatcagaatagtgatacggcacaagattttttcagtaatttccaagatcgggttgactacgctgtgcatcatgctttgatcaatcaatctggggtgttagtcaataccttatcaaacatgatgaagtccatagccgatggttcaatagctgagcatcaggttgtaggcccggtttatttgcaaggaggtgtctttccaaattatcggtctttgattaccgatgttcagccatcaactcaggcggttccctctgttgcaccaacatctcagccgacggcactggcatcaactcccctacctgctccatcagcaatggcgccaggccagccagtgaaccctcggttgttaatgagagagcagccacaacatggcgggcaggttgcgaatcggttgacccaagatcaggttgctgccatgtcacgtcccaaaatgaccctaaaatatatcctttaaattatgcttagaataattaaaatccttgtgaaagcctccaaaaattaaaatgtgcaaagttaaaagtcaaataaggcttggaggatttttgtatatttcctaaaagcctaaaatatgtaaataaattttagtggaattttcagagcacaaataataattgttaagaaataaacaaagttgaaaaggttttataaaaagaaaaacaataaaaccctccctccctctcttgggccggctcggcccacttccctccccatctctcctcttcccccgtggcccactcggcccctccccgcgcgcgcgccgctgatgggcgggcccgcccgccaccctcgctgacgggtggggcccacccgtcatctccttcctcccgccgctcccgccgcctcacccgcgcctagcgccgccgccgccgcgaatcccgccgcctcccgccgtccccgcgtgcaataaagtggggggaatcattccccgtgatcccctctccctttccccccatttctccctctttctctctcgcattcaaacgggcggatttgctcccgcaaatctcgccggcaccattgatggcggccggacctcccggccggtttccttcctctcccggccgccctctcccccttccaaccctatttaaaccctccccgcacctccttcgcccgtttccaccctttgccgcaccgtctcctcgccggaatcgagctcgtgccgtcgccctctctctcctccgtcgctgacgacctccggccggccttctcagctcgccgggaccgtctcctgtcccggcgtcgcctcgtccggcttcgccgcaccgccgtcgaccccgtccaccccctcgccgagctcgccgaccgtcggagcgccgccgaccccgttgacccgagccgtgccgccgccttcctccgctccggtcgcctttttcgtcgtcgccgtcgacctagggtgagccgtggaccgccgcctcgtttccccctttccctcccctctctcggccgccgctccgccgtgcctatggccgccgccggcgaccataggggggcgtgggcgcgccgcctcccgccgaccgcgccggcatggccgccttcgggcgcgccgagtggccgccgcgtgaggcccggccgtcagccgcccgcgccctcgggtgtggctgacgcgtgggacccacagcgccggtcgatgtgagcccgggtgcgcccggtccaccgtggaccgtgaggctgccacgtgggccccactcccgtggacccggtccgcgcgcccctccctctcggctgacgcaataaaccatttttaaattaaaatttaaatgaagaaattcgcaaatattcatttaaagagcatataaacttcaaatggccataacttggccatttgaactcggaattggaccgttcaagtctctaatttttccttaagaagtcaagaacccatttttgtgctttgttcctgcttgttatatgaagtgtcacgaccggaattaacccaacgggcattccttacgtgcatgtattattccttgtcccaggaggcaaggtacatcaaaagttgatacatttcagagtttatcaagcggaagcgtaaatagttaatttattacatgggcagcgagggcccagcacacacaaagacaaacgagaaacagcagaagactagggcgacgaccacaggcgcttgacggcaggcacgagctagacaccaaagccttcatcttccagggactcctcttctgggtttggaaaaattgagcaagactgagtacaaccaccgtactcaacaagacacacccacaagtgcaggataaatgtaaaggagtacaagggggttatgatataaagggttagggtttgcagtaaacagccttaaaagacacttagttgctcaaagctattttgtaaacacgtttccagagctatacaatattattaaacaaggctgtgaacccacacgagcctgccttaacccaaggcctacgatgattcagaccgaactggcaacccgaccctgggtcccagctcgtcccaagccaacccaggccatccgttccaccttttagttgttaagcaggttttaagaattaaaacactaacttgggtacattgctcggcttgcccataaccgagggcgcggctattcgaatagattatactctgatcagaggtgtacatctttacccacaagacacatcttcctcacgtgtagccacgtgccacataccaccacggtatacggacggaagacgtgacatagtttccaacccatcctagtcatagacaagagtaccgacccaaccccacctacggctggaacccccgggacaggtaggcacgactgagcccctagcagcaggacaccggccctgtgccatgacatctcgactaccgggccgcagctcgtgtagccttcatttgtcctagagatgtccatcgacccccgacttcgtccatctccatccgtgtacttttgtttataaccagactgagccacaaactaagccttacccactagacatgtggaagtatggtagtgctttgcaatagaggcccgaagaccggtccttatatggccgaggtgctactatcaaaaccatgcaccccgaacccagcctaaaaccattttggggattttgaatagagggggcggtgtgaatccaattccacaataatccaaccattccatagtgtccaggtgatgagaaaatcccacagtctagagttgtaaaaccacctaatgttgcctaattaaccagcgaagcatctacctaaaatcatactagtggtaccatgagtagagtgtccactagttggggttttgtttatgctagggtgaacaaggaaataataacaataacaataagaaggtcataacaaaggtaaataggcacggctagataaaacagtgataacgcgggaatttaaataaagcgatagtgcaataatttaaatcaaaataattttataaactgggattcaatatgttcaaggatgatgtgacttgccttgctcgctttcccaaacgtcggcttcaacttccacgaagagcggatcgtccgaagctgcagcgtctacacgaccaacggaaaagaaaaggcttttactctaataaactccatataacaagctgaaacaaagcacaaaaataggttcttgacttcttaaggaaaaattagagacatgaacggtccaattccgagttcaaatggccaagttatggccatttgaagtttatatgctctttaaatgaatatttgcgaatttcttcatttaaatttttaattttaaaaagggtttattgcgtcagccgaggggaggggcgcgcggaccgggtccacgggagtggggcccacgcggcagccccacggtccacggtggaccgggtgcacccggctcacaccggccggcgccgtgggccccacgcgtcatccgcacccgagggcgcgggcggctgacggccgg

SEQ ID NO: 6430 - DNA, 39391 bp, Oryza sativa
aaacttctttcagatgaagctaccgtcataggtacggttaagagaattcgataggcaactgcaacatttggatagaaatctgcatccataacaaacttcagaatctcaggcgcgaacatccaagaatctggcaaactcacttgcaacacctttaattctgaataaaaatcattgatctcaacatcggatgagatattatgttactagtattaggtgttggcacccccaccattataggccccctaccatcatgggcccccagcggtcgcctcggctgcatagggccagggccggccctgaccgtcggtactttcctacaatagatccagatatactccctctaaactatgcaaagggtgttgattaaaataagattagagttgaggataaaatgaatatatccaattttatatacatactagtatgttcccctagcatgtgtagacagtagactagatgacactgatgattgcttaaatgaagcagaccagggagctgtatcaaatattactggttattagaggccgtgttgtcttctcataaaatgtagattttatctcgatttctgttagcatgttttcaaattgctaaatggtacaataaatttatttttcaagtttataataattaaaacttaattgatcatacgttaatggttttctcgttttacgggcacccacttcatcatcttcatcaatctcaaacaccaccataaagtagatactatatactccctagctaaaaaagtacccatcaaaggataaatgtagtaaacaggaaaagttaattaaaccataaagatatgccaaatgtcggttagctaacgttttaaattaacaacataatgtccatgcaaaaaataggatagtttcccaaacaattttgcgcaaaactagattttaagagttgaatttgacatgtacaattcttacttctatttttacaaatatggtattcttttgtattatacaactatatcaatcaatctacatggatagaaaccgtacacattacaatcaagcaatgtatatttctctctctctttttatcaatatgataatttttaggtctcagatagtttttttaaacttattttagtgaatgatttttttttagcaaagggcatagccctccatttccattatagaaaaatggacaaggttctacaaagaaaagagtcttcaggggaacctccccaggtgctcacataacaacttattttagttaatgatataatagattgttaattatttaataggattgccttgtcctggaagtgatattttgttcctctccagccagtcagcatagcacgtatgagggcactttatgcatatttcttttggctcttttagttttggaacccaactttttgatgaataactaaagtagtcgttgctttaccgttaacttttcgcttttagattattggattgagaaaagaaaaatatcttgtgattctacgaaacaagattttccatattccgcaccgtacagtgagtttgcacacatccattatagcgatgcaagtgggacggataagcaggttattttcccccacttatcatacttatgttttatttttctttcaaattttatattactataaaagaataactgataaacatgtatatatatatatatatatatatatatatatatatatatatatatatatatatatatatatatatatatatatgagtatcaggattttccacttacacccctagatacatatgatggtgctggattagagttgtccatgacatgagctcaccaagcacacgccgatctcaaactcagttcaacagtaaaaatgaaacacaacccaatatagattaagcccaattatggcctatacagtaaatgtgtattaagtgtggtgaataatagcccaatgcaatgaaaaaagtttttaagtttcctccaaaatccacgtgtaatgacttaggctgcgttcttttgtgtgagataggatgagaaagcacatcgttttccgcgcgcacgcttcccaaactactaaacggtgcgttttttgcaaaaattttctataggaaagttgctttaaaaaatcatattaatccattttttaaatttaaaatagttaatactcaattaatcatgcgctaatggctcacctcgttttgcgtatcttctcaatctctctgatctccttctcctcgaacacacccttgttgcatatggattttctgaagaaacaaacaaagcaggctgctgcttaatacacacagcaattcagagactactggctgtactacctcccatgtgtccaagtcccgtcgtcgttcagatagatgtactaccacgctagtgcctgctgctggaactgagaacgacctggaagccattactttttgctgatcgatcgagcgtgctatatcgttatatccaggccgagtgtatctagggcgagtggcgatcgtgcagcacagctcggatcatgccttggcagcggctaaagatcatgcgcccggcgcctttaccgtgcaccatcgatcacaacaaacctgcagacctttgcatgctagctttgcccgtgagagcaaaatcagtcaaaaacccgagagttttccagtgacaccatgacagcaacgtttgctcggttcacagagcacatgggagggcttcaccgcttcaagtctgcatgatgaaacggccgaactcgcttatggtcgtcgtctcgttgcgctcaggcgcggcaccaattaacgttacctcgcgaatccatggtgtggtcaactcagcgagtcagacacacaaatgacccgagtggcaccaattccgcgtcaacttgttcgcggttctaccggtgactagagtgagctgcgaaattttgtttctttctccctctctcctttttcagcatcccatgctgacacgaaacacttgatttcccctaaatttccttctcaccttctctgccactcgatgcatagatgattgtttctgcttagtattaactccagtcatccaatgattgtcttccttcaatgatttgttagaaaggttttaactgctgatcgagcttgtgtctgcaccagtaagtatacatatcctgtaaagttgttgtctcaagctagtgacgactaacaacaagcgcgaggtttgttagtggcttgtagtggtgactggtggcactgcaatggccagatggtagtgcgcggtgcaactaggatgttcttgccgatgttcatgaggctgccgccatgcagatcttgtcaaagcactaagatcaccctcggggcgattttgtctggatcaggtggctcgcagccaatccggaattccagcgcccaggtgcacgcgaaggccggaacgccagtacgccacgctcatcgtgctagagtcatctgatggtatcatggaagagcgagcagacgggaagttgtggatgtgggagagcccgtccgcggccaacttgccgcagattatgtgcggctccgcatgcccagagcgcaacggaggagcaattctacggttcttgagtagataccatgaggtaccaaaaatttagtataaaatttgatacctcatgatacttcatagtaccgaggtatcaagaggtaccaaatttacaatagaaaaaatggtacctcatggtaccttctcaaggaccgtaaaattgctcgcaacggagacggaaggacttggtcttagacggtagtgacatacaggaataagtctacttttgactttcttaaaatattcaatctgatttgtactccctcaaccacaatacagatattttgaccctttaactattaaaaccgaggtagtttaactcccttagtactttttgttgacgtgacttgttgactagtctggctggctgagtcagcaaagggacctcaatgtccattctttatcctattgtcctctctctctccgtgggcgacaattacttccccctccttttctatcagtcatagggggtgaacaatggcacgctcttgcacatccaccatgagctcgtcgacatcggcgatggcccctcttcctagcaaccccccccccctcaactctcttctactttttcgggttttcccctttggttttcctcctccgtcggtatcctggtgaacgcttgggaggatgacggccaagaggtcgaacatcgtgctgctgagcaggtcagcgcccgccataagtgacatccacatccgttgtctccttgacagaatctgcttgttggtggctgagaggacggcggcggttgctaccctagagcagcgatggaagcaccaacccttcacaagagctcggacgttgtgttatagggccagccaacgaaggcggagtccgtttctgcctctctagtcctcacgccgtcgacaacccagccaacaagagcacgattttttctgcctcctcgccgccgccagccaaccatctcgttgtgtgtccccaagtcctactgttgcgcctacttgatgttctccgctgtgacggtggcgtcgcacgtgtcatcatcgtcgtcgtgctcaggcatcctacgccttctccactgcaaaggccactgtgccgcttgccacttggttgacctgctccagctcctgctccacacatccctattgtttccccttgcttaccgtcttcaccattatcctctcctgtgcctagtcctcctgcccctatcatgcgcgccctctgtgctaccaaccagcccgccttctcccaccgcccttttctgcccttgctgccatcgggaaggatactcccctcctaataccatcagtaacttaggacgaggctgctagcttggatagagagggctgcttgttcgtcggcgctggaggagagaaggtggcggcgagcaaaaacaaggtgaggagctggcagtgtatcggtatgggaaagagggggagaagaaagagagaggtcactgatatgtgggcaccacatactgactcaggtagtttgatcaaataaaaagccatgcctgcgaaaattgctcccaaattgaccgaggaagcaaattacaccagttttaatatttaagggtcaagatatacaatataacgttgaggaaaacgaattagattggagctatatttgagggagtcaaagtgcacttatttctaacgggaagatgaggacagtgcgttaaaaccgaggcagatggttatggtccggatctagtgtgggccagaacggggccgttcagcgtagggggtttaacatggatgtttcgccttctcggtccagcggctcagtttagaagaacgcgctccgacgggaaaacgaggtaccccactggggccgtttcgtcttgtactcttgttctcgctccctcctcccgcggctagtccggcaaatcggccgatgtttgcaggcctgcagccgcctaacgttgccggaagagggcatcgcgatgaatcatcctccccacctgacccagcctcctctcctcgctaccttctctccctccgctggaagcgcgagatatcaaagtcggacttatcctttggccactatctaggtcctacgatttgggatctgatgcacgccaagcgatcggagctcagcgaacaccgtccaaggcactcgcgaggaggccccggaagcagcagatgatgaacatgaactctccacttctccaggctccaggtacaaaccaacccttttgtggctttctgcttgtacgcattgcctgatgaattctgtcaacacactccacgcagtacatgtctgaaacggcattcatcagactagaagacaatggagatcggatcaactcctgaaatttctaatatattgaagggatgatatttgaacattacaagctcttggcacactaaccaccacacacttcccacaatggcatgttactttctgaatcacaaaagaaagcaacagaaacagccatacatagcttcaggtagctttagcctaagctcacaatctcacattactcaacctaatagaaacttcaagcttactaccaaaactagtggcctcctcatacttacagaagaggtttatatatctttcgaccacaatcactaagagattcagaacaacatcagactgacaatgctaacaatgccaagcagcagcccaatacttgccttcaacccagcagctccattcaagccccagacgcgcacatcatcgatcactggcccacagagcgagctgtggtcgtcgcttctcgtgttgtaatacacactgtagaacgctacccgcgtcctctcagctcgtgctgtgaatgtcacattcgcagcctggcttgtggcattacccatgggcgagtagtggaagttctgggcctggtcacctgcgaatgccatgacagccattggtggctggcatgaatcccctgctgagcccaatgtgaatgtcaggctgtactctttctgaggggttgtctcgaccatctgtgagatgatgccttccttccctgatagaagctcaatggcgcgcttcccttggggaacggtgtattggtcagagtcgacaaagcggacagctcggtttgactcaatcatccagccaggcaaggcagacgtctgctcatcgaggttggttgggagaagcaccccaaagctcgtgtttggaaacatccatggaccctcctcaaagtctccatttgacaccacagtatctgttgaaagaagacaataccaagtgatgacttaagaaccatacaaactagagcacctctagctctcttaagacatcctgtaaggatatacactctaataggtatagagataagcagaactgtcataccctttggtttgtctggagtgaagagcttctttatggcaacgttgtcaaggataggtccacaagtcggatcatcctccataccagggttcctgaactcaaggctcgcctgctcatctgttgcctgaaaagccaatgcatatgcatcccagccttctatgttgtacaatgtctgcaggtccactgtctgtgatgcaccaccgagcacagacacattgagtgactctagctgtgcacacgttcgggcagcactgaacgtgatagcatactctgagcccttctcaacctgcaccacctgccctatacttgcgtcgtttccaagacgtacagcatgatcccctgaaatgaaaatccaaatattaaacatgtcgaatacaaatcagtggtgcaacttgattgatcagaggacagaaggagaaaagctctgtaggataccctgtggaacaataagaatcatgccaccctggtgctggcctgctgagatgagctcgactgtcccattgatcgtccagccagggatcgatgatgcaccttcagcaactgaagcagatttgacaaaaccaccagctggtgctgtctcaaagtcaccattgctgagcaagcctgttgtgcaaagagatcacttgctcatgtaagtgccaaggtcaatttagatctccaaaagtaacacagctgcaatccaagaccaagaggcagaaaatatatttctcaagaactctacttaatatctacccatgttatatgtgaaagcgttcccatgcaagtgaagccaagtacatctactgcaagtctgcaatgcaataaaaccataactattttaagttgtgtagctctacccttttgtaggataggacgaaccgtaaatatgatcccccactgaacctagtacacaatgcgctggactatctttattatgacatatataaaataatgtacaactcagactgaattgaatggcactgtacaactcaaatcaaatgcataacagtgacaaaaaaaaataaatttcagataaaaacctaggacatttacgggaacctttctacggaaacatgtgtaacaagtgaaatgaaccatcacagtagagtttgggaaagttcatttctaggactggtttttcttataagtgagtgacttctcaagcttgtttttatggctaccctcccagttgaaagcacggttgcacagataaactgtaccataattaaatctcctgtgccaaaatttaacagctaaaacctctaattcagtactataggagagaaaacatgtccatgtttttctattgtacatccaatgcatttcattggggcactgcgggtaggccactttactgtgcttcaatgtccttacaaggacagccatgtgactatgcacgacgatattatgtggtgaaagtgaaacatccaccaaccctaccctatccaccatcccaccatggagagcctcatgcagtggtccagactccagagctgcccatgtccggaggaaatcaccacggcccgtagcgtaattctggggaggttaaggtacgaaaaattaaagagacaggcatggaccctcacggccatccttttaataagccatttgacctttttactggacggttcattgaacgcgtttgcaggacactggctcactggtttctgctgctgtgctgttcggcctggatccaagtttactactacgccacatttcattttgactttcatgcaacttcgtccttgcatagaggttcataatacctcctttggacaagataggaaactgaaactctttcagttacaagcctgaagattttctgaatctttcaagtggttttgttagcagcattctgcacccaacagaatgtctctctcatcatacaggacagctcacttgggggtttttagtcattttcaaacataaaattgcatgaatcatagaaaaggaataattttataaaggtatatacatgcagactaaactcaaaggcaagtaaggaagggggatgtgtattaagcaggtataaatatttttatccaattaatgtacttaaaagaagtggttacactggtcactgcaaaaaactacattcccaggaaagctttggcacaagtggcagtataactggtcagtttttggctgttcagacttcagtaacaggacaggtttggataattgggctgtgtctagttcagcgcaaaatttggattttgattgaaattgaagatgatgtgactgaaaagttgggtgtgtatgacaagttgatgtgatggaaaaggactaaagtttggatccaaactttggatctaaacacagccttggtaaatgttatctcagctatcaagggccaaggctccttcctactttctaggacctttactttgcaggtatactgaaccatatgctctacaaaaagagaaaaaaaaataaaggggggggggctatcacactccttcctcacgagtgcaaccacatctcttgattcctagggcacaaagctaacttcttggcatgctttaccacaccattttcctaggggattatttttctcttctcctacccacccttcaaatttctcctcagtgctatgtatatgtgctaatgaactccgcatttgttatacaaatgtgggatgcggagaggtactaaatcgcatgatttctctatttgctgagatctgtgatgcagaaaactacccatccccacaaactccaaccaaatattccacaaatatgtcaaaatactgccttggatcctccagcatcaaaagaacagcagcactactgatcctccagcaagggcaagaaacagaaacgatcgaagagacagcaaagcataccatcctccaccgcagcggccgaggccagatgggagggcgccagcagaagcaggcccaggcacagccccagcaatgcgagcctcctcgccgaatctccctccatctcctcctcctagccgcctcgagctctcgcctcctccttcccccctcgccgaggaagaagaacagtggagagagtgagccgaagtgcagtgtgtgtgcagctgaccgagtgagcgagccgagccagtcctactctcactgggctggaggcagctctctgctcacgccctgctttttatgggatggcgattcccttttcctttggcactttgctggccacccccattattctatttttctcgcaggcgtggggtctgaaaggaaaggaaggaggagcagtgaccactggatggtgagaatggcgtcgatggtcaataaaatactctagaggtcaccctgctgccttttgcttttttcgcagcgttttggtagcactttgtcgagcaccaaaaaaaggcgccgctgcccacacgattgtagtacagtagaacttgcatgtgggtctgtttagtttatgctaaaattaaaagtttagttgaaattgaaacgatgtgatgaaaaagtttaaagtttatatgtataaaaaagttttgatgtgataaaaaaatttaaaaaggcctgtgtagtgcagttgcgttttgcccgcagtccctcaccagtcagggaagtcacgaggcaatgtggctgcgaagagcatcagatatttctttttttctaccagtaatatgctcatccgtgaatgtacgacaaacaccgggacaggatagaagcatgctacctctatctcgagatataactatttttagcacagtaatttatcttaaaatgaagccgtttttctacctaccctctcctatcaaccaattataactattctcttcacttactttatctaatccactaattacaaccctccttcaatcatctatacctattccatctgttccaaaatataaatatttatgttcagatttataaccaaaaattattatattttagaaagaaggtagtactttttaatatctgtgtctatcttaaaaatgattatattttaggactccagtgattactgattagcgatgaatgtacaggtacggagccacgggcacacagtgtctgttgtttgagacaagcatcaatggtaaagatagcgccagaatattgtttgtttacatttggtatcaccaatgtatatttacagaccagtaaataaggtagacccaacaaaaataaacatctttaaaagttccataatatctagccacaatgataatataaagtttaacaacaaccagtagcatgaagggagagagtgaagatcaatacatagcaaaaaaaaaaaaacaatgtcttttttatttcttacaaccgggttgtagtgctgagagctatttactgagtccacaatacttactactggtaggaatattaaattattgcttattacctgatttgggagcacaatgtggatgttctttaccaacctgaagagaaattgggtgtgcttaatgtataacagaagttggtcttaaggtgggtcccactataatatattgtcaccttcacaatgtaagagcggttattaaagtgagcccctcatttcaagatagagagcaaagtatgagcggaaagagatgaatgatatatttgtttattcctttatgtctaaaccttatgcacaatgctagctcataaaaatgggcaagctcaagtttgtggtgtggatgtatgttgtaaccttaggagtcggtccatgaataatggatcatagttaaagtaatcatgtctaggatttaaacacaagatgaccacatgagatgaaaaaaagaactgcttcggctcttgtccatcaggtgaataagagagaaatactttctttttgcttgtggtagattttaagcacaagatgcaccttaagttaatgttaatttacatgatgtatgtgattactttttaagtgtaatcattgttttaagatcactttcaaaatatactcctaagggtatcttagaggacttagtactctttctatttttacattgtgccttaatcctaaagcagtttcagagtccattctgttttgtttcctttatatacgcaccgtttctgggtacatatgattgtggagcacaatgaacggaagggaattcggcgacggctcaagtgagattgtacccgcgtatgctctcactttaggtaggtggttgcagacagagcggctcaaaaccatcaacgtctgccaaagtgagacccaattgagtaaacaagtgagcatgccggcgatacgggtttctataatccaaagtgtgttatccactatgctggtcagtggccagtggccactttcttctatgggcttcccggccttactgagaccatgtttgggtcattaagtttctggattaaaattagtatccggacaaaaaaaaatagtccgatccatagactaaaaaaattcaaaaaaatttcaaataagatgtacggtcaaagttgagcacggaaaaccatgactgtacttaaaatgggatggagagagtcccctaatataagtgattttgatttttttacttgcattatttaaccattagtcttattaaaaaaattagaattattatttattttttacttacttttttatccaaagtattttaagcacaatttttcgttttttatatttgcataattttttttaataagatgagtggacaaaaccaaaaaaaaaagatgagtggagaaacagtgtaagtaaaatgttaaaatatcttatattataggatggaggaagtaaaatggactaaaatagagggactaatggattaagacccacgaagcaaacagggtctgaatcttcggattaataaagtactgatcgtgtttgtctttgaggggctcgagcagtcgagtagcgttcacttttgggtgcgcaccatgacacgctgctaaccgacagtgaaattcagatatcgaagtgagggtgtgggacgaccgggcggggtggaacgctgctgcacagtgcacacagacacacacagctacacaccgacacattttctcggcgctcacattttcacagcggtcggtcaaacttggtcagtactacttcgcgtagagaacgcgtcgtcgattccacatttctactctactgagccaggcagatgatgcaaaatgccgtattaaatcaatcgcaagtcagcagatccgagcagtgaagttggtttatttgtgtggaccaacctatgcgtgtacatcatgctgtgcaggatacaagatatcatacactatcgaggatctcaggacacaccgtaggaaaaaaaaacttactcctggttccagtaagggcttattcggatcacgggattgtaaaaacgtaggaataggaaaatcgtaggaatatgataggaatgtatgtgtaaaacagaggattgaaaaacacaggaattctgtagataggattggtaaacatgtgttcggataggcaaagaaaaaacataggaaatggaaaaaatgaggtaggagtggatggaaattttcctttgtttctctattgattccacatgaaaggaatttttcctctgatttttctttgggtcgattcctatgaaccgaatgtcaggaaaggaaatatttcctatctacagtattcccttgaaaatcctacaaaaatccctcaatccgaagaggccctaaaatgagtagacttcacgccaatacaaaatgcaaaagggaactagtgttactcctacttcatgccaaattggcaatacaaattacaaaagtactgcaaaggtccagcagggtgagaatgaaagcgcgtaccgtaataaactgttacggtaaaacccaggcgtgattcgtgaaagcgcgatagacaagacaaagctagccggcagaaattcctggtagccgctaccgatgtgcaacgcatggacaaagatggccatgcgtcgagagttggcgtgtaccccatacccctgtacccatacgggccacacacgtaccacgccatgatacttaccatcgcaggcaggcaggcaggcaggtccactcgtgatctgcgacccgagagaccgagccctgtgcagatccaccgtcgtcatccggtggattttctgcaatgccgcgctctctccgaagttacgacgttacgtagtaccacgacgtaccgcggccgcgataaaggatcgccggctggttgggcggggagcctttacgagtggccgggccgacgcacgttgcggcggtgcacgctaccggagaattcggcgctcgtttgcgtcccaattgatttggtcggttttccctgcaccgtttttctgtcgtggtaggtgcccgtaccaccggcagccggagcccaatctgttccaggatcagatcgatcgagccccgagtcccgactagcgtgcggtgcggaactgctccgttgtaatgcttgctgcctctgaaacgaaacaagaccatcctgaaatgatgtgaaatgccccgtcaccttttgcgccaactttgtaggcctttttttttaggtttttctgtggaaaaggcagggatttctccggttttcccgacacaaaggtttcttcacttgcaagactacctcctgtctacgcaccggttccagcatactgattctgtctgttccatattgctcactagacaacactactatcagtcgagatggcatatgagcttgttaattaagaagtatacttttgccaaagaaacagaacaccggggtatccttcgacaggggaaaaaaaggaaaagcaaaactcaagtggaacatgatgctgcatctctctggtagttgagatttgagagtcgaattagagcagatacaatagcatgctacaaaccagctgcaaacatattttaagtagataaatgaggagagagaagagcagcgggctacagatttataaccagatgtagcacgaactccaagatacagtgtgtgtatgacaggtgggaccatgtattaatagtgtagtatgtaactattgtatgaatgagctattagattggctatagatgaaattggagctagtagttggctatactattgaacttgctcttagaggacatcaagcgtcgccgatggcgcgggcgctgggcgatgccgcgtcggattgcaatagtgcgcggggtggaatttttgcgaaaaagtccttcgcttttggtgtcattcgatacatgtccttcacgaatagtacttcgagaggatgttttatgtggagacccttataaaaatcggatattttcattcaaaggagagaaaaccgtaaatttggactgccctgtaaaatcataagacgaggggcttttttgcaaaatgacacccactaacactaaccaccccaaaccctagccgccgccgtcccctcatccctctcgtctctctctcacctctctcgctgccgccgccttgctccgcctcccgcttgcgctgccgcctctgcctcccgcttgcgctgcctccacctccgccttcccctcgcgctgccgccgccgccgtcgcgtcagcatctccgagagtctccgcctcgcgccgtcgccatcgccgagcacgagctttgaggcgaacatggagaaagtgaggaggcgagcactcctctcctcttctcctctcgtccctcctctgcatgtcgtcaacctgccgccgtcgtcgctgccgtcatcaacttgcctcgggtttcgtatggggaagaaagagggggaaaggggctgccgacggccgtatgggggagaagctccgctgtaggagggttgctagttgacgcgcgcgcgcgccagctgctccccggcccacaaggcccatcggccttttatttattcacgattttttcccttttttttgattttttcttttttctttttttcttttttttctgattacttttttaaaatctttagcacacgtattttttttttcaaaatgttttgagttgaaagtttttaaatcatatcttgaaaattttcaaatctgatttgaaagttttcaaatatcgagttgaaagttttcgaatctgagttgaaatttttcgaatctcgagttgaaagttttcaaatctgatttgaaaatttcaaatctcgacttgaaagttttcgaatctcaagttgaaagttttagaatctgagttgaaagttttcgaatctcgagttgaaagttttcagatctaatttgaaaatttcaaatctcgacttaaaagttttcgaatctcgagttgaaagtttttgaatctgagttgaaagttttcgaatcggaattgaaagtttttaagtcggagttgaaagtttttaaatatgggttgaaagtttacatatatatatggaaaaattcgaaaaaaaaaactaaccccgtcttgagccgtatgggccggcacgtgcgcgccgcacgcgccaattagaatttccgctgctgtaacccgcttcccctcccctcgagcctcgacccttcttctcccactcgtactaatcattcgctgcgagagagagaggaaatcgtgaatttcttcgacttaacgcgacgaaaggaattaaattaccatgactccagtccagagcccacaaacgcgttgtcgcccgcggctacaggcgaaagaaagattgacgcccgttaggcccattagtggctagcgggccgtttaacccttccagaggcctctcactgcggagagtatatagcccgtcttgcaacccacgatgaggactcgagcacgcagtcgcacctcccacccacccgcagccgccggcgagttcgagcggcggccaccgggcgggcggcggggcggcggctcggctcccctgatctccctcccctgcgccgctgcgcggtatggacctccaggatccagccgcggacgccgtcgcggccgagccactcaccgtcgccgagaccgacgaccagccgccgccgccagcgccgcctctggaggcggagggtgttgtcgtcgcggaggaagacccgctgccgcatccgccccttgaggtggtggaggaggatgtggcccccgtcgtcgcagaagccggcgccgctgccgtacctatggagccctccgaggctggcgcgggtggtgtcgtgctcaccgacgagctctgcgaccggatcgtcaaacaggtacaccagtttccggtccttccctctgttggctatcagatgttctgttgtatgctcctgcaaagacgacggattttttgagatgttgtgctatccatacgtcaaacgttccatccttgcaggtggagtactacttcagcgatgagaatcttcctacggatgagttcctgattaaattcgtgaagaagaacaagcaggggtttggtaagtggcatgcttttgcttcatgtagcgaaacctctatatattgtgatgctaagtttagatggtttagtctggtagtttagaaacatatgtatttgagacaggagccatgccaagtgtgtagtatcttttctccccattttgaactgcttgtgatgcgccctattattatttgcctgtattattttgccaccgagataattgtacttaggtttatgacaggtttgcttttcgcataaattgcattctagaagtctagaaatagatgtggtaattggtcagtaatatgtatatgattcaagttctgaaagctcttttatatcccttctctctctcttttattctatcctccgtgagacaaggtgtgactcttctagctcctatgtttctgcattattttgccttgtcgatcatacattagtggaatggaggtgaaaatgatgaaatatgacaggtacttatgagaggcatttacataggtactcctggtgcagctttctttagttgtgccgagaagctagtttaggcctctgtgaatactggtttactgttgtctgattcactccattctgttttgaaattataatcagggggactttttaattaataaaccatgggggctggctatttacttatttttgttgtttctctcttttcatggtttctgtagtcagttagatttcctcacatttagtttgactgtcgggccatgaggatacatgaaacttgatcccattaccgatgttgtctggtattcttccatggtagctgagtcaagctgttgcagtgggaactgatatgctccttactcatctgagctgcccctttttatttgagcttcacaattaaagtaggatggattagttttgaactctttgattgatcatttacagcaatagtttgctgccctcattcatagattgggacaagagctgcaatcgttttgcgagacatggaccttttttttttctttttagcagcctgatgttctgtatgtatcatatgcgctggattttgtacatgcttgggaagtagcttgtaaacaatgatccatgtagcactacttattgcatgacaactcagtggcatggtgtggaattatacttttaccttttgttgattttcaggtattaaattctttctgaatttctaggctgtaactggtatatcataagtgactcgttagatatagggtactcttctgtcatgaatcactaaatatatttacattaggtcgggtgaattaagtgttgcttagcgagtttatagtgctcaagtctatatggattgatgttcattagggttaactttcatcaaatattatgtattatatgaagtaaaatctcaaaggttcttctaattatgtgctatctttggtaatagttcctattggagttattgcctcattcagaagaatgaagaaactcagtcaggatctctctataattgaagctgcacttaggacatcatctaagctggtaatatattgcccatttattatctatgctttggaagtggtgcttttggtcagtgggagatagatatggttgctatgttaatagttataatttaaatgtatatcactatatgctgttattttgttcttaactttcaggtcgtgagtccagatgggaaaagggtcaggaggttacatccattgccaaataatgaattgaatgatgttaaggtcaatttccagcccactccttgctgaaatgcattatttatatgtattgtggaatatctgtgttctaagttttaactttaacttgcacgcagaaaaggatagtcgtggtggaaaatctgccttctgatttctccatggaaagcatacatgcgaaatttgaaacagttgggaagtatgttgtttgcttgtgtttgtgatgctatattgttctgaggacacttaatgattgatgctcataatatattgttttggaactgtactttatcttcatatgtgccagaattgcgaagataaccattcatgatcaacattcagtgggagaatctgcaacaattaagaaccatgacatcatgctaagtaacaaggtgtgtatcagttattactcagcgacattttcttaaaagatcttatagatacccaaactacagcccttttgattttactacctactgattgtagtcataggttcgtaatcgataaaataagtattgtagccatgggttatttctgattgacccgccatacaaactaccactcgttgccagtcactgaatggaaaatatatttgataaatttagtcatctctagttgcttttacgtctcctgaataaaattggatatatcctttccttcacccagtattcaagttggtaataggtcagggttgtgcaggtgcatgctcttgttgaatatgaaacagcagaggcagctgagaaagctgtgagttcccttatctcacatttaatggcccatttgattcccagcgtatgaatacatcttaaagattgttgtttatgtgtgatcaaattaggctatcaccttaaacgatgggagcaattggaggactggaatgaaagtcaggctggctaagcgaaccgtaggatcaggaaagcataaccagtcttcaaaagaaaatcaggccatccagggccagccttcaaaagtagagcagcagatggtatcagaaaagaatggtggtactgattcagtggagagtgctttcgacaatgagaatgtgaactctaatatttcccatgaggtttgatttatttcatacacctattgttttttttcaattatccacttggcacaattatgtttcactttctcttacgtccatcttcaccctttgcattcccttactgaactgcacacatgatacaagcatgaagttcaaatgtattattctatttagttttttttttcatatttagatgctatgatcaggaggttgtgtcattgttctgcaagtgtctttgctcataggtcatttgtgcatatctttaggacatgcaccaacaccaaaaagtaaatgctaaaggaggacgaaaaggtcgatataaatctcaaggaagaggtcagattcagcaaaatacaagtgggcaaggtaaactgtttacactattttgaccctactaaatttgtagattatttgggtgatacattttatgccactgagtttcatccaatatccacaatatcagtttgttttgcactgagtgaaatgtttctcagatgaactccatttgcacatacaacttaagttaattcccatgtctgtgcatgatggaggcaggaggcttcatggtcaacatgttactctgcttctttatggaaaaaaactgaacaatatttattatcttaggcaactaataccattgtacacatctcctcacctagttttttgcgcaatgatatccttgttcatttccaaagctaagtctgttttcatcttgatgacagtaggttcaccagacttacattgatgtaactagtttttttttccctacgggtatcttttaacaagagctgaagaattcaatcctgacagttcttgctgtaaacacttgatattccaaatgaacacgcagaaggaaatcaagatcgatttgtagttctctagttttgtactaatgaaaaatcaaatacctgtgattatttctccacatatgtattttttaactctatctggaatatgcatactgatgatttttcatatcaggccatgtctcatcccctgccacttctggttctgatcatgtgaacaagcctattcctggaccgagaatgccggatgggacaaggggctttacaatggggcgtggtaaatctcctacattccagaaaggggataatgctgaagaatagtgcttttgtcccaaaaagcctggtaacaatctaaccgcgtgaaaaacataattctgctgttatgctataagctgtcttgcttcgtgtaagaacgtagggacatgtcactgatatagaaaaggctcttattttttatgtagtgtcttttctgaattaactggtgctttagtaggtctggtaaaaatttaacctcatgaaaaacatagtactgctgttatgctataagctgtcttgcttcgtgtaagaacgtagggacatgtcactgatatagaaaaggctcttattttttatgtagtgtcttttctgaattaactggtgctttagtaggtctggtaaaaatttaacctcatgaaaaacatagtactgctgttatgctattgttctctgagtataagaacatcggcacacgacgtttacagaaaaggtcgtagtgtattttgtgaattcaattttcgaaattacttcagctgactagtaaggttttaccgccaattgtgaagccgttgttccgtcattatttctgatgttctaggttttggctaccatcttgtcctgattaatacgaaaactggatagaatattagagcaagaaatagatgcttgaagtgtatgtttaaactatttaggatgcacaaagggtaaacaataaacagatcgagatccgaaacgctttcagtggacttgaggcttgatttttggagcatactgtgcaccgtgttgatatctcctggtgaatgttcctctgaactctgaagtgaggagccagtagttacagtctagcttgtatatgtaaggttaatcggctgccgaacaggcagaaaactaaacagtcagcgcttgttcagttgatccctctcccatggggattgaaggaattaatctctcagttctcttcaatcccctttctcacggagattaaccgagcaagtccttatgggggctgtagtaccatatcttcgaagtcttggtctccagtctccagtctccagtcaattgagctgtgctgtcccggtccagtggtgctgtgctgttacttttaataggtgcattgctgtgggaatttattataaaaacaataaaaaaaataacatgtaagatagctagataacatcagattaagtaaattaatacggtttatgataatttagatttaaatagtatgtagaatggtgattcaaacgtaaaaagtaaggtggtataactttatggaagaagaaaaatagggagatagtttggactatagattaatcatctaaaagctaaaaacaattgatgtgatatgacttaattagaggaaaaaagagaaagataatttgcaccatagattaatcatttaagcactaagtgaggatgaactatatatttatataggatattataaaacataataaaaatatacattgaaacattatgtgaattatgttggatgataatttaacatgtttgtatttgaaaagctcttaaattataaaaactataaagatatagcatgttttcatgatgtttaaatgtgatgattgttagtggatgatgagtaacatcttgttaattagtggatgatgatgtggcatcttgttagtggatgatgatatggtatctttgcatgttaagtttaaggtattagtggggataactttatagtaagataggatgtgttaaggaatcatctagggacatgtgcctatccgacaagtgaatggagctcccgagggtgtgtttagtttgcgaaaagaaaatttttgggtgttgcatcgaacgtttgatcggatgtcagaagaggtttttggacacgaatgaaaaaactattttcataactcgtctggaaaccacgagacaatttattaagcctaattaatctgttattagtacatctaggttactgtagtacttatagctaattatggactaattaggcttaaaagattcgtctcgcgacttgaatgcaaaatgtgtaattagttttttatctgtatttaatgctctatgtatgtgtcaaagattcgatgtgatgttttggggcaaaaattctaggaactaaacataccctgagtaagaatgaacaggtcagatccgctgaaacaagcctcattttcatgaccagactagtgtcgcagcgattttactgcgatctgtcaccaacttaatacgatgttggatctcggttcctattcagaattgggattccatgagggccactcaggcaggaacaaagcacttgtgatgcctgcgcgcaggcaggagcagaagcaggaccaatccactcattggttccgcagcggcgtagccatgcgctccaaccatgtgacaacgacacgaggcgtcgcgggcggcatgcatgcgtgttcggttcatggccagaggaaaccaagccggtctctcggatacgtatccggccgaaagagtcggccaaagcccgtggtttggctacggcgctgcgccatctcacgcacatcgtgcagaacggtgggcgaatcgtggcggcacggatgcccgggcgccgttcgcctcgcctggtttacgaagcagtgaccggcatgcagatgaaaggggccctgccggctgcgtgctggcggcggcgatcgaacctgaggttttttgcccaagcggaccgtatccaaaccgccgtcacgcgggcaaggcccaagcaagccatgtgctccaccaggccatattcctctggtgacggcaacctcgctgcgtaggccggtaggcgtagatatgccgatcgactaccgtgcaactgtcgccggcgagttggcgaggtagggctgtacttacggtgaagtaacgtacactggtcggatcgtgtccccatataacaggagattgcagcctgctctctgcaatctacagtttctcgtctgcactcctgttggaaggtacttaagagcaatgctacacgtactatatttttcttactaaacttttactaacaataatctcaaccgtttgatttaagtagatggaagttaaaaaaatctagatgcactcatagcatgacacatcagtgttagtaagaatttagtaagaaaaagtcagtatgtatagcttttataggtgtaaagttttagcgtgtcagatcagatatacggacaccacctaattacagaatccgttaataaactgcgaaacgaatttattaagtctaattaatccatcattagcaaatgtttactgtagcaccacattatcaaatcatagagcaattaggctcaaaagatgtctcgcaaattagtcacaatctgtgtaattagttatttttagcatacatttaatacttcatacaggtgtttaaacgcttgatgtgactgggtgtaaaatttttgtgtgggatctaaatagggccacaatctctcccttcctggctcctaagctaggtgtaattttacgttgctcttcgaaatagcgggcatttgatagcagagaggttgagaatggaaagagcggagtcaaagaggcaccatgatactactctctccgtttttatgtttttggtttgtgctaggttaaatattttcaaatttaactagatttatataaaaaatataacaatatttttaacatcaaacaattattactctcaccatcttcgagtttgaccaaatttaaaaaataacgtagcaatatttataaatattaaatatatactataaaagtatatttaatggtggatttaataaaattaatttgatattataaatgttgctacattcttttacgtgattcataaatataaataagtttaacttagaataaaatcaaaatatcttgaaacttaaacggaaggaacacaagtgaggaggatgagaggtgagaatatgttgtttgagaaatggtatatgtatatatgtatcacaagtacccccgtctcataagatattaaattactataaatctgaacatacgagtatcttatatttgtatctatcttttttttatagagtagtacgtttgatcaagagtgaccatacagtttgactgaaattcccttaagagttttcatttgactagtgtacagacagtccaataaaaatatagttttataccgcttacactgccgtccaaaaatatagttttgactagtatacgcagccagcagagaataccgtcacatgccatgctcaggttgacccagctgttgtcagtgtgtcctatggtggactggtcgctggaagtgtggagcatatagactgttccctcttttttaccatcggttttgctaccgttccacttccacctcctcctccttttttcttttacagaacaaaatcaggcacaccgcacacgagatactacaaatatatcctcaggggtgtcgtaggtgctgagaaaagcggcgccactggacactggagtgagttggagtctcgtgcagaggctatgcacctgtgcggccggctgtgcgatggatatggaccgaatctcgtcacgacgtcttcaagggctgcacccaagcgtcgctagcttggctttgccacacacattagtgttgaacaggcaggccttcggagctagcaggcacctaccgcgtaccgcgtccccttatctgctttggacgctgctactgcacaaacttggtgagaggaacgtctcgtcaattcgtcatagtggtaccatgtttaatttgtgccacacagtaattcatatttttgctctattcccgtcactgcatccgttctactaatagtactcctactcactacatccgttataccgttccaataataagattgctcatttcaagatttattgtattagattatatcaaatacaatattaagttggtttttattagaacggagggagtactaagtagcactcctacagttctacttcttttgttaaaaaaaactcaatctaagtatttaattggatataggttcattgtactaactaataagggtgtgtttagttcacgctaaaattagaagttcggttgaaattggaacggtgtgacggaaaagttgaaagtttgtatgtgtaggaaagtttgtttgtgtgtgtagaaaagttttgatgtgatagaaaagttgaaagtttaaagaaaaagtctgtaactaaactcggcctaagtctaatccaatactatatatgttggacttttttaaggagccagtatatgctaatttgattgttcatggtgacagctggagcactgggtgaaatgattatatcgagggtttgctcgcgcgaaaagcaatccacaattcgatcggggcaaagcggcagcactaacccatcaatgctcgcgagtggcgtccgccccacatgccgcttaggtgcgagaccggcccggtcactcggcagtcggctccctgtagagatggtaccgtgccacgacgtcgtcccgtcccacctcgcgtgcgctataaagctcgcgcgccctctcctcatcgatcattcgccatgatcacagccacgtacacaacaaacgcggcctcagtcctcacgcacagttaaatcttgatcagcgtatcaatcgcagtatccagctcccatggatagcatccacgaggagcagcggccgcggcggcggcagcagcagcagcaagaaggaggaggagaagaaacggtcgtggaggtgccggagatggacggcgagctgctcgtcgagctcctggaagcgtccctcgctgcggaggaggatgaggaggctgtagcgcagaggaagcagcagctgggcttcttcacggccgacgtcggcgacggctgggacgggcaggagctgatgaactccatccacccgcaccaggaagaagaaggctgcgaggactgcggcctcgacgacatcctctccgacttcgacggcggcgggtacccgccggcgtcgtcgccaccgtacctctccgagttctggatggaggagatggaccacgccaccgcgggcccgttcgctgtcgccggcgagtgcccgggggaggagtggtacatggacggcatggccatggagtgggaggacgggaggagctactactcgttccactacccgtcctacggcgccgacgcctcctgcacggatcaactgtacagtagcccgttgtgggagtgatcagtgaactccggctagctagtagcccctacgttacgcgttagcgattagtgcatggccttcgcttagactccaagtgactagtaccaccaccaggttccagtttggtagtttgatctgcgttttttgcctcagttttgcaaatttagcgcgctctgaatttgctggagagagcatgagtccatgagtttttttttgtgttatggtttttaccgggcaattcatgccctgttttttaggagtactttcgcacggtcgtcgcgagtgttggtgtatataggtgtgttgagctttgaacaagtgatgtttggcagtttgggtgttgatgttcctgtgccgatgcctcagtctgttagttaaagttggtaatctgtctagcacttcctctggtctaaaaaagcaagtcagttttaaatacgtgcagtcagcacgagttaaatttgattataaaaacatgtgaagtatatgttttgggtataggaaaatgatatattctacacctatgtaacttttgaagtccttttaaaatttatgctaatagtaaaagttgtataattttgttttaaaagatccaaaacgactcgttatttaagaccggagggagtagttcccatcggaaatatgaagattaggcagaagaactataatgcgggaaagtttttttttcttttcttgatacatttatatgtgaagaacatctatagtgtagtttctattaatttcaatctagaaattgtacatcaaaaatttcagagtactatctccttggataatgtacagagtcctgaggctcttcggccatctggcttcgaagatattacacggagatttcagatttctataaagcgaagcgcatcagctcactagtcaccgttcacactgtcacagtttgttggaacaaaaaaagatcgctttgtgaaaagcgtagtataatacacgtacaacgagaaaacttagggcatgcaaaacgagaaaaccattagcgtatgattaattgaattataattattacaaacttgaaaaataagtttatttgatattttaaagcaacttctatagatgaacacacattttaaaattcaagggcctgttcaaattgtagccaaaataaatattaccaagttttggtaaatgctaaaattttggcaagatggcaatattggcaggatttcttatgtattgaccaaatttagcatcaaactaagcgtagacattttttttggcaatttaccaaaaatggtatggttgaaaatggtatcaaagtgaacaggccccaactctcttcaaatatttaactaatgactattttattataattaaattttatttgatgaaaataatattatttgattgtcattttatatgattatgatgtcattgctacaaaattgtaatacttgagaaatttgaagtcagtgatcagttttgaaaattgtgctatgttttccacgtctgagtgagtaggatggaggaagtggaaagtttttttttcacgaaacataccgtttatcaatcttaaaaaacgtgcaaacgaaaattgaggaaaaatcagtatcttgagacaagaacaccacatgtagcatggttaatcatcgctgatccagatccatatactgcaaattctgaataatgcagatgttgtattgcacgctgtgcgacttgtccttgaaactggagcagtaacggtgttccacgataacgatatgctgcgcaggtttttcgcctccggtggtttctttcaccgagaagcgggaaccaaatcatgcacaagaggtcaggtgccgtcagcctgtaacaggctaggacagcctgaagccattgtcgtcgtagtaggttcatttcttcaaatgttcagcaatttaatttcagttctgttcaaccgtcacattacagatattcacgagcgatcatctacaggtgaagcactgctttcaaaaatcacagttaatcttattgcagttcacattttcttattgacatctcccacaattcccattgtaaaccagaactccaatcaacatccgaatcaagaatacacaagtcaatgtaaaagaataaaaaaacaaaaagaagaagaagaagaaaacatccacaggttcatgatgcaatgttccctccaaagttaatgctaaggcagactgcacaggggacagtaggcaaattgatcagctagctcatgagctccttctctgctcgcacaggcggcgggccgccatggacatgtgcgtggtcagcggccagaccaccggacaacttggtgttctgctgctggtatacctgcctcagcctctcgatctccttcctcaacgcctcctgatgagctgcacatgcaggctattgattaattctcatgagtggtttcttttttcagataatggaaagtaaagagatgctccttcaggcatgatgggaagcagcagcaacagaaaatgcagcatgttgcagagaagtaaaaaattttactacaaatttaactcaccatccttgaaaatcttgtcctgtgctagagccgcgatccgctgcttgaggtggctgttgccgacggtcaggatcgtccgctgctgatccagaaacgccacccgaggggacagcacggatacctcgttctgcaaaacatatcacattttacacaaaaccaaaatggcgatgtttaatttgggaataaaccaaactgatgcctgcttgtcaaagaagatctagccgtagtggtcagacactaatggcaccctgaattaccctgcatctagcttgttcggatacgctactgatacacatttgatttgtaactgtctcgaccgatccctccatgtgcacccacgatcagagcgctctatatgacccaacgtactgtgcacacaaacggagcatgttacatggagtacactacacaacagttgttaaatgctagtactactacttgcacaaacagtagtactaccacacatttcttaatagggcactaatttaatcagatgtcgcgcaagcaagctaagctagctaggaaagggaccacgcacaacacaccactgcccactggccaatccatccatgcagaagcagaaccatgtgcgtctggatcatggcatgacatgccattgccactacgtctacgtgggctggttggtgccgtacggggggtgaggtgaagtaagacatccgcaggcgtgcatatgcacgagggtgggggctcacgctctcgctcatctcctcgccacattgtgtgctattgccagccaaccagtgtggctgtgtccatcggtcggtctcaaactggcgccacttctgtccgtgaaactcatcgacgggtcgcttactacatcgcacagaatgcagattgcacagccacgaacggttgatctgacgtgagtttgtagagttgaggtagggtgttcggtttcctagctaggattcagaattgtgccgcgtttcgaaacgagcgtcaactcggcttgctagagctcgaagagcggattggtatagggtgtgataactagttttgagtttggtgttgtcgtcgttgatatgttcgtattgcacgtatatgtatgtatacctgcagggttgtgacgctgcgctcgagctcggagatgtactgaagcttcctcactcgcgacctctgggccgactgccgattagccagtatcctgaagacatttccaaagaagagaacacggtaattaatcgaggaatttatagtgtcgtaaagtgatttgtaattgatcactagatgcatgcatggacgcagtgcccaaccgggcgcgttcgctcgcttacctcttgaccctcttggggtcccggatcagctccgtcggcgaggtggccgccgcctgctcctgcgtcggctccccggcggcgtgctgcccgtcgtcgctctgcgccgcggcgtgcttgtcgccgccgccgtcgctgtcgctgccgccgttgtcggaccccggggccgacgacccgccctcgtcggggaacatagacatgagctggtcgtcgtcgagcctgtcgaactcgccgcccgccccgcaccccgccggcgccacctcgacgaacgccacggagtcgctcagcgaccggcggtgcgcgccccgccgcgacgccgcgaactcggcgaactcatccgcccacgccgcgtcgccggcgcccccggccgaggcccagtgctggtggtgccccggcgccgccaccgggatcttgggcgggagctgcgccatgtacgtgtccttagcctatagtagcgatcgatctcgcgagcttgggctaaccacctagctctggcgcgcgcgttggacggcgccgcaacatggatctgccggtttttgttttatactagcatgctagtactactacagtatgctagctgcaaagcgctatagccaccacgccaccttgttactacgacggagggaattggagggtcacatgggacgagacttttggaacatgacgacagcctgagccagctagcagcagctctcgttaattaggcttcttcgaacgcgactcgatcgatcgatgtcgatccatccccgtccatggatggatgcatccatcggtttgcatgcggcgcccgcgcgggaacaaagttggtggagggggatcaacggtttttaaggcagttaagtaggtgggcaggaatccccccatccacgtgccgctgtcgatccatccatccaaccggccggccgcggatctctcctcctctcgtcgtcgtcatcatcatcatcgaccgatcggctatcatcaacaagttgcagctcgatcgagcgatcgcgtacagtgacaggcttcaattagccctcgttgtcaccccgggatggaccggtagtatggccggttgcgtgcgcgtcgatcgatcgtcattcggcgcgcgacagactgcgatggccggtgccctcgaaagcaagcagtcgagcgcggtgccggtcacctcggttcgttcggttataccgatcgcgcgcctgagacgagcacgaaattttgtgggagatcgatggttggaggcgcgcggcatgccgtcattgcatctgagtttgtgctgcggcgcagtgactagaatatgcatcgcgtgtcagactgtgtcaaagatagaatatactgtcaggatcgcgtgcgtttcaccggggaaatagtaacagctgccgcgtatcgggagcagcatgttcgcaaatccattgggatcagagatctcaccgcgcttttgcttgcttccacaatactactactgtacacgggaatcttccgcaacttggatcccgttaagcacacgcttttctcacggcctctgtacggacgacgtgttggatcggttctctccgttaatcttgcaaacgaaaagcaactcgttttgcccaatgaaggctcagcaatcaacacaagaaacgcacttttgccaactccaaggcccaaacaccacggcaaaagcttcatcaactaggcctgatattctattgggctgggtttagcagtaaggatggcctgatacagtacgattggactgccgaaaaagctaatgcgcgcgtgccggcggcgcgcgtcctctgaccttttttttcttttttttttccgattttttcgtttttttcacactttttttctgattattttttaaatcttttagcatattttgagtttgaaagtttttaaattttgagttgaaaattttcaaatctgaacttgaaagtttttaaatctcgatttgaaaattttcgaatctcgatttgaaagttttcgaatcttgagttgaaagttttcaaatctcaaattgaaagttttcaaaattttcaaatctggacttgaaagttttcgaatctcgattctcgagttgaaagtttcgattctgagttgaaagttttcaaatctcgagttgaaagttttcaaatttgagttgaaagtttttaaaatttgactttaaaatttaaaacttaaatcgaaagttttcaaatctaacttaaaatttttttaatctgttagtaaaaaaatctcccaaaaaatctccagaatctttcctaattactatcattagtgttaagtatattaactaatataagtagttaagactaaagagaacagggagtgctcgccagctggctttcctggcgcgcacgcgcgtgctagccacccccttggactgccttgtattcttatgtgctttcccaatggaaaaagtacatcgaaggtccctcaacttgtaattgatttataaaattgtccctcaaccgtaaaaccagatatatgacatctcccaacttacaaaaccgttcactttagatccttcggtagattttgttagagaatattatctcctggggagataaggtcctttcccgtggaccaatccgaaccggagtagagataatatctatcttctcctaagacccctatatataggggcagggtgtaacatctaaggttggcttacacttcagatcagatctataatgaagagagagctccaccatatatctgtgttcattgtctacttctgcaatgttcttgagggcaaaggaatgggcgcgggtgttttacatcatctcacgcctctattgctgtgggagggacagggaacgaatccgatgatccgctaataggcgcgttggtttacaacacgttatcagcagctctccgttcaccggtttgtcgttccaatctgttctcgttattagattgatttctaaattacagattgatgtgctggtatttcttgctctcatgtcccgacgatctagcgaggcttgcgatgcaactcgccgggaagctacggcgcggctacgcataggcgtcgatgagaccgccgtcggccacgcgaacgccagcgtttcgctcgtgtacgaaagcttctggagatcggcgtgccggcgaaccactgcagtgcgatccatcgcctagccagcggctgcatgcctgcatgcatcacgaggggaagcgccaccaaggctggccgcctcacacaccctcaacgggccggcgtggagccgccgcgcatgcgcgcgcgactcgtgctcccgcatggcgtcgccgcgtcggtcgcaccgcaggccacggagatcacggctccacgggcgtacaatgctggctgccgactcagtagtcggcctgatcttgctcctctctctctctctcgctcacttctctgcgcaggttggcgggtggagagaaggcctgcggggcgaggcgggagagaaggagggcgtcggtggctggcgacgcggccacaggccaccacgcggagtgaggaggccggcggggcccatgttcatctcgtcgaggatcttgtcgccgtgctcgaccagcttgttggagtaccacgtgaggaagaacctccccgcctcggtgaggtacgtgccgccgtccgcggtgaagaaaaacgtgtcctccggcgtgtcgttgtactctccggcggcggcgtccggtagctcccacttcgggtgcccggcttctgtcgccgccactctgaagttctcctcgaggtatttgtccgatgtcagggaattcccaaccttggctctccgggtaggattggtatcttagctcacttgcagggccaagcccaacctcttatgtccacaatcaggccagagtccaagaagccggccatgttctctctgaatcgcttcatgaaatcggcatacaactagtgtcgcagataaacaatctatcaagtcgattagattatcctaaatttgatcatggttgtgatatgtaaatttgcaatctcaatgtcagtatgtcacaaattatgaaatcggtgtacctggatgggagttctgccgtggaacagaggccggtcatccacgccgatggtgaggtactcctggttcctcgcgccgccagggctcgtgtagtgcacgtcggagtcgtcgtcgccgacgtcgcggactcaacgaggcagcgggatgcatggctccctgtacacgcgccactcgtaccgcgccggcccggcgcccttgacgatgccccactacacgtccgccatgacaccgtcgacaccggcctcccgccgcagccgcgtcctctagctcgttctccgcggtgaccacgcgcaactgcacgtctgcacgccacgccacggcgcagcgccgctcgacacgatcaattcgaacgaaagcttggagagattgcgtgagctcggagcttaccgtcagcaggcctcctccccacccggtgcggtggcctgctgccgcgtcgccgcccgtcgccggccactgatgtcctcctcctctcccgcatcaccccgccggccttctccccacccgccggccagccgccagcctgcacacagaagtgagagaaagaaaggatgaagggagagaagaggggtaagaaacaagggctgacatggacactcgacatgtggctcccacgctgactcagccgtcacatcagataaaaccggggtcaaaaccactgaaggatctaaagtgaacggttttgtaagttgagggatgtcatatatctggtttgcggttggaggacgattttgtaactcgatggcaagttgaggaaccttcggtgtactttttcctttcccaatttatctccaacttttcacatacacgtttcctaaactgctaagcggtgtgtcttctgtaaaagttttctataggaaagttgcttttaaaaaaaacgttcttggcttgatcaaccggtatgatcgcgaacagacttttgatatgcttgtaagttgagtatgtgttgctatttctcaacggcatcagtagaaatataattcccagtaatggcgtataaacactcttggtatattatggttgcagacttcatccgtaagcgcacggatataccattgtagcatttcaccggagagtattccaagggtatcgtatttatttaatcccatggaaagattatattagagagaactatactaataatttatatattacatgtaataatcaaagtttaagcaggggttaagattattaatagggtagaatgacacacagaaagagaattatatactctcattataatttatctaagctaagtgggaagaaaatagaaataatctattcctatacttctaatatacatgcatattatacatacatccaagatatatgattactttgctaataccctctttccaatgcactcctggtgcttcgagaagccacccctgattaacgagtttcttacgacaatccatcatgaccatccaaccggggctaaatatggagaagtaccctccccagaaaagtaacttaggattatatacacgcgcggaggaataccagtgctaagctgtcaccatcagcggcccacctcgacgtatccgcagcatataaccacaaataatgatatccaataatctaaacaccacgcttaaattaccaaatactactctaatatcatcgtcatgacatagagcaatcgtatgcacgatcattatacccacaccattgcattttccagataagctagcatcataatcaatatagtttgaatgtatgataaagttggtactcatatactcggaaagtagtacaataccagagtagtatctctactacttaaaaagtccgtagtggtggtggtgaggccattccaggcagacacgcggaatatgaaccattcgatcgtcaaatccatcggttcagaataggcagatgcgcttctctccgcatccttatcgagcgacgcctcccatcgcgacacaactcccctctcctttttctccgcctctgccgcccactccacccagcgccgcttgacgccaacgctcgtcgcccgaactagccgccaacccccgtcctcggcgctactccaccgcgcatcgcctgccgccgacgaccgtcgccatcgcgccctaccatcggcgaccgccctgccccacctgtagtagaatccctgcctcctccgcctgtcaccctcgtgcccggccgcctgtcgcatccgcccgtcaccctcacgcctagggggctactccgccccgcatcgcttgccaccgttgcccgcgcccagccatcggctgccgcctccgcttgtcgccctcgagccctgccaccggcggccgcaaatacctgcccccagcctctcctcatcttctggatttttttcgtcgcggccgccgccatgcagatcaatcgatccacccgctgttcggtctccctcacaccatcatgcattcacgcctcctcgtcctcacgattcacacctcctcttgatgctgcagccgccggattcgggagctacaatgcgagagagagcttgattcttcttgcttgaggtgtgtgttggagggagtgagctgagggctttatatagcttgagaataacggttacgacggttggaaaggttggtaataccctccaaccgtcattagggagtcatctcaaccgtctagccaaaacctggatccaacggagccacggctggttcgattgaaccctgggctgacccaaccagccgacggtttgacaggcctcctctttgtcctctcctatcttcagacttgtgaattttggccatttttagtcatgtcaattctgtgttcttgatccatttgttcataagtctgatctttgacagcgtccgtgattaatcgtccattttattgtcgaatcgcctctattttatgtttattatatgcaaaaggttaggaagcctagtgctagtggaatatatcttattttgacacaatatgcattgcaagcataacttatttctcctttatttttggtaatattgatgggcgaaactgatcgataacgaccgtcaacaaaaccccccaagcttgaacttttgcttgtcccgagtgaaggactcacaagaataaaaacttggttgctgatcaggagttgcttccacgctgtatatctcaaatgtacaggtgcagggtatgtatactatctctcaaatcaaataaatttggcgcggtggcttactcttacccctgattcccacgagacattacccttccttgtcttgagaagttgagagacattacaacaataagagcactagtcacccaatcttcacttaactttggatgtgtttccttgaaatttttttcatggcagcatggcatatttggaagcaaaggaatggattaatctttcaaactgtttagccatcaattcagtcatggaaatctatgtttgttaaagaagttcttctgcatatgtgcagaatgaaagatccactcaagcattccctttctaattggatacaaactttgtagcatatttgttttgctttccctttgtatctttgtacatatttatattttataaaatttaaactgctgggcaaagccctagcagtactttcagtcaaaaaaaaactttggatgtgtatagttcatgccaaaattagaagtttggttgaaattagaatgatgtgacagaaaagttgaaagtttatgtctgtacgaaagttttaggccgagttaagatccaaagtttttcttcaaacttctaacttttccatcacatcaaaattttcttacacacataaacttccaacttttccatcacatcgttccaatttcaaccaaacttctaattttgacgtgaactaaacacacccttgatgtgatggaaaagttgaaagtttaaagaaaaattttggaactaaattcggcctttatatgcaaatgataattactgtgctttggaatgggggttataagtaaatgttcttcctagaaacctacttgctccatcgaaaaaagacaaacatgggattccgtgttcaacgtttgaccatccgtcttatttaaaaaaattataaaaataattaaaaagacaagttacgtataaaatattaatcatattttatcatctaacaataatgaaaatattaattataaaaataatttcatataagacgtacagtcaaacgttggacattgaaatagaaattcaggatttttttttttttttttactacttgtactgacacttttgatactgatagcgtgtaatgtactccaggtctccatgtgtgtgggcccggtcaattgcaccttcgtctcttcggcttccatcttcgtacttcatctgatcatctccttttcccatcagaattcagaagcctttcgcacctcgccacgcaccagtgtgctctcacgcgggtgtactcgccgacttcctgggcgccacagacggagtcgcccacacaccagccgcacacagcatcacgagaaacagtagcgtcctgattcccccaaatctcggagcgcacagggacgttccctaccgcaagtcactgatacgtgggcccgttattaacgtgggtcccacgtgtcagtggcgtacgagctgtgaagggggcgtggctgcaaacttccctctcgttcaaatcaatccacgaaccaaactcctctccctctctctctctctctctctctctctctgctcgtctcgtcgcccactcccaccacttcccctcccctttcaggaaaaaccccaactccaaccagtcttaactcaagctccactcaaccccagcctcatcaaaccctaaccccagcgtgtccccaatggcgaccctccgcgcgcgcaagcgggggcggggcggcgccggcgccggcgcggcggcggtgctcggggcgctcgggctcg

SEQ ID NO: 6431 - DNA, 79625 bp, Oryza sativa
  unsure (1)..(79625): unsure at all n locations
ggtgggccccacccgtcagcgagggggacgggcggcccagcccgtcagcggcgcgcgcgcagggagaggccggatgggccgcggggagaggagagggagggggagggagatgggccgagccggcccaagagggagtgggagggaaaagggactttttagagcttttctttttataaaaacattttaactttgtttatttcttaatgattattatttgtgctctgaaaattccactaaaatttatttacgcattttagacttttaggaaatatacaaaaattctccaagccttatttgacttttaactttgcacattttaattgttggaggctttcacacggattttaattattctaggcataatttagaggttgtattttagggtcgttttgggacgtgacatgaagtttattagagtaaaagcctttttccttcccgttggtcgtgtagacgctgcagcttcgttagatccgctcttcgtggaggttgaagccgacgtttgggaaagcgagcaaggcaagtcacatcatccttgaacatattgaatcccagtttatgaaattattttgatttaaattaatgcattatcactttatttaaattctcgcgttatcactgttttatttagccatgcctatttacctttgttatgaccttattattattgttattgttattattaccttgttcaccctagaataaacaaaactccaactagtgggtactctatttatggttccactagtatgaacttaggtagatgcttcgctggttaattatgcaacattaggtggttttacaactctaaactttgggaatgttcttatcacctggacactatggaatggttggattattgtggaattggattcacacctccccctctattcaaaatcctcaaaatggttttaggctgggctcggggtgcatggttttgatagtagcacctcggccacataaggaccggtcttcgggcctctgttgcaaagcactactgtacttccacatgtctagtgggtaaggtttagtttgtggcttagtctggttataaacaaaagtacacggatggagatggacgaagttgggggtcgatggacatctctagggcaaatgaaggctacacgagctgcagcctggtagtcgagatgtcatggcatagggctggtgtcctgctgctaggggctcagtcctgcctacttgtcccggaggttccggtcgtaggtggggttgggtcggtactcttgtctatggctaggatgggttggaaactatgtcacgtcttccgtccgtatgccgtggtggtatgtggcacgtggttacacgtgaggaagatgtgtcttgtgggtaaagatgtacacctctgatcagagtataatctattcgaatagccgcgccctcggttatgggcaagcctagcaatgtacccaagttagtgttttaattcttaaaacatgcttaacaactaaaatgtggaatggttggcctgggttggcttgggacgagctgggacccagggtcgggttgccagttcggtccaaatcatcgtaggccttgggttaaggcaggttcgtgtgggttcacggccttgattaataatcttgtatagctctaggagcatatttacaaaatagctttcagcaactaagtgtcttttaatgctgtttactgcaaaccctaaccccctatattataactcccttgtactcccatgcatttattctgcacttgtgggtgtgtcttgttgagtacggtggttgtacttagtcttgctcattttttcccaaacccagaaaaggagttcctggatgatgaaggctttggtttctagctcgtgcctgccgtcaagcgcctgtggtcgtcgccctagtcttccgctgtttttcgtttgtcttcttgtgtgctgggccttcgccgcccatgtaataaattatctatttacgcttccgcttgttaaactctgaattgtatcaacttttggtgtaccttggctcctgggacaaggaataatacacgcacgtaaggaacgcccgttgggttatttccggtcgtgacatgccacgtttctgccgcctcaacctattgttgatccaatacagcagcagccgattcagcagacacccccaattcagcaggttgtgcagccaatccagcaacaggtcatgcaaccagttcagcaaacaccaccaaggcagcagcctctgcagccgattcagcagacgccgttaagacagcaaatcgttcagccggtccagcaccaaggttcaataggtgcatcggccgggtttgcaacgcctggtggtcagcctgtacaacaatttttaaatcaagttgtcccagaacacttggttcaccacgtacagccggatggcacagtaatacctcaagttgttcctgagcatttggtacgtaatatccagccgaaccttcataattaccaagggggtaacttgaattaccaatatcagccttcttccccgcaagcccaatatcagctagggggattggctcaacctcagtttgcgcctcaatatggtcagttcgagcccatgcagcaacagtcacaaggggtagctcagcagcgaccatgggccgatgtgattgctgacgtaatgagggaacagtttgggcttaaaccaaaagagactggaagcttgtatcggcagccttaccctgagtggtttgaaagagttcctcttcccaatcggttcaaagttccggacttctccaaattttcgagacaagatggtgtgtcaacttatgagtacattagccgattcttagctcagtgtggtgaagcatcggctgtggacgctctgaaggttaggttatttcggttatctttgtctggatcggcttttacttggttttcctctttgccgtattggtcgatcaatagctgggccgatttggagaatcaattccacagctatttctacagtggggttcatgagatgaaattatccgacttgacagcgattaagcagcggcatgatgaacctgtgcacgagtatattcagagattcagggagatgaggaacaaatgctttagtttgagtttaactgatgcccagttagccgatctggctttttaggatatgattgctccgattagggagaaattctcgtatgaagactttgatagcttgtcacatctgatacagaaagtaaccttgcatgagcataggtctgcggaagttaggaaaaactctaagaaggttaatcatgtttgtccgtacatgtatgggtcggatgatgacgaggacgattctgaaatagctgcagccaagtgggtgaggagtaaaaaggtcataccatgccaatgggtaaaaagttctggaaaagaggagaagtatgattttgatattactaaagttgacaagatctttgatctgctactccgagaaaagcaaattcaacttcctgctggtcatacaatcccatcggctgaggaattaggcaaaaagaggtattgcaaatggcataattctgggtcccattctactaacaattgcaaggtttttagacagcagattcaggtggccattgagggaggcaagattaggtttgatgattccagaaagccgatgaaggtcgatggtaatccttttcctgttaatatggtgcatacaactggccaaacagccgatagggcccgtgcaaggggttttcgggtgaattaggctaagattatcaacaaatatcagaagaagtatgacaagcagcaggagaagtatcatgagaaatacgatgatagttttgatcctcattggggttgtgagttcttttgattctgctggaatgaaggtatgaggttgccatctattgaaaactgccatgggtgtagtgatatcgtcgagaactcaagccgatcatataataggggcaatcggctaaggcagataagagtttatgttcatcaaagattgggtccagtaaatcaagatcatggccaaaaggacaatgtaatcaggaagaatcaatggtgtccttctggtattttcacaaagaatcagaagagaagggttcaacgattgaggaacagggagcgccttcaggaggttgaacaagaaattaatcatcggctgaagaaagcaaagccaaggcaggagtggcgtgttaagaatcaggttcctgcagctgatgatgttgcagctgatgaggcaaaatggttggcaaaagggaaaagtgttgtgacggcaccggttaacatggtatttaccctgccagccgaattcgggatcgaccaagccgatgttgacgaggtggaagaggaatcggctaagttggttctgtcaccagaacaggcagtgttcgagaaacccgaggggacagagaatcggcattttaaaccattgtatataaacggctacgtcaatgggaagccgatgtctaaaatgatggttgatcgtggggctgcggtaaatttgacgccctatgctacgttcaggaagttgggtagaaatgccgaggatctcatcaagacaaacatggtgctcaaagattttggtggcaatccatcagaaaccaaatgtgttctaaatgtggagctgacagtcggcagtaagactattcctaccacgttttttgtcatcgatgggaaaggttcttacagcttgttgcttggaagggattggattcacgccaattgttgcattccttcaactatgcatcaatgtttgattcagtggcaaggcgacaaaatagagatcgtgccagccgacaggtcagttaatgttgccagtgccgatttagctctttgggagatggatggccttgattgtttatctgaaaaagtctgggatggagattttctaaaagtgttcgattttgatatacaaccaattgaagatggagaacccaagctattattttgagggcgtcgtggagggttcaagtgtttacactacggacacggtagatgatctcgatgacaagcaaggtcaaggtttcatgtcggccaatgatttggaagaagtggacataggtctaggcgatcggccaaggccgacatttattagtaggaacttatctccaaagtttagaaccaagctaatagagctcttaaaagagtttagagattgcttcgcttgggagtattacgagatgcctggactcagctgatcgattgttgaacatcggctacctatcaaaccaggggttaggccatatcaacaacctccgaggagatgcaaggccgacatgcttgaaccggtcaaggctgagattaaaagattatatgatgctggttttattcgtccttgctgatatgctgagtgggtttctagtattagttcctgttatcaagaaaaacagcaaggtcagggtatgcattgatttccgaaatttgaataaggccagaaaatatggtctgaggatgaatccgacaaaatgtgcttttggtgtatcggctggccagtttttgggatttcttgttcatgagagggggatcgaggtaactcaaaggagtgttaatgcgatcaagaagattcagcctccagagaataagacagaattacaagagatgatccgcaagataaattttgttagaaagtttatttctaatttgtctggaaggatagaaccttttacaccattgttgagattgaaagccggtcagcagtttacttggggggcagagcagcaaaaggctttggacaatattaagaaatatcttagctctcctcctgttttgattcctccacagaaaggaataccgtctaggttatatttatcggccggtgagaagtcaatcggctcggtcttgattcaggagttggaagggaaggaacgagttgtattctatctcagtcgtcggctcttggatgctgaaactagatattcccctgtggagaagttatgcttgtgtttgtatttttcgagtacaaggttgaggcattatctactgtccaacgagtgtactgttgtatgcaaggccgatgttgtcaagtacatgctatcggctccaatattgaaaggaagggttggaaattggatattttccttaaccgagtttgatcttcggtatgagtcgccgaaggcgattaagggacaagctatagctgattttattgtggaacatcatgatgattcaatcggctcggttgaaatagtgccatggactttattctttgatggatcggtgtgtactcacggttgtggtatcggcctagttataattttccctaggggggcatgtttcgagtttgcttatactattaaaccgtatgcgactaataatcaagctgagtatgaggcagtgctcaaagggttgcaattactcaaggaagttgaaaccaatgccattgaaatcatgggggattctttgctagtaatcagtcaattggcaggagagtatgaatgcaagaatgatacgttgatggtttataatgagaagtgtcaagacctaatgaaggagtttcgactggttactttaaagcatgtctctcgagaacaaaatattgaagctaatgatttggcccaaggggcatcgggatataagccgatgatcaaagatgttaaggttgaaattgcagcaatgacagccgatgattggaggtatgatgtgcatcagtatttgcataatccgtctcaatcggcttctaagaaattgcgatataaggcattgaagtatactctgttggatgatgagctttattaccggacgattgatggagtgttacttaagtgtttgggtgccgatcaggctaaagttgcaaccggcgaagttcatgaaggaatttgtggtactcatcaatcggctcataagatgaagtggttacttcggcgtgcagggtatttttggctgacaatgctggaggattgtttcagatattatagggggtgtcaagattgtcagaaatttggggcaattcagcgagatccggcatcggctatgaatcctattattaagccatggccattccgaggttggggaattgatatgatcggtatgataaacccaccatcgagtaaatgacataagtttatattggtggcaactgattatttcaccaagtgggtggaggcgattcctttgaagaaagttgattctggggatgcaattcaattcgttcaagaacatataatctaccgatttggtattcctcaaactattataactgatcaggggtcaatcttcgtgtctgacgagtttgttcagtttgccgatagcatgggtatcaaattattgaattcttcaccttattatgcacaagctaatgggcaagccgaggcgtctaataaaagtttgatcaaattgattaagcggaaaatttctgattatcctcgacaatggcatactaggttggccgaagcattgtggtcttataggatggcttgtcatggatcgatccaagtccctccttacaaacttgtttatgggcatgaggctgttttgccatgggaggttagaattggctctcgaagaatggaattacaaaacgatttaacagctgatgagtattacaaccttatggccgatgagagggaggatctggttcagacacgattgcgagcccttgcaaaggttaccaaggataaggaacgtattgcttggcattataataagaaagtggtacctaaggatttttcggaaggagaacttgtctggaaattgattttgccgattggtactcgtgatagtaaattcggcaagtggtcgccgaattgggaaggaccgttccaaatttataaggttgtgtccaagggagcatatatgttgcaagggcttgatagtgaagtctatgggcgagcactcaatggcaagtatttgaagaaatattacccaagtgtttgggttaacgcatgatcggctagtattgccgatgcatgacagccgatgtgtttgcatcgccttgagatggccgatattgttatatcgcccttagttgtttttcatgatataatcggttgtgatttgccgatgtacaatggccgatattgttatatcgcccttagttgttttataattttatcaatgcttttgtcattgtaaaattaggggggcacatatatatcaaaatgcaatgcaaattttttgaggcaaatttttttagcgaattttaaaagtcatattaatcggcacaaaggattgttaagacagtaaagtactagagcatcttagctgattacaaaaaatttctgagtcctattacacaaagttattgagacaagtatcgctggatagccaaaatagccctttgcctgatttgttctacttcttcaatagcttgggcatcttgagcatcagttccagagatgactttcagagacttggttaagtcagcaacattcttgatagccgatttgagccttgctttttgttcttcaattgattttgggagatcggctagctttttgtgttctatatctagctcggcattgcattcctcaagttgcgccaagagctcaattttgcgagcttcgagccggtcaatattggatttgatcagaccttcagatagctgatcaagtttggttttttcttcatgcacaagctgccgattagtttggattgtggccttaatctctttgcgatcacggcgttcggctagtcttagcttggctttttccagcttgaactgatgttgctcgagataagcggctagagttaggacatcggccagatcttcgggaatcagagcttgaacttcatacagccgtgtcctaattgacccacggtcaactaccaaactgtctaaagaagaggctgctagccgatgagagatgtcttcaagtgtttttctcacatcatcggataggggagctagggctttgcttgaagtgtcttcttctgcttcatcaaggtaatctctgatgtcaaaagagaagagatcggctagagcctgcagagacaatttcggaaagaataagagctgggtaaattatagctgatctaattgttgagacaaagggaaacttactgggatagcaggagcagctggttgttcttcctcttcgatgtgatgactccccacagccgatggagtctgatcacttgacgattgctgtataggaggagaagtaggaggaggctacgaaatagacaagtgttatatataatcagttgagattgattaagtaaaagaattaaggacatcttactggtggagccgatttaacaattgctgctgttttttttcttcacagcagttttcttcttctgcaaccacaaagtctatgggtaattagccgaagagtgaggtaatttcagaagaagtcagagagaggtacttactcttgtaaaatgaacgggggcgtaaggagttggaggcgtttgcttgggtgaagccgatggtgttctttctgtgtcactcatttcggctacagcttgatcaacatcttcaccaatttcctcgtcatctaaagcttgttcaatagatggatccaaggcgggcagatcatcagtcgacatatcagttggttgtggttgagttttcttgaatttggtctttttctttggagccaaggctaaggtactcatggctgatgatctggttttccttttcttgcctgcatcggctggttctctagttaggccgtgaaggagagttgaagtcttgggggcatggtagccgatgaaagggggagatagtccacctccattcggaattagacctgaagcatattcaatgttcttgccactgttactttgatgaggaggggaggactctgttgtctgcaaaacaggagcaagaggtcagtcaagtaatgaatcggctaactggttatgcaatttagtaatgacaaagtttacctagggcatgacgtcggggaatagatctgtcatatacattgaagcggattgatgaaatagatgcagcttccattcgccccaccatctgtcaaagtttttgcttctaaatcttgccaactcaatattatcaatactgcccagagagggtcctggtaggttaaatagccgatccatcattagagtggaagtgatttgtcctcggcactgaatcttgtcggcaaagaataagccgattgggagttggcccaatccaagttgtctggccgagctcattgggtgataaaactcgtaggagacttggatgtttcttccttggtgaatgccgatagggaggatgcatgggctgattgcagctataagaatttctctggatttttggatttttttcatggttaatgtcttcaaatctaaagtctgatggaagttcaaggtctgctgagtcttcgtagggaaaccagattcgtgcatctttcttaaaaccttcgtagaaactgcagaaccagtccttgagtaactcagccgatagcttcgctccagcatcggttggtgtggatgcatattctccatatgacatgcatctgcgatgggtacgctcttctccgtcatcttccacaatcggctctggcaatgggaattcagcttctgtcacagagggccgattgacaaccttcatgactaccaggtttaaccaagtttgcagcagccaccatggtccacctgctccaactattgagccgacggctattttagccgatgcattgttcaacatctggtacagatagccgagaaggattttgcccaaaggaaattctttctttgattctaaggcttcagttacgaattgccagttggttgtagggccacaactggatccatagaagaggaatttttccagccacataagcaagaaagctacatgctctcgaggggtaacagacccttggcccatatatgccgccacatagccagaccagtcacctatgcttttggtcttgaagtcgaattggttcttggtgttcatgctcatagggttagccgatgaagttacatctaatccagtaatcatggtgatgtcgattaaagttggagtcatcggcccttggttgaataagaaagcattgatggtgttggaccagaagtaggtggcggcagccatcagaggttcatccttagcagaattggctatggtgagagtgagtgcttggccgattccaatttcatcccagtgaactttcttactagccgatacgcgttggtaccaggtggtccagctcttatcaggagtaggtttttcgagagatggccaagacttgaaggtattcttccagtgacccaggttagggttggctagtctaaaggggatccggttagtttcaccgatgatgaaatcagtggggtcgagattcgagattgccgattgggccaagaaaatagtagtttttgtgtgaaaggctgggaatcgtgactaggttggaaaggtgctgcaaatccaaaggaattgagaagcagaaaacgtgaggagaaaaggagaagtcgatttcatgcgaggaaaagggatctagctggtgaggacttacctcagcgtactcgaccgatggcgcgatagaagggctggtggaagacgacatcgccgcgggcggagatttggtcgggaacgaaatcgcctggggatcgccttgtgcgtcagggagatcgccggagagagagagagagggcaaagttggttttagtggcgaaaacggaggaggacggtgtgagatttctcgagggtaatggttagtatttaaagcatggcagtaacggtcggaaaacggcaaagtgcgaaacttgctcggagtcgatttacagcaaatccgaaatattatcaaatattctggacttggggggcatgtgttaacaaccaaatttggtaatatcggcattaggaaagaagattagatcgaagcaaagtcggaggcggagatcgagttcggaaacagagcaggaatcggctagagtccagatcggctacgattagaatcggctgggtctgagtcgggctaggtaagccgatgcagccgattctgacaatgcaactcgatgtatgacatcaggttgaattgaggtgcttcaaggtgattgccgcacatggatagagtcctaagaaggcaattgtatctattaattaggatgttttatgtaatttccttagagatattcttgggcaaaagtccgccgcaaagacttatggtatcttggagtttgttagagatagttgtcgtgtctgttatggacatatcttgtaatttttgggtataaatagacccgagccctatgtaacttttaacacacacgttcaatacaatctcgacgcatcgccaccttttttgctttagttttatttcaacgagttcttgctttcgggttgagctgcatcggtttcgatcttcaataagaggtaaaacttgttatggtggcttgcgttctcgggattagtgcttccatctttatgacactctaatcttgtttatgtaattcgtcgagttatcatatatcctacataatccttggcaatatcgatattcaacctacaatcggctaacatccgtcaatagaaggcagccgattaggttaaataccgatgttgacttagattatataggatatctaccactctatggcacatccaatggcttgattgtctagatacggcttgacttaagtttgaccttataagtcgtgattagaatctcaatctctagcccgcttcttggttgctgattagggtagtatcggagtttcagccgatcttacctaatttaactgctttttatcctatatgcttgattgacatgttaaatctgtcctttacgttaagatcttgctgcatttaaatatattaggcttgtgtttagtatattctacttgctttaatatcttaatatagagtagtatcggagtattagccgatacatgctagatctatctgatcggctatgctatgaacgtatatagtctcattattaatatatatttcgatctaagtgatttatactgtctcggcatagcgaccgatctatcccaatcacttgatttaagtacgtattgatataaagattatatattggtaatatctgcagccgatcgagtagattcagtcctttcttatttattaatgactgccgatcgatgcatatacgacatcggctgaaagataaatgatatgtcatcggcacctagccgatcggctatcatttatagatttaactgcggtttctttgcttctatttcttgttgattacaggatcaaatcaactggcacgctcatacattcgaaggtgagctttggacctgcactggagttaagcagatctccaaggcctcgtgttttctgtcaacaagattataataatctagcataataatctatttgtttgtttcagcttactcctaataattcagattataataatcctaagctgaatcaagcggggtcttagtttgttgaaaaaccacccattacgtatatgcttaactgaatcaacatgtattttaaagtgtcagcgttaatgtggtctttaccaaaattaaatacctatagtcttgatacttttttgggtaagattccacaaacaaaattactgacaagagcttaaacgttctctcattgagttttgctatatgcacaaaaaaaagttcaattaaatatgaaaataagtctaatgtaagcacttggataaggttgaataggcttagcttagcctgtggtaactctacatcagtgctaacaggttaattcagttaagcacgtacgtagtgagatggttttgcaacaaaattaagtaggggtagatatttgcataaaatgatttattatgggggtagaatgtcatatgagatgattttggaatttttctctattatattttagagcggagggacatgagatttaattaaacacatccactataaaactcataggcaacaatgagatttaattaaacacatccactaaacacatccactatcaaaagcaaaacacccaccttgtgacacaaacccaggggctactgtaaaccgatggagtagaaggcacaaccgcacaaggcagcagctgaaaattgggggaggaagaagaacaccaggaagggaaagcattacttcatcattaacccactcgcccaagcataaatccgccctccagttcatatgcccctcttgccgaacatgaccgttgggcgctgtccccttccagatcccagatatactaccacccctctctccccccgcatcgcccccacgattcgtcgcgttcgcgtgctgccaaatcctcctccccctcctccgtccccacaacattctgtcgcgccgattcgaccgttgccgcctcgcccgctccgcgcacgcgcgcacgccgctcccgttcccctcgcgcacgcgcgggccatggcgatcgacctggcgccgctggctggggagttggaggtcgcgggggcggcggttggagggaagaaagaggagggggagggggaggagggcggggtgtgcggcggggaggccgtggtggtggccgcggcggacgcggaggtggagggccacccctacgacttccacgtgtccgggccgcggaacctgccgccgcccaactggagggagatcatccgttcgagctggttggtttccggttactctctccatgtttccttgcgaaatcttagttaattagtttgatatatgcattttggcgttatggagatatcagatatggtcgtcatgggcgtgaatctgtggggatcgtttacgccgcgggcacccttggtttgttgcctcttctgattgatcggaaaagggactatgttttagggaggggattgccgtccggttgcacccggctcccaggattggaaggggagggaatatgctagatgaaaggcgatagctttgttggattgtaaacaaggaaccgaatttactgctattttcaggattttgttgcaatctgcactggcgcaagggtatagcatgcattaagattaaaatctccaatcgatcacctcacaaatgtctgcacaacatttaaactttttttcaatgtcttttctgatgatcctgcgattcggcgtgtcagctttgtgtttagttggttagtgttgcgcttgcgcgcctacaagtaataacctacaagtcaggttacagactaccatacccagagttttgcccttccttccatacactgtttcgtgaggcatgggtatggaaatgcacctaccttttcttacggattgagtattcttcttaaacaagaaagtgaagtagcagataatcagtgattgaaaccaaggtcctgtgggtggtactttcctatgggatatgtatggacttacttttgttgaagaggtgcctttctaattctcgccccttgtttttatgaccttcaataataatcaattatacagttctacactctattgctctagtttttaggctataccatttcaattggacggtacaaactctactggttgaactagagttatcactacagttcccttgcttcgtgctatagtacttggacgtagtctctaaagcatgggcgggaatgggtcacagaattggtattccgaaaaagaaatattcacagaattgcacgtttcgttctgaacattataagtgcttaggatgtcaggtcttagtaaattccaatctgtggcaagcatacaccagtattcctattaataacgtaatttcataagcggatgaaagcttttcacgacttttggtgaaaatggaacatgcaaatctgataattttagcggacaggaggtgcattaccataccaaaaaaaaaagaaataataataatatgagctatttggtttcttttgtcaaagtttgtcagttagttatgacatcaaatatatttcgatttgacctcatacatacaagaacttctggtaatgcagtatatgctttgtatgcgtaaccaggtttacttcagtgtatcacacttgttaatttgtatctgctacctttagttctaatgccatcaatgttgctttaaattgattgcaggaaggatcccaattacaaaaggatggtaatggcctgcttcattcaagcagtctacctgcttgaactggacaggcaagatgagaaaggagaagaggatggccttgctccaaaatggtggaagcccttcaaatacaaggtcacacagacattggtcgatgagagagatggttccatctatggtgccgtccttgagtgggatcgttcttctgctttgtctgaccttatcctcataagaccaagtggcgcgccaagggctgtgttagctctccgaggaacactgcttcagaagcccaccatcaagagagacctacaagatgatcttcgcttcctggtgtgggagagcttaaaaggatcagtcagatatattggcgctttagaagcactgaagacagcagttgagaggtttggtagcgctaatgtcagtgttgctgggcactccttgggagctggatttgctcttcaggtttgcaaagagctcgctaagcaaggagtcttcgtggagtgtcatctgttcaatccaccttctgtttcacttgccatgggtgtaaggagtatgagtgagaaggccagctacctgtggaaaaaagttaaggctagtctaccactgactgaagaagcattacctgacagtaccaaagaggagggaagtgcaaagaagaaattgcgtgctgacaagaaatgggtgccacatttatatgtaaacaacagtgactacatctgctgtcactacaatgcccctaattgctccaccaccaccaccactaccaccactgatggtgcttcagatgagcagcagcagcaacgaaaggcaagtgagatcgctggtgatgtggtcgcgaagctttttgtgacatcgaaaggcccacagaagtttcttgaagcgcatgggctggagcaatggtggtcggatggcatggagctgcagctagcagtgtatgacagcaagcttatatacaggcagttgaagtccctctacacagcaactgcaccgtcaccccctgcaaagtagtagaaactgctgagatcgctgtttcaactggcgttagaaatactctttctaatcagtttctgcctctattaacttgatatgtttcatcatggttgtgactgtgaactattatacagtaaaatataataaacggacatgtgctgataaatacattgatatttttcatgttccatcttctgtcagaggttttcaagactctaaattgttacaagggatataagggatactagtatgtctggataccgattagcatccatgtttatgattatgatcttttgatggtgcacttggctgatgttcgtagggtgcaactgtgaagcttttccagaatgaatgtagcatggcaaattagcatccatgtcatgatctttcgatggttcgcttagctgatgttcgttgggtgcagctctgaagctttttccagaatgaaatgtagcatggcagatgatgaagaaggccaccaaaattgtagggagtggttctgaagcttttccatttccatcatgacaaaataatgaaaacgccaccggaatctcgaccaaaagaacgattaaggcttatatcgagggttaaaatggttaatattgaaataacaaaacgactccgctggggatcgaacccagaatctctggttccgtagaccagcgccttatccattgggccacggagtcgtagttgaagatgcagagaaaaataaatattcatcttatacttagtaatgccttgaaagagacaaacaaaaccaagataaaaaaaaatgggaggaaatgtggaaattcgaaggctaagaagaagtaattaagaacgatcgtccaagctctacgtagggccaaatctccgaacactgtagcggccgcgcccttttaagctcagtacggtacgggaacagcccaaaatagttttgggcctatctcttctgtacgctggagacgagcctctagtaagctggtcgatttgctgtacagtttctcttcgccatcgtcgctagattgtagtacttctgatgacatctactgatgcacattttggtaacggtccagcagtgcagtcgtcggtgagcatccattattcaggttcagcggatgcatcctctgacggcgaccagctctttatattgaggtgacagtgaagaggtcactttggaccacaaaaatttacagcctcctccttgacaacgcattgttgagcagtgcctatgccttgagttgagcgatcgagtgacctcaattatatggaagcatgttgtttgcttcccattgatgattcatgcgtccccgcagactgcagaaaccacatgacagactgacaatggcgacggaatgctagctctctcgtatgcactctctatcagtatgcagtagtagggaatcagggataccccgatgctaataaataacttttacagtggtcgctactggtagtagaaaacaattgatcaagactactacaatattttaccgcgagaccgatttctatgtgagttcagttctaataaatccgatccgtctcattgtggccttctttcctttgtcagaaactcagaaggtgattctgatttctgacgctgcagatggtaattaggaggtgacaaaattcagtgagcttcgcatgcgcagcagaaacctgcaggctgcagctagcacccaagggaagctgctgccttttctggcaacggggccttgtgtttgtgttgttgtgcatagcatagactttgctttgcttttggtatggagcccaatctttggtacatgtgtacgtaccgaatggccttgctcttgcaggaagcaatgttcctgtctcgtggacaaagctaaatagctaatgcaggctgtactggtcattaactatacacaaacccaatgatccagaacgctttatttggcaattgagttgtaataagggactaatagctgataagaaatgcagcagcgtaccgtggtttagtctaaaagataatggcctggaatgcaggatcatgactactgattaagctgctcctactaatggtcagtgtcctccttcctcttttgcctctcattttgttcgtcgatagtacatcattgcacgatctctttccctgagtaaagctgatctctttcccttcttttctggctatcattatttgtatggcaaatgctaacacttaacgccttgttgatctgaataacaataatgaaatctctacctgtcattcataattattcatccatgaaccgagaacagtcaaattcgtctatcttacaatccaattccaatcgcaaatggagtatttttttttcacaagataataggcatagggagaacaagtggcttatttaagctcagatcgagacctatcaaaagacgagaagaatcacattggtgccacgcagataaatcacaacatgaaaaatgtgaatcatgcaaattcggctaaattccacttatgttatctccttgctatgtacagattacaaaattacgtaccgactattggtcaagtcactgctgcaacaaccaatatcatcgacaatggatgcaagaaagaagagaacaaaaataaaagagagagaaaagggaaaaaaagaaaaagaaggtgaagaaaaaggaatgcacatcgctcagcattcagcaaccacaagacccggtcgagatcaaacaggcattgaaggcgatcgagtcagcggccggccggctcatgggcggcggcattggcggcgccggcggcgggcgcgggcgcgagcgcggcgtagtgcgcggcggggcggcggccgtcgtcgaagttcttggcgtagctggcggcgtcgtagccgaacgtgatgggcctggaggaggcggcgcccgacggggacgacgagctgcagatgcacctcgtctcctgcgccaggcgccggagcagccgccgccacgcgcggtggccgcaccaccccgcggcggggctgacgtcgcgcaccacgagctgcaggctccggaccacggcggagccgcgccgcctgcccgtgccgccggcgccggacagagaaggccacgaggacggcaggcagcccgatgagccgccggagacgacgttggcggcggggtggcgcgccgcggttagctctgtggtggttgtggtggtggtgcccgctcccatggtggtttggagaggcgcgcaggaaggaagaagtgggagagagctctctcgtggcggttatacctgtggttatatgggaagcgagacgaataatagcagtattaggctgttagcatgtcgagatgagaaaacaatggtggttattgggctgcggagtagacaagtggtagagtgagatgagctcatgggtttttgtggtggttacttttggagatggaatggacatgcatgggagcttgtgctatttttagacacaagaggatgagtgatccttgtgcagttgtggaatgagtagttagtggattataatttaattactgttagtatcttatattcgagggaatatgttaggaaaaatgttagtgatggatagtagcgaatgtgattttcaaggtgcatcttgtacttttttaaaaaaaaaatgtttgagccactgtaaatgtattactatctccgtttttaatagatgactccgttgattttttctcacatgttacatgtttgaccattcgtcttattcaaaaaatttacgtaattataatttattttgttatgagttattttatcactcatagtactttaagtgtgatttatatcttatacatttgcaaaaaaaattaaataagacgaatggttaaacatgtgagaaaaggtcaacggcgtcatctattaaaaaaaacggaggtagtatgagccagcatatttcctaaacagggtacctaactaaaattgcatttcaaagattctaaggacgtcaagccgtcttgttgaccataagaaacatttcaccagcacaatttttatgtgcagcttgattaggaccgtcgtccaatctacactagacattgtatgcaattattccttcagatttgtttataacgatcatgtagtggtcctctaatccaaaacgagatagtggttggttgtacccagttacccacaccacgagagatcatccagaaactgtgttctgaagccacgcatactaatcttttgagcaaatcacaccctatctcatgaaatttgatccatctgcaaaagaatatgatattatgattacctaaacagttagcctacactattcttctttgtttagattatcccggtatcccatctctaatccatttttgggccaacctccaagatcaaaagagttttaagtgccggggtatcatgtactactcatgtagtcatgtgggttgggtttgccgactgtaccaattgcatacgttgtccaaagctcctgccgatctgcgccactacaaaatgcccttgaaatcctcgattttaggttcctcccgatggatttggctgcgtctttccaccgcgatttgcaggtgcgaagccgctaacgcaccgcaccgcaccgcctaaaattgcgctctaaactcggctaaaactgctatagcacgagcaactattgattatttagtcgtgcatatctttccgatgataatggcagtttgctctcaagtggagcagtaactaacaaccgatcgactttgtttagcaactgaatgatgtagcaagctgacaggttgaagtcagcatagcgtgccatgccagctgctaggatcagaacgcccttgaaacattttatgcatgataagaacgagacagagtatcaacatggagagatcttctcaaggcaaaatctcctcatagacaagctgaaaccttactttgccagttctattaactaaaatgagttgaggaagctaatgtgacggtggggaaaatctgaatgaacagccagccaaaccatgaaaaactctcatttctatggctatttacatttgttaatccttaaagccttacccagagttaattctaatggataaacgcatactgtgcactcattggagaaccatgctacattcacaggtaattcccttcttttctgatcactaaagtttccttgaagtaggaattacatatccatctttgtaccaacaacctgtcagaaagctactagatgccagtgcacaaatgacgcattggtaaaattctagcagattaaacagactgaagtttccacatcaacggtttgtcttctggttaaatagggcttgacttgagggcctatacatcgatagattagtaaagtcagtttattagaagtatgtagaggtagaaacctatgaattttaattgaataacgtaatactgcaagtaccttgttagaggatgtaacggcagtcctccattgtggatcctgtgtaggggatggtctatccctgaacaaaataacaactcttgattgtgtgggcctttctactgtctgccgatgaggaatatctttcatgacccatagaacaaatcctgacggtatggatgatcctgcaagagtatccgaagtaaaattaacaagtggttgtgccatctctctctctaaaaaaaaaagaggcttgccaagtgctttcttgagaatggaatattatgttcgcaataaacatgagaaaatatcaacagaaaaaactattatacaacatgcattctgattccagaattattttgattgattggatgcctagtaaagagttaatttttgtgactaggcaattccactgttgcagttcaatgtgtgccgtaaatacaccatgcaactaattatttttctaaaatcattcactagtttgatggtgttgctccctacagttgagttgcacaacattcactaagtatcaggtaaggagaactaagaatccaacttcaaagtggatatcataaatataagaacaaaaagaaatgtaagttctgacatgattgcaatatatcaactagcagagtttgagtatttcaatctggtactacacatagaatcattagatctagactagcttcaccctgggggtatgagaaatgaaaggttggataaataatttatccacacctaccaccacacttactcatttcactaacttattgtattaattcccacatatggttccatgttggagcatgctcacatgcattcaccatcaggcttcgaagcatgtgcacataataagcctgatggcacaccacatcctaccatattttcccattgcaacatgaactacatttaataaaatgttatcgttcaatttaagaggagttatttctagccatagatggtggagagatacctatgaaatagtacataaacaatatgatagcattgttgatgatgtattcatctgctgagtaccaatacacaagcacctgcaacaagaagtatagcaaattgatatttagcaattcaagaaccagctagtggatatgtcagctactcagctattattgtataaatcagacttactggaacattggtaacaagtgctagtatagcggacgacgagaaacaaatcagtgacacagtagctaaacttgcaacctgcagagaagcaagcattgatatagagaattacagatccgaaataatatatccttgaagattgaagaaattcggatagactgaatggtcctcgtaaaaacacatactatttttcataatttatgctactatatatgaaatactccagtatccagccaatagtagagccccgcttggcccatggtgtggtgttagtgcaactagtcccacatcgagagtttacataagttggggccagcatataaacccgtacattgcaatcataacacttctgagttgacccttttacacaaaaggggacaaaagtgtaagtgaggtgctctttatacatgggctcacttctcagaagagctgggctcatacagattattgaagcaggagtacgcatataggggcatcctgttttttgtcatctggttttataagcactatgaccatattggaatgatatcttaaagtatagaatttatcagaactgaaaccaaaagttgtatcttttgaatatatgaccatttattcaattaatttaatattgtatacgatcattattagtttgctttctcatgattttacaaaatacaatacatgcagcaaatgataaagcagtagagagatgcaatccacaaattgaatgattctgcaagagttataccttccgcttctcagatgatccagtttcagaacgcactttgctcatctttgaaaatagtattgcacctttaaatgatcataaaaaataaaagaaaagggcaagtcaagaacatgttgaatgagaggattactggtagcagatgaaggtcaaattatttagtaaggcggatgtgaaactagatataaagtgaaataggactgtgagactcattcaatatttaatctactgcgagggattagaaacaagataataagagtttatcttaggttgaaacaattgactagaaaacatcatgcctaatattgcgacataattatggtatggtatagatgagtatacataggctatgcttaccataacatgccagcgcaccaccaagtacaagaacaactactgagaatacatccaagtaaacctacaaaataaaatatttggctaaacaatcaagtcacaacacaataggtgattaaataactattgatgaaattggtgagcttgtaaatttatcaagtaaactaatgtgaaaacatgaataaaaagtgtgtgaagaacaagtaagatacaagtcataatggagacaattgtacttatagcatcaaacttatcacaaatagaacacataggattttgttactctactggaccatctctaacaaaaattcatgtttgatctgatgaatttcacattgttgtgtctacctacctaaccttgctgtgcataggtttagaatgcattggcctgaataggattgtttactctgtgcctacaaaacttagtccacaataatgacagatttgtgcaaaccacaacacatcagtgttggaacttggaagacaagtatcagattccatccatgtaagataaacatctagtatttcttcattctatttcttcaccgtagttgtttatttgagtttatagtaatacaaaggctgtcttccagcacttgcaacacatcaatgctattatattgataaaaaataagttgatatatcataggaaatgcagcacataaaaacataaagaatttctaatcatcatacccttttcaatagagatgaatcaataggattttctcctctaccaatccagatgaggatggcgaaggcgattgtaacaacaaatgacagtagaagcacctgtatgggaaataaatattaggtcagttgttagttctattttcacaaatactatatgatggtaggtgcactacatgattaaagttaatcaaacaaatcattctcaagcagtacagtctaaataaaagaaagtgtcataaaggaatgtgtattatgtgcatgagcaaggaatatgccaactaaaaagattaccaaaatcacaaatttttgccggcttccaagctgtactcctgggcaacacctccggcgaacatcaacagcacggatgccaggtttattttttgttctatccagtaaagcctcatggtgactcctcgtatcctcttcatcttcatcgtttgtctggtgacacaggtcaaccctgtaagaccattattttagagaaatatagagtgaaaaaagcaactatgaaaaggaaaaagaaggcagaaaaacatatgcataataataacatgattcatgagaaagcaaaaaattgacaatacaaggttcatggcatatgttatctcatagaaatcgttaaatcatgaccatcatcttccccctttttgtttcaccctaacatctctaatgcaatcctctcaaacgtcgcgtggtaaaccaatgcataacactgaacttatacaggtttggtcctcaagatgagaccttactatttctgatgcaccccaccaacgatttgtggttagatacctcaagtgcaaccgttgtggcaagtgctacaagacatgttacagcttagaactgagctaaaggcagtactagtatgtcttttgcctatacaacgacaaggagtgcacaaaccaggtgtatgaagaaagggaaacaaagtcttctacagtaatgaaaaacactcttcccttgccccttcatgatttggaagactgttattaggccccattggatgcttgttggcatagaaagaccctaactcagactggggagcaatatgtgggttacgtgatcaccttccatgtaccctatcaccatggtgaagtgagcaaaagtaaaaggaaaagtgtaaaacccaaacctcattgaggggtagggcttatctccaataagtccatacatggagaagccttttcgcataataccactttgagcaaaagaacattctcttatcacactgagattgcaagcatagatcgccatcaataataaatcatatggtgatcataccaatcaatcgtggtcgtcatatggtcatccaatcaactggataatgtccataaccacgaaaaagaggtgagtaatgcggcatgtatcagagattatatgctaacgagtaatagactaatagtgtcatgtggccatcttgtattgattataagaggtcaatcttaacagggttacccagacagtaagtcagtaagatgatttaaaattattgaagtccaaagaaattataatgagaagatccatcagttttctaatcaagcatcaattaggaatgttgttttccttttatgctcagatggtttgactggtcatcatgcatgacatattgacatagcctatgctgtagttgtagaggatatttacttggtctagattagataactaagaaataagaattggtgtagtccaataaaaaaactggatatgttcgtcaagtgacaattctttcaagtggatatatgaaacagagacatagtaaacaagaacgggaattccaaacaaatctttattactctcaaaattattagcaaagctacatgagaaatgcattgtaagaaacaagtgccgactcaccagaatgacaacagcaacagaaaagaagcaagaagcaatatctgtggactagctgcaaaatattgagaatgcacaactattaggtctggtcagaaaaatagcatacaataaaaggtcatgtagataagcagggaaaaaaacaaaaggacaacagcaaagctatatatccagtaaaatatacccatgagtacaaatccacatccatggacccaacaaagccatctctcacaggtagcgatgatggtagacacgaaatacacaaggaatactgccataggattgggaaaataaaaatcagagttagtaaaatgttggtaatcataaaatatgcaaggaatactgtcaaaggaatggataatgaaagtacacatgattgacctgattcactagtagagataatacaaatactttatttagaaactagtcaacctgagaagctgttagtgaagtaacaacatttttcttcttataaagttaaacatcagtatatttgattcattaattgtgcacaaattaagacaagtgatcagcagtcatgtcatttggtgtaaattggacctatttaaggagagaactagcatgtccgtaatagaaaaattgcaaacaaaaatgagatctattttctatttcttaatcaaagcttcaaaaccagaatataaatagttcaactattccttgtgcacatggttcctcaatgtcatagtggttgcattccagcatcataaaagaggaagctcgctcaaaaacttgaattgtaacattttccaattgccattagttaaaagtttaaaacatggatagcaggaaccattcagaacaattaagacagtcattaactactgactacattatgcagaaatttccagtgcacaaaaaataataaagaaacctcaagcaaaataaagggaaaaaggtattatcatagcaatacagatctcacctaagttgcataggccaatcataaaatggaatatctgcaagaacgtaggcatataacattaaaaatctggcagctgagctcacagcacagagggaaaaaaaaagtgaggcactaattagcattatttaatatcctactcttgagctctcattcgaaaaccctacagcccacgtattgaagtaaaatgtcccataccaaggaaacttgctacttctgtcaaatagatagactataaaacacattgttgttttgataatctatagttatgtttcattcatgagaaggtcacatgattacacatcattaaaggtatgcataaatgaaataacttttgggggttaacatttgtaaatataattatataaacaaagactatattgcaattcatccgaaccttggaatcagacaaactaaataaatgcatactgaacatgatataaagtggtatgccacaaatagtaccattagtaatctaaattactaaagtgtagaaagataactgaaggatgaagacaatctactcccgtattaactataagaaaagtattatagagtagatgaggaagcctagtatgaagcttgagatatccaaaaaaaaaaaaaaaaaaaaaaaaaaaaaaaaaaaccgggataaggaggttttgcgcctggttattttttagcctccaaactgtcaatgtaagtgactagccactagatatagaggtaagcaaaagcttccaaccagagataaaaacatatggacctaaccacatagctagagcatcagccaattaagtatttatccatgataacaatagagatattatttagtgcaagcatatgaactcattgcaaaacaacatatcagacagttggacaacatgaaaaatagcacaaataggaattgtgcataccttttgccgagtccatccatgctgctgatcatgcctgtggattcttgctagctgcaaaattggaagtgcttaataccgagtaaacggatttaagagatcagattaagtaaaggatttaggtcaatttgcaacagagctcattggtaatgagtaatgacaactactacataattcaccgagtaatataagtgcactacataactatgctacacattgctccactatgaccaaaacatcgttccactgtgaccaaaacatcaccaaatagtaacattatagcaataccagagtgcaataaccttgcaggaatccctaggtgaatagcacatgacaatttatgtggctgactgatatctaattctcgtaaagagcaaaattatcattccaaaatctggcactcccccattccccgtcccgctagcacactaccgccaacgcgcatgacatgcccgtctccccactccctgcccccgccatcagtcgcggacagagcaccaccacgagataaccagatcgaattgcccccacacacgcacctgcacgaaggcggcgactgaaatggaagcgtcgatgacagcgagcgcgacctccgccgagataacaggcatcggcaggcatcccccgccgtctccggccgcggcgccgcgggacatgccgtggcggcccatacgcccgggcaacgacgagcggcggcgaaggaggagagagaggaggaggaggaggaggaggaggagggtgaggatcagggggccagagggcggcggcgcatctcgcggcgggcaggggatggcccagggctagggtttggtgcggaggccggagcagcaggcgggagcggaggcggaggcggaggcggccggaggagggtcagggaggaattgactggaggaggccgcgcctgttggattggaaagcgccccgagacctcggttttttagtcgtggtggcctcggtttctagtcgtggtgtggtgccggggtgcgtggctgcgtgcgtatgaagtgtggtccatggtgatgcgcggggggatccccacgtgaggatgggggcgtgtaaaccgtgaatatgcgaacacgaagggcccggaataccggattgatgggctggattcacgttcaccgtcggtacaacagtaagcttacgttggcgtacacccagggggcttacgtttgttcgatgtagatgtactacaatgttgaaaaaactcggagtaccatatgaagtttgttcgattttattttgaaacggagaaagtataggatagactatttttattgtgtctattttgtttaaatttctagatagataggattagtttttcattaaactatttttattatgcagtatatgtatatctggaacttttttctatttatgttgaattatccatactcctattatataggatgttattgttagcgtcgtccttgtaagaaaagcaatctgatcgaccttagtacttataggttgtttataggctattgacaattggcctaacaattagaagacaaggagtgtggttgtgtgtggggcgcaagtggagcgggagcatggatagacggggaggggatagagcatggatagacggggaggggattgcgagggctttacgctagtacaccactagatattttctttggtcacgacttaaatcgacttttttttttgtttggatgaaacattagagtaaactagatgaaaccccacgcattgcactgggatattttgctgagattggtagttgaatttgataggctaaagtggtataaaattatttaaagaaatattgaatttgatctaaggctcttgatgtcattgactatcttgctaaagtggtcatacatatgttgctcgggcttttagcattcatcacaacaaatcactcgaattgtcccttcaagatctccacatttgactcacggacgctatcaatttagtttgtgaaaaaaaaaacgcccaacatgacatatcaattttggcttccaactggctaatttttcattattattattattattattattattattattattattattattattattattattattattattattatgcacataatggctcaagtgcatcccttatcacaccgttagagagatggaggccaaccgtaaatccctaattttaagggaaccataatttgtaagaaaaatggacagaggccctgtttagattccaacctttttattcaaacttttaacttttccgtcacatcaaactttcctacacacaaatttttaacttttccatcgcatcgttctaatctcttcaaactttcaattttggcatggaactaaacacagccagagtaatgcgcccacaaatgccacaactagatcagtagatcactcattcgcttgtgctcacattttcagaaccgtgccaaagcatgaaagggaatgatcagcgtcttgctatggacatgaggtaagctgcagcatccatctcatatcccacaaagtttctccaccaattgcagtcgacaccggtagtcaacttctcgattttctttgttccgaggttaagcgcaaaggtccagggactgcttcctttgccgagggtgaacaagagggtgcaactcttctcgcagaaccaccgcagtttactggcatccgcactcttaatcttgaactggcggcgcaattgtccgatgccacctttcctcacccattctccggcaccaccacacatgtcatctccggtggtctcaaagaccattgatgccaaaccgacatatcctgaggaattcgctgcgtcgatgaagcacagcttccgttcaggtgtgacaccaagcagacgaaactgctgaatcgtgctgataatgccgtctagcggcatgcgcacctgtgtcggctgcggcgtgtcgaggactcgaggcgtactgctagactgctagtgtcgttcttcgcagcggccagtaggcgacggcgtggagcacgatgccgtggcctagcttgccaaggtcccagtttgtgagcttggggcctggcgtcttcttcgcctccatgctccagctgccggtgtctgatgagtaggaacggaacgcggtaaacctgtcacggttgtagacgatgagcacgcggaagaagttggcggacggcggcggttggtcgatgtcggcgtcggtgagcaatgtgcatgcgtacatcctgggcctgtctttgccagacagaggcggcagcacggccacgtcccccgtcatggggttgcagacgcacaggttgagcttgccgtcgttgacatgctcctcgctctggagctcgagaacgaggcgtccgttgcgggaggccactgggcgtgagagtgatagatccaggaggccaagggcgtcggtctggacgcctaacggcagcgcgctggcggaggggaggttgtagccgaggaggcgagagccgaacgccgtcgggacgaagcacgggggcgtcgagtagtcgacgatgatggcccggcgtttccgcttgcgcgtggtggccacggcggcggcgtcctgctccttgtggaaaaagccgagggcccggccggggagaagcggaagcgctcgtgacagagcgttggcctccttggccaccacgctggcccaccgcctgcacgtcgcggcgcagcggactacgtcggccgcgttcggcagccgggtgaaagtggccgcgagcgcgtcgtccgtgagagacgtcccgttggcgtcgtactccgccgtgtcggccccgctactccggcatcgccgtgacagccagcctccgcggtacggcgagggacgggcggcggcggcggcgcgtgctcgtccttggcgcaacggtggcatcgtgcgcgcaacagattggaatgaggtaacgatccaagggattcagcgatcccgtacttatggccggcgcgaagcgcgagtccgactcccaagcggaaaccgtcgccgcatcggaatatccgatgcacggggcttctcgcacgaccgccgtatcctctccctcctgcgccgctttttctggttgagcagcgccgccgaaaacggcgtgccgctacgctcgccccccgctcgcgttcacctgcgcctgggcacggggacgcggctaatgaacgcttatccccatccccccgcgtcttctcttcctactagaccataaattaaaaaaaagaggaaatttcacaaaactaaatattttatggtttaagttatagaaaatcacacatatattaacacttggcacttaagtacatatattttggtagtttagttttacaaaaccacactatcgatgaatagtttcacccgtgatattatgtggttgtttcatctagtctgaggacgtggtatcatattaatttcgtgcgatggctgataatagaatgtcatgtcctcgtcctaggtgaaacagccacatcatctcgcgggtgaatctatacatcgatagtgtagttttgtgaaactacataaccaaaatatatgtactttaagtaccaagtgtcaaaatgtgtgtggttttctacaacttgaaccacaaaacatgtagttttgtgaaatttactctaaaaaatatataaaaaacaaagttggaaaaaattatgtatagaaatatataaaaaaattttaattcaaattcaaatttaaaatgggtatgtaaacttttgacttataaactttgggtctataaactaatatttgaattcaaattcaaatttgaatcgggtatgtaaacttttgacttataaactttgggtctataaactttaggtgtatcaactttagatgtatagaaatactatatatataaaatatttgaattcaaattcaaatttgaatcgggtacataaacttttgacttataaactttgtgtctataaactttaggtgtataaactttagatgtatagaaatactatatataaaaaaaatatttgaattcaaattcaaatttgaattgggtatataaacttttgacttataaacattcgctgtacaaactttagatggataaactttagatgtgtaaactttaggcgtataaacttaataaaagaggaaaataaaaaaacgatcgccgccagcgatcaatcgctcattaggactttcgcctgggcacggccacgctccagcgcgagaaaattgacattttaccatcgtaaaaaggtattcgcccaaataccactatacagctgggattgaccgaaataccattctcaattaaggggctctgcccatataccattttcttccaattatctctttactctcatcattattaaccaaaatgctcctagttgaatcaatataagtatataaaaatacgtagattataaagtaaatacgccaaaaatagttttacatgttattttttttttctctacaccagattacatagtatgcaacgtactatctcaaaaactcacaatgttttcaatgatataaaaattatttttatttatgatgtaaagatagtgtcttatactctataatttagtgtaaagaaaagaatatatatatatatatatatatatatatatatatatatatatatatatatatatatatatatatatatatatatatatattgcatgtcaagatatttaggtgatatatactctgtaatctacatatttgttttacttgaattaattcaattaggggcattttggtcaacaaagatgagaggaaagagagaattggaagaaaatggtgtttcggcgaagcccctcaattgagaatggtatttcagcgaatccgaactgcatagtggtatttagttaaaacctgttttgactcaggatgggaatggttaggatatggattgaaccaaacagttttaagtgagtttgttgatccatggtttaatagggtcaatccatcatgagtccattatatcactaggttatccatagatatccaaatggatcggctacattactagtagaaaaaaaaactcttatcacatcccttctttctatatagttaagacctaaagctgaattgtggttgagccacgtcacctgtaaatctcagccattgaatctaatctggactcttggtaacgcttcaatcccagcccacttctcttttatcgccatccgccctaccgatgccgccgccagatgcggtcgcgctcccttctcctgcccccgcgctcctttatcagagataacgttagactccctttatcagcctcgtgcgggcacctaaagggtttgtctgagttaatctccgacgtcaaccaagaaagtacagagcatacgactaagtcttccgtcttgctgtaatcgagaatttggattgaagtcaagaaattttatctcggcgggtacaccatctcttcattccgcattccttgtcgatatccaccaaccgttctcgagtaatcgagaaggcgcagagtctgcgacggagccttgtcaacatttgtcgtactcgccttagtcgaacttggtgtagaaccatagagacatggaaccttcgataatgtcgaatagaattttcctgaaatcaatagtcagaaaagaatattagatagaaatagcccccgagcgaacgctcaaagggtaacatgttatagaatgtatggaaaactgaaaatgaattaaacatacagaccaatgttttgtatatgagcatctactcttttactgacttcgatcagtcagtttgttgagttatacactctccctagcccccagccttgtcgtcggagaatcattctcggaagataaggctcttggacctttgacatgcctcggttaaacaagcactaatcctagcccccagccgtgaagttggaaaatccatttccgattacacgacttggttaatacgcacggcgagaactcttacacgaccagatcttacatggtctttcgtctctgaaggatccgacaaggccttatctgctctgggcgtccccagccgaagttcccttaggttcctcagaggccttgtcaagacggcataaagggacattaggataggtttcaacgctaggtatcttttgtggtaagggatctctaggtaaaacacttggcgatattgtgtacctgatatcaactttgttgaagtagaggtaataggagaatcgctacacctctggtcaagaaccaggtagtagtcgtaactcaaccactagaagtaaatgtacgagagatcgctacaattgactggttgaggaccagtgagtaggtgtctctcgatcatttgaagtcgtagtacaaggaccgctgcgttattgctgcagtcgtacctcgaccatctgaggttgcggtgcgagagattgctacgtactggttcgaggaccagtgaacgagtagaattatctctcgaacaccaatggatgttgcggtgcaggagattgctacgtactggttcgagaaccagcgagcgagtagaatcatctctcgaacaccagtggaggttgcggtgcgagagattgctacgtactggttcgaaaaccagcgagcgagtagaattatctcttggacaccaatggaagttgcggtgcgagagattgctacatactggtttgagaaccagcgagcgagtagaattatctctcaaacaccaatggaagtttgcggtgcgagagattgctacgtactggttcggaaaccagcgaacgagtagaattatctctcgaacaccaatggaagttgcggtgcgagagattgctacgtactggttcgaggaccagtgaacgtgtagagttatctctcggacaccaattgaagtgctagagttggtttattacatgtgcatctcatgtagccagcatgactcacgcacccaacttatagcatatccagatgtccgttcgcaatcatgtcgggtgatcaagccgacggcgttcgcgaggagttatccgttaacaaccttttctcgagtagtccagccatggccggtgctatgagataggtcatcggtcttcgttggtaggttaggtgcgacgactctgcatttgtcgagatcgttctcgacaatacggtgtacttgaccacaacctactcgagtgctcaatggttcctgaaaaatattttctagaaggtaagacatatagcagagaatatcgagtatgtatttgaaaaactgtatggatcttctagtattatcaggatatagcgagcagatgtaaatatcaggcattatgtaaaccgtaaacaagcatgatttatacggaagaaaatagggcgagctcccagcgttagactgtagtcggcctaacatcgggaacactcgcacgacagatattgtataaaaaacatgctctagataaacataataaattattgattgaaaatatctgaaaataggtacggtaaattgcatataaaatattgcgtacctttgtaaatacatgtcggatgtatctatgaaattagtagattaatttaaaaaaccaatctaccaattaccttgttgcgcactcgttcgacatcatacgatctaacatcttttggtacgctgcgaagcttgaggcttggatgatctcgatagaccaagttgtcgatgacgacgatagttccgatctcatcggagcatgtactctggtcgggttagatctccacagccgaagtcgtcgagtagcttggagaatccatatcttaaacccatctcgtcaaaatccagaagcaccaaaatctccctacctggtgcgccactgtcgacgtttgatgtcacgattccggtatttgcatagtatggggatcgttggtactaggatatacgcgggactgaggtaaaagagacggacacagggatttttatataggttcgggcccctgaattgtcaggcaataaccctacatcctgttggccaaagccggtattgctcttattcaccataatcacaccagtacaatatttgggatagcctatctaactgttgtcgacatggcggtctgaaggtttgactcgtagtcgacaacagggtagtcttcctcctcgagttcatgcccggcgagatcaaagacagcactagatccctacggctggcctctgtagttaccggatagggtcgatctaggcatatctctgatgtcgatatctgacgtcttatcttgacgtatgttggcttgtattggctcgtggctttgtggcgtctatgttgtctgtatcccctctcctcctagggggccttgtatttatacccataagtgtccccttgtctaagtagaactaggaaaaccaatatagatacaatccgagtagtccttgtcgtttccatataaaactctggttgtctttccttatccggaactcctcctatatccgcaggttgtttccgtataggacatggtatgtggtgggtcctgccgagatttagtcaactactattaggtatgtggtatccataaccctgacacatttactcaccaacaatgagccgtccatcaccggcgattaattccatttatttccctcttaagcctctttcagttcctctttgactaaaatttttacagggctattgctttatttttaacactacacactatactttattcactttcaatttgatgacagtgtcaagaaatccatttagttcccatccgccctaccgatgccgccgccagatgcggtcgcactcacttctcctgccccgcgctccttctccgtcccgcacagcgccgcgcgagctgcggcgcgggcccgcgctcgcttctgctctgcacccgagcgcgcgagagagagatgcgccatgaagcgctccttcccctcccccgctgccgctgcgctcgcttctcctctgcccccatgcgcgtgcgagagagatgcgccgcgggcccacctcgcttctccttctccctcgcgcgcgcgcgccagctgcgccgatgtcccgccagccggcgcactcgcttctcctccccgcgtcgcactgtctcccgccttcccccatcccccacgcgccagccatgccgcggagctgcctccggcctctcccaattcttccagcggcggcggctggacgtgcgagcccatcgccatggcgggcgggaagatccagaagaagcggcacggcggcggcggcggaggaggaggaggaggaggaggaggaggaggaggaggcgggnnngtgattcccccgctgcagggagggatcccgttcgacaagtccaaggggtcctgcggaacccgtcgctggtggactccatcgttgagaaggccggcctcaagcccaccgacaccgtcctcgagatcggcccggcacggggaacctcaccaagcgcctcctccaggccggcgtcaaggccgtcgtcgctatcccacatggttctcgagctcaaccgccccatggttccagttctttaatcgttttctaaaatatattacaagcctaactaatactaccattctaggtcccgctaattttacattacctttttgctccagcatatgagattagaaattatcagtatacaattctgtgagttgtttcttcgttcttacatatatggtgaggattataatcatttggttaattcctacttcctccgtttcacaatgtaagtcattctaacattttccacattcatattgatgttaatgaatctagataaatatatatgtctagatttattagcatcaatatgaatgtgggaaatgctagaatgacttaaattgtaaaacagagggagtatttatcttgcagagataaattccttaagcaattcacaattcccaactgaatggtttacataacttctttgagatagcaaattgaaggtatgcatatatgtcaaaatcacgtctttgcctcttgcgatggcatttgttttgctgtgatctttgaaggttttaatatatgcgttcgtcagtatccaaattaaatccaaacgaaatagttcataaatttgatagatttggagaaaatagttcataaatttgatagatttggagaaaatagttcataaatttgatagatttggagaaaagaatattgatgccttctgttttttagtatttctttatttctattactgatgttttcttccaagcttcacgccaacatatataggaactatgtcagtcagtcacaaaagtaccgatttggaaacaatactgcagtcagatatgcgctctccatgctgatctccttcagatttcagtagccagaattgatctgttccccttctcctaatcggctgttgagctaccgatcatctccctctaggagcaaaagcatttactcaccaacaatgagccgtccatcaccggcgattaattccatttatttccctcttaagcctctttcagttcctctttgactaaattttttacagggctattgctttatttttaacactacacgctatactttattcactttcaatttgatgacagtgtcaagaaatccatttagttcccattcatccacatgacaatgttgaaaattgagttaatttatgaactctgctaggagtcattcaagcgtattggatgtggcttctaaaaactgaggtatgtataccaaaaaatttcagcatttatgtaataatttttagcttttgcattcgtcctgtgttgtttgctgcttggtcgctgtattgttgcagctgccctgttcgtgctgacctggatatgagtttgcctctctttttactccagaatttgtgtttactccaattacgagttagtatagaatagtggctatgttttttttgttattatttcgttcaaatttatgttacacaggatttaaacaagtttagatcatgagactacagatatctgatgacgttgttacaaaagttctcatcatgcatatattttagcttatgcttataatcaggttaacatgggcattatatatgtcctgatacattccattcttctgattgctatttgatttacgttttgcccaagttctgttatagaacctgtcatgaatccatttgatttgctattatcttaaaaagatattaaaagttttttgtaggctttaactttgataaactggatgcacatgcatttacttattgtcagtgcaaatacatccttgaggcatcttggatgatcccatggtgttttaattagttaggaaattttatccgctcattcctctaccgcattgatccagtcagtgctcgctcaaatttgttcattatacatacattggcacattctttgcatgaattgacaaaataccatatggaaaacactacagtgattgtgttcttgatcttgcttgctacatatctgtattatccttaatttcccgcagcaacgcgcggggtttcatctagtatatgtaaaactcggacccaaaatttttaaactcgtgttcatactataaaaacttatcgatttcagtcgaattttggtgggataatttattgcacagagaagcaactttgtgtaaattttgagcccgttatacacatggggcccacaatgcactactaaaatactaaggaaatttcattatatgtgtgtaaaactcggacccaaaaattttaaactcgcattcacatttaaaaaaacttatcaaatttagttgaattttgtaggaatgatttattatatagagaagcaactttgttcaaattttaagccatttagacatgcggggcccacgattgattactaagacccaaaaattctagttttaatgtgtgtaaaactcggaccaaaaatttttaaactcacgttcacactatgaaaacttggtaaatttagttgaattttgtaggaatggattattatatagagaagcaactttgtacaattttttgaatcattttatacatgtaaagttattttgggttgaaccccttaaacctaggttctaatggtttgatccatttatatttttggagcgacaaaaaaatccattaggacaaatttacggatagttttagtagataaatggatcgaccctatgtaagtttaagtgccttaatttggttttggtgattaatgacaaatctaattatatgagactaacgtttttatgagcctttctttgactagtcttatttggatatgaaagtaaaaatgatgggaggtatgtattaaacttcacatattctaacttggtatctcttgtggatccaaaatatagtgtgagctccctcattgatattgattgattatgtgcatatgcattccttcatatccatatgtatgcacatcttgaggggagcttattctatattttgttcattataagatctctaccttgatttgaaattatctttcatatcatctctttgtattgtttatatcggattattatctatcacaaaagagagaaaagattgaaagatcttggattaaacaatttgtgtaattgttactttggtgatagatgataaacaaatgtttatgggattaacctctcttttacataagttttcaacaaggttatttcccgataatgagatgtggtagatatgcattctttggtgatggaccttaatcatgacaaggatgaaattcatggagataaagcgatatgtatcacttcttatctcctactttttgataggttcatatatatgatttccatgttattgttatataagtgtgagactaatgtttacttgagtcttatcttatttagtctcctttacattgagaacatggagatcatgaaggtatgtgtttttttgtttatcttcatcattactacatatgccttctctatgtatataggataaacccccattggttcttctttacttatgcatacacttgtctctcttgtatatttctttgtatgcatatacttagggggagcaaatcctatatatttattgtgcatgttttagatccatgttgttcacctattatatatatcggatctttgcacttgagcttgcatacaagtatatgacacttatgatgttaatgaatactcaacaaacatatccatatctttcatatgcaaccggttggtcaccaagtggaggatgccaaccgatttgttgggactaatgttttcctttgaaccgtgcaaaggaatagatctaattgcgatgaggctaatgaatgacaccatgggttaatggtcaccaagccaaggacatcgtcatgttggcaagaataaagtcaagcttgtgatgagaataaagtcttgacaaaggatggcaaagacctcggcataaacatggttcaaccgaatggtcacaagtgttgatgttggctcaagcattgaccccaagttggatggcgcaaggctaaggtataatggagctaagaatgttttcttagtctttttcccggtcttggtgtttggtgtagaccggatttactagataggtgccgtactatcaagaggggtctatgaagcgagcatgtagatgattttgtgccatattagttcatatgcatataggtgcattttgtgggcttgtctagccaagtgtggtgagttttatcaagtcccaaacaaagagagaagtgggcacatcctataggtttgagtagcctcatgtggttatgtccggtggagtatcctttggagtgtgagccatttctccctgagaaaagttgtgtttcttggattgattgttcatgggttggatagccctttgaataagctttccatagagtccgagaacgccaaattccgagatccgagtcaaaagatatcgtcgttttactgacggttggttgtgctgaaaagtgacctgcggtctgaccgtgggccttaggtcggtctgaccagggctgttagccggtctgaccggcgtggtaaggccggtctgaccggccctattggtctgttgcactggtctggtttttggtggcgatacagagccgccagagccgcaactggtcagaccgagccgatggcggtctgaccgagccgtggacggtctgaccggccgcttcattgcggtcagaccgaccaggttgagtagtccgttacaaagtagtccggtctgaccggcagagcacagagttggggatttcgactccaacggctagttttggtggttaggggtatatatacccactctccagcagcaagggcaaggttttggcactccattgcattatcttgaacccttgcaagagctctcacacccttgtgcacttagtttatctagtaaggtgttagagagtgagttaagccaatccaagtgcattgcttcattgttatagctagtgtggcacttgatcatcctcggcaagcatcctagacttgttactcttagaggttgccgcctcttagacggcttgtagaggtgttgcccggtgacctctccgagaagattgtggaggaggcccggcgccggttgtgagtggtttggagttcaccaccttcggagtgaaggaagaactaccctagtgatcgaggctttggtagttctctccgtgggccggctcccgccttgcccaccccttgacgaagggggcgtgcggtggtttcgtggttgagcggtggagttgggctcgcctcaacggggattaggaaaccggcgagtttccgaacctcggtgaaaattccttgtctcttgtctcctttttttgtgcaaatttactttgagcaagtttacatactttgtgctattatcaccctaggcttgcaaacctcaacataggctagcttctttgtgcacttacttgagactagttgatttaggtttcgaattgtgcaaaaccattttgatttacgcttccgcatacaaaactcggttttagccaaaagtttgaaaaaccgcctattcacccccctctagtcggccttcttgatcctacaccttaaccattcccatcctgagttttgacgatggtaatatggtattatgccaattttctcctactcggctccgcgccgagccgcgcgagctgctctgctgccccacggcgcccgtgcggaggccgccgccgaccgcaccactagcagccctccccaaccatgccaagcaaggcaatcatctctcttgcggcggtgatgctcctcggagcaacgtcccggccatttgcgcctcaaccacgatgaatttgttcctctagatcatccccatgtcgtcccgtgccccacctccaccacccatcccagccaccggtcgccttcgtgtgtacttcggcgagccccaccggcgctcctagaccccgtcgtcggcctcggcttcgccggtgtgcctagttcccggagaccgtcgccgccgcacccaacctccaccggctccacacctgtccctagctaccgtggcgtcacccaagcggtggccgtggttcccctgggcatcccatcgccggccgccccccctccggttggcgcctccccgtgctcacgcgagagaagagaaaaatctgattaagtctaatggaatactctccatcccaaaatataagaatctatgatcgaatgggacattttctagcctgtctagatttgttgtactaggaaatgtctcatccaatcataggttcttatatttttgggacataagtagttaagttaactaatactacctccgtcccaaaataattgtatttctatgattcaaactttgtcccaaaataattgtaattttagagtactaattgccccatcaatcatctatcattcaaatttctccctattatacccttaaccatcttcccactctcacataaacaccatttaatgaggggcaccatagtctttcttctcaaaccttaatatatgataaacaacatagaattacaattattttgggacggaggtagtaatcagttgtccctatgacatatgggccatgactactaataaaaagtgtttaatactacctccatcctaatatgtagcaacaaggatgagatgagactcatcctaggataatgtatatagacatgcctcatgtttagatacattgacccatcctaggtaattacattatgggacggagggagtacttattttgtaagtttgtgatactgacaactgggcccaccatttataaaacccgtcacatctgacctcacgccgacctccatactcgctgcctcgattgaggagggaggagatgacgagatggattagtcgggaggttgagagatagtggagagagatgggagaaaaagaagaggggaggatggacgaataagatgaatttgacggattggtcttacgtgtagatgaggaagatggatgtaactacagtgggacagttccaattttataaaattttaatggcacgacgacaaataaataaattgtaatggcattttatctgaaatgatatatttacaatggcatggatcgaattgatctatataattcatcatccccttttcgtgtaacatgtctacattgtcaatatatcacaaacgaaacgattggagtagtaatattattggattaaagaaaaacagaagcaaagatttggagcttgggctccaaatcagtgaggaaggagatatccaagattactaaataatttgttattcacaattcctaaatactcctaaaattccttcaaagaatccaagattactaaatgaaataaaaagtagaaaatatgtatttttttagtttgtttaacatgtttttgaaaaaaacaaattccaaaacaacctaacaaatttatgaaacctgtttatttattgaatgtatcactatgcaatttaaatggaaagcatggaaacattataaatgcattggctttgatcattgtttattttatttattaatcacccttatttattaaatgtaaaaacaatgtactttttcttgaaaacaccaagaggagttaatatggttagtttggataaattaccaatagtaaggcaaataaagggcctacgttgggatagaggctaactttgctataacttcatttgccataggtatgacaagtcacataaaaatgtgccaaataatttgttatccacaaccatggcaatctttagctatgacgtatgggctcatgtgctaataaagtgattttgtctaatctttgtcatgcaactagcctaagaaatcacaccacatctaaggcttggcaaacttcaacccctaaccaaataacccaaagtattctcacgtactcccgatagtttcgatagtttttggtaatttatgttgcctctcgcaagattgcgtggagctattagttgtattgcaaaattaacctatttcacccatctaaaaatatacgtattttgtgttgcaaaaattacctaacactatttcaaaatatagttatttttatatgttttatcgaaaattactgttaagatgagaaatagttgcgattgatacattgagatagggaagtaggtactccatccgtcccattttaagtacagccatgattttctgtgcccaactttgatcgtctatcttatttaaaatttttttaaaaaaattaaaaacataagtcacgcataaattactattcatgttttgtcatctaataatgataaaaatactaatctaaatttttttaaataagacggacagtcaaagttgagcacggaaactcatggccgcacttataatgggacggagggagtaaaaaaagatttatattttagtatataattggaatcccgtatatatttatatttttcaatgaaggaattctatggaatgcaaatcaattttcaagttgagatcacttaacattggtcctattaaaaaaagtccctaaatgctactccctctatctcaaaatataataagtaatctaggtctagattaaacataatttagtataataaatatttgacaaactaaattatgtctaacatggagggagtaaaaagaaaataaaaaaatactactccctctctctcaggtataagatgttttgatcttaagtttgacaatgtttatagaaaaatagtaatattttcgatccaagataaatttattataaaaatatatctaactattaatttaataaaatttatttaaaaatataaatattactgtatttatctgtaaactgggtcaaaataaaaaaatatcataaactaaaacgtactcagcactcactcatccagcgacacctaggcatctctctggaggagtcgtggtcaacatacaccacgtcactcccgcgctcctccacgcttcttctcctctgcctcgtgcacagcgccaggcatatccatgtccatgtccatgtccatgtccatgtgctggaccttggcgttccatgctttcatttacttctggatggcagcagcagcaacgtgccagtgccagcatacatcatgtgctcagctgggcgctacgtgctctcgcctttgcgcggattgcgccggccataaatgaaaaaaacggacgaggagtgcaccagcgaatgctgcaagaaacgagtcatacttaagtactgtaccctactgggaattatctaatcgaaattcaaaagtcacaagcattctagcgcaaagatcacatgaaatagcctagtttctttcctttcgatacaaacgagggaagatgatttcttagttctaaccatagtcaggcacaccaggaatttgcaagtacatcaattgcacaacggaatacgattagaatgctacactgaaactcacggcagaatcgcacaaaattcaggaaattatgagatcacttgcagaatttgaaaatttagaacttataattgctagtacatcaaaaattcagaacgggaacagcgcgatacaaaaatttttctccaggagcaaaagaaaagaggcaacagcaacaagcactccggtcaggtgcaacgtgcttggctcacaaaagaacaagaagccaaacagaactgaacaggccacgcgacggccaacgccgagaaggttacatgcgatgcgaagttgtgcgaggagatgatgatacaggcgccgccctttcaccaggcttcaggtcggactaggacgccggccgccgccgcatcgaagcagaagagcacgcagatcaggtacccatcaggtctcgtcagatgttgcagccgcagcagaggaagaagctgcagagcgcggcggagaggacgacggcctcggcggcgtagaggacgtggaagagcgcgtcgtctaggagggatacgaccaggccagccttctccccccacctccacccgtagccgccgccgccgccgccgccccctcgcgccccctgcaaactcaccatgcctcctctcgcaaattccggatccgcgcgagcagattgatggatggatggggatggctctcctcctcagctggtcccccggcccggatggagatttctttgtttgaaatcttagaagtggaagatgatgagcagcagaagggctgatgggactgaagggtttttgtacgccatttgctggacttatgggttaattaggcccacgtttttccgttgcttagattatttcctactagcccaagttgctttcacgatttcagtacggttaatatagtgattcttttgccataaaaatatagtgattctcgtcttctcgagctgctatcatgggacctagtatgtgtgtttagtgcttagtgctgaagtatttaaaaacgatctgggttattggtaaaggaaagggaaatgttcctcgagcggtgaaacctaatggaaaaatcatggtttcttctgaatagagaagtttgtgtttttcaatcgggaagatatgaggttttgcttttgggtgtaagattacttaaaccacagatttgggcttactgtagtttctgagtttaatgtttaaatagtattgcgtgagatatatactgcgaatttcacaataaggatactgttttcgactaactgacaatatgtttcagtttcttcgcctttgaccactagctactcttaaataattaaattttgcttatatttatggacactaaacacttcaacatcatgacattttactaagtatttgcaaatatgttacacgagagacaagtggtcaaagtatgaaaataaatagtgtcgtataatttattcagaagcaaagggagttgtttttttttcccacgaagggtcaaggtgatatatcaaggcactgttcatttctgattccgaattttcatttgcacgcttcttatgcttctaaacggcgtgtgcttaaaagcaaatatttataaaattttatttgaatacttttctaaatatgactttttaactctgtagtagttaatttatttatttatgtcctcagatagtataaaaatagattattcattaatcctctaatttcaattatctcagggtttgtttgacacaattctagctctaactccatctctcgtggagctgaatgttagccaaacagtttaatgtccattaaaaatagaagtaaaactagatcgagcgctctaaacaaataaatatagagatgagactagtttaggttgctccacgaaacatctttgaaatgtttaggcaaccgatcacctgcaagattgtaagcttttattgtcagctcgtaataggacgcaacagtaataggtagacaaatccattcaacacaaaatgcatagcctttcttggcactccagggcttccaaagtaatggagcaattccatgctagattgaccctaacgaagacaagagtacaaagaccagtctaaaaaagagagtagtacaaagctaaactattccgaataatctcgccaatgcaaacagttgatcaactcttcccccttagccccatctcaaattcacaatcttgtgagcgaattcagagatgcgaataggaatattttgtacgtgtgtgaatacatatgagtaagtgcgtaagtattgtgagtgtttatatagtttttttaagtattgtgagcgtatgtgtttatacagtgtttaaaaaaagatcatatgaaaacacaagtagcaaaattagtttcatctacctaatataaatccttttagttgtgagggtagaactaaaaatccatatatatcgccaaattttacaacccaaatcacaagggagaacaaattgaaattgctccacccttttggctaatgtttcttaatgtgtatgaagtgtactccctccgtcacatgaaaataaatctgtagaactatgtgcaaattcctcctgtcaatttgcttttttataggatataggaagtacataaaaactatatataactactcaaaacaacccataatgatcctccattgatttaaaatacaatgctatttatatttcctacgcatattaaaaaaattcaaacgagaattcagctgtttgcaagacgcaactgctttattttccggattaaatcttttctggattcaacaaaggcaacgtattatggaaacccgtcttcccgaagctgacacgggtttctgggtgatgtgcattcataacccgcaagtgtgagcccggaagtacgctctcgttctccgcatgcgggttgcaatcctcgcggcatccttggtaatccccaaacgccagggacagtagcgaccttgcggccgtctccccaaaccagatcggcgtcgggtctttgccccttttcacgagcccaccagcgcattctcgcagccggagagaggaggcggcggcggcggcggatcgaggagagggagcggagaagatggggggcggcatggaggtgcacaagaacaagtggatcgaggagtggaacgcaggccgcgagaacctcgagttcaacttccgctggacccgccgcagcctcgccgtcgtcggcctcttcggactcgccgtccccatcctcgtctacaagggcatcgtccgcgaattcgtaatcccctcctccgaaccccccctcctcttccttgccgtgccctcttgggttatccaggtcctaacgaagaatctctctctgtgcgtgcttgtttggttgcagcatatgcaggacgaggacgccggccggccgtacaggaagtttctgtgagtgctgcctccggtggatgcctcgagactgcgaccgggagaaggactctccgttcggtttgttctccatactgttttaattggacagggagtattttggagtgctcagactgttgcgtgggatctgtttgttgaataagctgtcatgacttgttgtcttttcaattgctgaaatcttggagattttattcggttaattcggctgaataacagtgttgcaatgttgtttgtgcgttcttcaggtactaattagaaccgtagtttgcttgtctcatttattaaaatctgaaatggattacagtgaatggttttagcatgtcgtttctctagtgtggcctacgtagtacgtgctattggattggctgaatagatgcagaaaattgatagcaccgatgcccatgaggcaaggtattgaccaagaactttcttacgattaattatggctttgggagtttgagtgcattgatgttatacgggctgtttcatagcaacccaatgtaggctctaaataaaattgtatggattggaagctgcactgaggcactgataaagtaataatgatcattattcctatgtggcttggatgagatttcatttctagtctcaaaattattgtactttaccactcttcaattatacttgttccttggccactatgccctgtgtatttgctatacatgagtaggtgtctaggaccttttcagtttttgcctataaaaacattaagttactttttcttcagcacttgctagatatgatggtctgagtctgtgaacagcctaactggttgagtagtctcagttgcctggcaaatggttcatagcttatttgcataactttactgatatactgtagtatagctagttttttttttcttccttagtattttcatgtataaaacttcatatattcacagcgtttagtatagatgaaattgttagttacaatagctgtaactcatcgactaccgaaacaacaggtaatgctatttgagcagacctggagagagaacaggatttaattgcttttctgattcatgttgatggaaatgataggtaagagtacgaacagttttctgataataagttctgtagagttagcattcttgaactgctacagcagagtatgccactcccttttttgtggaaagggccaagcttcatgttgatggaagtacagttgactttcatcttgctatattattattgtattgtctggtgaagtcttatggaacatcttgcatactgatgatccattgactccagttatccactgaacattttcagcaaagtaatagatgaaactgtgaccataggccacatggtattagatgtgttgtgttgcatacctgtccatacacttctataactgggttttgttttctattgcactgtttcaatgagatttttttactgttagtaagaaaggtagattttgtgattttcttttgttggatatgttaatgtagcgtggttggttgaaagggcatgttttttacatactaggaaactaatttagcctgttctctatggaaaagatggtatgctagcaacttcaaaatctttgctgcttatatatggagtatatatatttgcatttgatcacgcggtcgatttgctgatgcaccattatcatatcatatgtacctatagcctccttcaaactactgggtatatatgttagattagacttaataaggctagagtattgttttaaaacatcgtgtatttggatgtcaccccatgcaccaattattagaaaaccattgtaaccatctcaacttgaacatttgatatctttaatttcttttatataactaaactgtcaccgtctcatccactccaatagctactgcgttgtatgaaacttgctagttcttgtttagttttttgcttccaagatgtgttcctgcttactgctggcgtgtataatgaagtatggactcaaaaagtctatgggtgatggagtgaccaaattgctatttcaatttaccagttgtggataacttcacagtgaccgtgttttattttagtgcattttttgcttgatctttagttgtctcttcgaagttcttaagaaccttcatcattcatgggctgcctcctttattttgttctgagcttctaaaatggaattaacataactgatgtggctgggtttactctttccttctgatgttacatgcggttcttatgcttagtaccaaataatcacataaattgcttttgacatgtcagtctaggttgatatgtcatcatagtggcacccaaatgaaaataaaatctgcctcatatgtcaaaatcctgaatctctctctcatagctacgactgacgaacttccgagcagaaaaaacatgagcggacacgttgtttctgaatattgcaggttgattgctggccatacttgtctagtgatgaatggtgatacaagtatcgaagccactgcccagaaaaaaacagaggtcagcctcattttgtgtattaagctgtcaacctatatcattggctcgcaagtgctctgccggtatctgaccaggtctacctggttaatgctacacttgcataaaaaaaaaatccatgactaagttcatgtttagcggtttagtgccatttctattcctcgtggttaatgctacacttgcataaaaaaatccatgactaagttcatgattagcaagtttagtgccatttctattcctcgcacaatccaatcgaactctgactttgcacggtcaatcttatctaacactgatagctactacggcaaaagaaataagaagagtagcctagtcttttcatggatactaccaagtttcgcctgtgcgtctgttgcttacgtcgcttgaaaattgaagcaagcaagcgacacgaagatctgcacggccaaagagaaaaccacctcgtggcgaactgcgtccagctcataggtatatataagctcttgatgctctctcctcttcttgcccattagcattggacctattggtcgtttagtgatcacgctgggagctgcacgtacgttgcacttgcacgccgcgcaaccatgtccagcccgtcgccgacccctcctgctccccctaatcggcctccacagccacctccttcagcaaatccgccccaatcgccaccagctccccctgatcggcctccacagccacctccttcagcaaatccgccccaatcgccaccagctccccctgatcggcctccacagccacctccttcagcaaatccgccccaatcgtcaccaacaacacctccgccgtctactccaacaacacctccaccgtctcctccggttattccaccacaacctcctccagggaaccctccaccacctcctccggagaacccaccgccgcctcctccaggaaatcccccatctcctcctccggtgattccccccacgcctgctccagctccacgtcctccacctccggtggacccccctatgcctcctccagtatttccaccaccaccacctccaccaccttttccaccaccgcctcctccagtgattgccccagtcccagcacctggtccggcccctactccgaatccggtaccttccccaaatcctaggcctaatccgcaattcccacctcctcctcctcctcctccggtgttcccctcaccacctcctcccgtgagccctccacctcttcctcccgtgaaccctccaccaccaccaccatccagaccgaggccgagtccaacaccgtctccacctccgcctattgcaagccctccaccacccgaggtccaaaactctccacctccgccgccatcacccccaccaccacaggctgtcgaagcgccaacgacgtcaccctcaccttcatcatccaaaagcagcgggaccacagtgggtgtgggcgtggctgtcgccgcggtggtcgtgatcggtctcgcggccgggctgatctacttcttcatcggcaagaggcgccgtcgccaacagcagcctccgccgtcattgccaggtacatatgctcgtatcacctttcctgggaaacaaattccttgccttcgcgttataaaggcacggcgccatttgaaatatgaacggttggctaaacggacggcataggtatattacgatgctgtatcgacggttgaagtaggtgtgtcactgcagctggtgcttgacttgctccttcatctaacggttgagatcgccagaaactatcgtcgcagctgatagatactcccaccgtcccaaaaacaaatccattcctagcatcttaaggtagaagtagtagagatgaagaataactaaaatacccttaataattgattaaagtagtaaaaaagatatgtagataaaaggtattgaagaaataaaacttatcgttttctgtgctaaggataggtaagatgtacggagggagtacgctttacgcttaaccttatcacacgcttgcacggctgttacccacgccccagtttgtttgtggtgtgttacagtaattccatctatttacttttgattacgcgggcgtcgagaatgatcatggtcaattggacatgaccattcaaattaaaaggcacatccacaccattttgaatattttgccagtgctaaccattatcgagttagcagcggtgtggaataaatatattttacaacataaaaggacaattacatgtttctcacatgcaaccaaatacttcctacatctacttttgatagtcatatttcatcttggtacatagactaacaataagtgattctacttatcatccatttaaatatgctattagtcatttctcgtaaacaagcgattcattaatatttacatttctcaatgcccatgtagctaatcttgtgtggaagaatggagagtcacgcattaaatccaagaaagtcattaagataatactccctccgtactcataaaggaagtcgtttaggataacgacacggtctccaaaacacaacttttgacttcttgtttctataaaaaatatttattgaaaagtgatatatgtatacttttatgaaagtatttttcaagacaaatctatttgtataatttttatattttcaaactcaacaacttgagagttattcatgatttatattcccaatttttgacttaaacattgctctaaacgacttcttttataagtatggagggagtaagttgttagattgaaatatgcctatcaaaaataaattttttagatttggaaatatgactataaaagtagatggagggactagttgccaacgattttgaaataatttgaatacatcgagttgaacatgccactcacatagattctcaagttcaactcgagctacagaaacaaataattcggctgtgaatagtgtctatgctgattatttgcacatttcggagaaatgggtagagtgcgaggacacatactatatataatcactttcttctttttttaaaagatgacgtcgttgactttttgtcactcgtttaaccatttatcttatttaaaaaattatgtaattataatttattttgttatgagttgtttaatcactcaaaatactttaggcataatttatattttatacatttgcataaaatttttaaataagatgattggtcaaatatggattcaaaagtcaacgatgtctgcatatctgccagtactaagatacttttttttatttgtgctctacaagtttgtgtgatctcatagagggattggcatacattttttaaaccaccccacccttgttttttttgtgatggtacgatccaacttcactctgttaatcgctcttttacgctatatcaaaactcaagcaccgaaggggagaccccgtggtttaaaatttaataaacttcgttattttttaattaaactaggaccatgacatgcaggttgccttcataaaacagaaatagaaagagaagaagaaataaagaagcgaaatagccatttcatagttttaaaatggtactccttcgactctgaaatataatgacatctatcatttaaaatttatcctgaaatatatcaattcttcaccaatatttttttcctaaccaaccataacctttcaccattgaaattctccacttacttcattttcttaaacaatcacaacattccccatttaaatccacatactttcttaatacccatatccaaggtaaaaattcatatattttagaaggatttagttttttgaattcaatttttcgtatacgatggcatttggtagcttcatgcaatgcctcctttattgtgtttcaagcttctggaataaaagtaatgtcttaaaaaagaggggggggggggggttgaaggattgtttacgctttggtgcaagtcatggctatcttcgttgctatacatgcttctttagttagtactccctccattttttaatagatgacgccattgactttttttcacatgtttgaccatgtcttatccaaaaaatttacgtaattataatttattttgctatgagttgttttatcactcatagtactttaagtgtgatttatatcttatacattcgcataaaatttttgaataagacgaatggtcaaacatgtgagaaaaagtcaacggcgtcatctatttaaaaacggaggtagtaccttgcaacagtttgacttatgcaacttgtcataaggaattacaattataaaaaaaaatgcaaccttctatcgtcagtaaggatattatcgggatgaaccattcatgcaagctaaagcatttggacctcggactagtagattcaatatgacgataacactatatgcgacacatgcactcacatgttaaacagattgttagataggttaagaattggtagtcgtaagagagaacgctagctaaatgcaatatttgatgaattaggtgatcacactttgagaaatgtcaattgtggcgagtataacacgtaactgtccaacttgcaatcatagtagaatatatgggaacattttttacaatatgcaagattcttctagtgaactattatgagctacaactacctttgttcttttcttcttaagcaaacgatggagctggttcctggtagtgccacaactttgaaaagcaagtattaagttaatcattcatcttgcaatatttgttcaaactagttatacaaatttctttaaaccctatctattatggtccaaattacacaaaaccacactaatattgacatatgacacataaccctgatattatcgtcctaaagtttcacaaaaccacactagtttccattttgtcttcagatctaccatattttttttatacaatcacatgtcaaatttataaatatatttattctaaattttgatataagagtgtgtcaaaatggttagcaatgttattttgtgaaactttaagaccataataattatgttatatgccacgtgtcaaaatccatgtgattttgtgcaacttggaccgtaataataggtggggttttctaaaatttactccattttattttaggcgcgcatatctagtcgaaatagtgaagacaacatttgtgctcaacctatatataagtgatgtccaacttggcttaacccacctaatgtgaacttgaacttgatttgtatatccaaattaacatagagtgtgatgcgcaatccataagatatattgtaacacctatctttcggattgcacaaattacttatggattatagttataacagttcattttaccttttttttttaaaaaaaagaaataaagtctaaattatctttaaactattgtgctagtccgatttacactatatacagttgataaattgtgcatgataattagaatgtgtttacatctgttttcgcatcttagaacgtgattgatccatttatacatagcaacagcatgcatccaaccatcccatatactagtatggaagtgatgaaatcacttgattaaacatccgtttcctggcccctcatgatacagtcaaggaaaaactgttggccttgagtttgcgaaaggcggatggattcaattaagcccaaagccccaaaccgttttcagcaaattgcccaagaaaaataatcttaccttggcttgactttagagactcgcaagcttcatactcggagcagaaaaacataccgctcctgcgctccagatcgatcaactcagaacccaggttgatcgacggcgtagcttatatcttctgagagaacacgtaccgcagtcactgctcaaggaaaaaaaaaagagtacaagaaacggcaacagcttcgttttttttttctcgccgggcagcctgagtttcatttgtatttgcggtcaagcctttgtcatttgctcattttaaacactttgcgaccgaagttggagagtgagtatgctaagctgctagccgtctgtatctgaccggttctgcttgccacgctggcatcagaatgctcacgattacgcactgcggcgggggagctatacatatgccgtcgctgtcgctcgaggcaagcaacaaaaatctcttttcttgccccctccgtacggatcataccgatacctgcaccacgttgcacttgcacgcagcgcaaccatgtccggtgcggcgccaacgcagcctactccgcagccgacccctgccccgttgccgccgtcgccgccgcctcctcctccgccgattcctgtcccttcagcgacacctcctccgccacccccggtaacctcaccaccacctccaccggtgtttcctccgccacctccagtaccatcaccaaagccgacaccaacccctacaccggtgacgccaaccccaactccgccggtggtgccatcatctcctcctccacttgttccaagcccgccagcgcccaaggcctcgccgccaccaccgagcaacaacgtctcgccgccgcagccaccctctaacagccccccatcttcaccaccgcctccacagtcacccgatgcaggcaatgccccgtcttcaccggcgcctccgcaggcgctcattaatttatctccaccgccgtcgccgccgcagccggcgtcctcgtccgccccgtcgtcgtcctccaacgggaccgtggcagtagccgcgggcgtggtcggcgcggtcgtcctgctcggtctcgccgccgtgctgatctactgcttcgtcgccaaggggcgccgccgccgccgaagccatcaccagccatcgccgtacccggtgtttccaagtaagttacgcgccctacgtacgtacttgcgtattgacatttgacgcgcgcgcgcggccgttgcacgagacaatgctacgtcgcgggcatgtcgacgcacgtgacaaccgcgcgcgcgcacgcatcgccagcgcgagagctccagttttttgcggtgtttagccctgatgaagtcaagaggatcgacagttcgataccgaaacggcggcattgcgtacgtagcgtgcctgcgtagcgcgttcgacctggacaccgtcttgtgtctagcggcgagcggttcaaacggcacgttcgcaccattctgtacacacgttaaggctaacaatgggaacagtactttaaacaccttacgcatgtgccatcttttcttgcaaacgcttgaaatagttataaaatatcttaagaaaactaagaacgtgtaagagcgaatttgacgtccacgcaaaagaatcattttgtgaaaaaaaatgcagttgtttcatacagttaaatttgtttttctatcaccatttataaatctaatttgaccttacatatctgtagagtaataatattagaccttatgaccttagttacatttggacaagacaaagtaaaatgctagggaccaaaattactccaactcggagtaagggcatgcatgctcaaaggtatagtccgatgcaagcttgtaggtattccaagtcggaaaaatgccctttcatataactatctcttgaacagactcttcattaatacatactccctttgtcatataatataagggattttaggttgtttatattcttaaaatctcttatgttataagacagaggaaatagaaaggagtattaattaaatcgctgcatgtgtcgttaactctcgttgaacgcttggtgttatctagtcttggatgtacaatgcttggtgctatctagtctcttcacttttttttttttgctaagagtcattgttgagcaattgttaagttaaacaacgatgtttccgtcttctctcctctcccttaagagactaaggtaactattatttcaattttcaaagggattaattagctgcctcaagtcacttaccttaccttacgatggttaagtcaacttgccacaaggattatcgatccatctgtccatccttacctatatatctacactaattgggaacattgtggtcgtgggccacttattatgatcatagatatctctctgtttcatattataagtcattttaatttttcttaaaattaaaattttaaattctaatcaagttaaaacatagcatttcaacataaaacaaatatatatatatcaaaatatgttcaatgtatatcaaaatagtttatttattttggtgctgtagatgttcctatatttgtataaacttaatcaaatttaaaaagttttggctatgaaaaaaaaagttaaaatacattataatataaattggggttaataaaatatatgtgcatttcacttcacgggccacttttaaagcccatgtatgtcgaccaaaacgtcatggcctacttctaaagcccatataatctatgtgataaaaagcataccattggaaattatgtgtacctttttagcgtttttttactttaattaaaaaaaacagtactccaaacgaatgcaactcattgcttattaatttcgatttttagaatcattaaattataaagataatactaaattgagacccccacataagaccaaatttgtagtgattaacttcgaattttagaattattaaaccaaaaaaaaaagctatagttgaaaattgaaaccaagcattagctcaatatttattaattacgaattcataactattgaatcaatacgatttaattgaaactccaaactgagtacagcttgatatatttattaattataaattttaaaattatcatatcaaaaggagctaaaatttaaactccaaactgaaaacaatttgaaatttatcgattacgaatttcagaattatattgatactcatgaaaaaagatgaagttgcatcttcaaaccgagtataattaggtactgatttattccaaatactatatcgattatgtgctgtttattgttgatttttttttcttgcgcgatgattcgggaatactggtgggcatcgaaaacgtgcgtgctgatcaccccagttagttgctttcgcctaccagaacttgattgatgcatacacagcaaaaacatgcatccaacttgccaatatgtatagacagtatatagtatagaattggtcgtgacgctgtgacgtaaccaatctcttgacagccctttcccctcatgaaacagtcaaggaaaatttctggttttgcatgtgcgataggcggcggattttcttaaccaagaccacttttcggcaagttgccaaaaagaacaatattctcccctcgatggatcgggacagtcacaaaacttttatcatcaaagcagagtagtggatcaatcgtttcacaaatcagaatactctgaaggctgatctgtgtccgtacttgttctgttgtctcctgagaaaacataaaaaccgcagccactgctcagaagtagtacaactgtacaagtcggcaagtggtttgtgtgattatgtttgttacttcacgcaatgagccgtctagccttgtccttggctcgctgctcgcatgtaaccgaagttggtgaggctgctcgctgctggtgtcgcgctgtctgcctgtatctgaccaggtcgatctacctgtcaaagactcacggttgcatcgaaaatacatgattaagttcatgattagcagtttagcgccattactattcctagcacaacgaagcacaaatgcacaatccaaccgaactctgacttcagcacggtcaatcttatctaaccacccaggctagctaactaccatcatacaaaggacagaaaaagattctcgttttttttaagagaagccaagttattgctttcgcttgaaccaggcgagcaagcaagcaaagccgaagaattgttacacggccaaagtggaaaccacctcgtggtgaactgcaaccagctcatagatatcttgcacgtaatcttcctaattagctagcccattggtatttggtcgtggtcgttgaatcataccgagagcctaacgttgcacctgcgccgcgtgccaccatgtcatctcaggcgccgtcggcgccggtcacgccggcggctccaccgccgcagacgccacccgtgacgcctcctccggtgactgctcccccgccggtctcaccccctccggtgacgccaccaccggtgactcccccgccggtgtcacctcctccggtgagtcccccacctgtgacacctcccccggtgagccccccacctgttacacctcccccggtgactcctcctacaccggtggctcctccaccagtgccaccgtcaccgcctccaccgacgccgaccccaacgccggtgacgccgtccccacctccgccggtgacgccatcccctcctccgcctgtcgcaagcccgccgccgcccgatgtcccaaccgccccgccaccgagtaacaaccccccgtctccgccaccgtcccccagcaacgtcccagcctcaccaccgccaccgcgaatttctttatccccaccgccaccgcccttgacgccgacgcagtcgggtgcctcctccggctccaagtcctccaacaacgggaccgtggtggccgtcggcgtggccgtcgcggcggtggtcgtgctcggcctcgccgccggtctgatctacttcttcgttagcaagaggcgccggcgccgccaacacccgccgccgccgcaccacccgggctacccacccttcccaggtacgtaagcgcgtattcccctcctttcattggcagtgttggtcgcgcgagatcatgctacgtcgcggccacgtcgacgcgacaatgcgcgacgcggggtcccccaagcctttttcggtgttagcgcgatcccatccacgcccttcgctgcggtcgtcgcgggtgaccgatggtggtgatagcgacacatcggcatcgcgtacagtgcgacgtattccatctcgtccggctcgtgtccgcggtcttcgcggcgcacactcgttagcgtttgaccattttgtatgctatgctcgtgaaaattttctccagggatgcatcgatctgtgcgcggcgattgagttgagctgatcgaatgttttttttttccctgttttgttgccgtgccacctgcagccgaattctacgacccgcaccggccgccgtcgcagcagcagtcacacgcgctgtcgccgagcccctcgtcgacgccgccgctgctgctgcagccgcactcgttcgtgagcagcggcggggcgtccgaggcggcgtcggcggtgccggggatcgcgatgatgggcggcgcgttcgggtacgacgagctggcggcggcagcggacgggttctcggaatcgaacctgctcgggcagggcgggttcgggcaggtgtacaaggggacggtgcgcgggcaagaggtggccatcaagaagctgcggtccggcagcgggcagggcgagcgcgagttccaggccgaggtggagatcatcagccgcgtgcaccacaagaacctcgtctccctcgtcggctactgcatctacggcgagcagcgccttctcgtctacgagtacgtccccaacaagacgctcgagttccacctgcacggtaagtacttgctgccggatgatgtaccattgttgcgtgtaatgctggggcttgcttgggctgacacgagtggttggtttctgcaggtagcggccggccggcgctggactggccgcggcggtggaagatcgcggtcggctcggccaagggcctcgcgtatctgcacgaggactgtgagttccaccttgtgtttcctccgaaatctaaggtggtgtttgggaatctctaacaaaaatataagtccctatgagagagacttgtgcttttgttaaaaggattaaagtttagtcctttcttcctaaacaccacataaatatatgcggaatctgtgaaactgtggttctgataagatggcatgctttgactgttgtcaggtcatcctaagattattcatagagacatcaaggcagccaacatcctgctggactacaccttcgaaccaaaggtaaatcgcgaaaatttggaacctgcaataattgacgttatacgcgtatttatcgcgaaggtgcacacatgtttgtacaggttgcagattttgggttggccaagtaccaagccactgagcagaccgctgtttcgacgcgcgtaatgggaacttttgggtaaacacatcaccatcacaaccacaacaatcaattacacttgcactcgtacgtcaaaagttcctcagtgcacgcaccacgcggactaaactttgtgctgtcaacaacttgtatctccagatatttagctccagagtatgctgccacgggcaaagtgaacgaccgttccgacgtcttctcattcggcgtgatgctcctggagctgatcaccgggaagaagcctatcatggtgtctcacggtgaccagcctgacacattggtttcttgggtgagtgggcttccgagtcttgaaccgaacacgtagatttccatttgccacggccggtgaaagtagtcatctctgtgtgtgtccaacaggcgagacccctgctggtgagagctgtggaggaggagaacttcgaggagctggttgacccgaggctggagaacaactacgacgcgtacgacatggggcggctgatcgcctgcgcggccgccgccgtgcgccacaccgcgcggtctcgcccgcggatgagccaggttcttgccaaaactcctcacaccttcactgaacaaacacaaacacacagcacacaccgcacggcttctggtttcagcaactccgtagcttgtacactgaaaatgtggacactcgaatggtcagatcgtgcgttacctggagggcgagctggcggcggaggacctgaacgctggcgtgacgcccgggcagagcgcgatgcagcggacgagcggcggcacgacggaccagatgaagcggctcaggaagatggcgttcggctcggccaccggtacgggcaccgtcagcgagtacacgagcagcgagttcagcgagccaactagcgagtacgggctgaacccgtccaccgagtacaccaccagcgcagccggcggcgacaccggggaggtgacggtggacgtgcagatgacggccggcgccagcggcgaggcggccggcacggagaggctgagcaggcggaccaccgctagacgtggcgggcgggtgtgacagtgcgacaccggaatttcggtgccccgcccggcgagcccggcgacttttagccgtacgtgatcgtcaaggttgcgatcgaatgaattaaatcattttgttcgtgtatatatacacgtaatgctgtcactgtaaattaaactacattccaaatcccgcggttgtttctttggttttcgaattcatgcaatttttgttggagtggaagtttgtaaattgtacctaccttcactaaccacccaggttaataaacatcaaagatgagatttgtttggaagctggaatgattcgtcttctccttcccgccctgaatatatgtactaaagattctgacatgctacaagttgactgaaagtttcatgttatgttcagatccacaatcgtgccatcctattatcttttcgtttttgaaaactaagctagattatgctggtgctatatcatgtgcaggttgcaacttggaatgaaatgctcgcttgagagcctatgtcgcctgacacagtcgatgggccgaccgatgttgtgggtgcctgggtggcaaacggacccaaagatcataagcctattgttaagtttttttttaataggttccgttaaaaaaaagttgtttttaataggccaagccatagcaaccatcagtacgcagtccctcgtacccgtttagtgtcatatatggatctctattcatttgtgaccatatcaatcgccctttcagtgtggaagattttttacgccccttttttattgaatataggatgagaaaaaatgtgcaaaagtcaaaactttacagaaagagaaaaaactatgggatgatctgtgctaggtatttcactcctatcagagcttaaagttttggcagcctctcacgtgggttagtgttgagaattctttgtgttgaaacactatcaggttcctttctttctatatctcccatatgctcagtaagagaagaatgcggattcctttcctgggcgtcccaggttgctagccatcgttgtccaccagctatggactaatgtggcggcgttctagctggtcggcttgctatactcctgtgccatccaattcgttaggatgccccaaattatccaggtgtatctgtactccatgaggagatgaaccgccgtctcaagggtgcgtctctgcacaagtgcagtatgctatccccaagtcgtaggcctgtttgaagttcagactctattttggatagccagccaagcgaaaattttacatttgtttggtccccatggcttctagatgttcgcattgtagttcgtgttgatggcttcgaggaactatgctttctaggctgagcctaccatgtactctccgggacttgtgagtttccaggtgatttcatctaccacatctagggttagctacacactatccactgttgtctagagggtcactagctagtctagaagctcggttatcattgctcctaggatcaagaggtataggtcttgcgactaggtatcatctgcaatcgcctctcttaaggttctgttctttcttttggagatagcgtaaacctgtggcaacacgtcctttggttggcgtccacacttccaggttgactcccagaagcgtgctattgcgccatccccaatggttattcgtgtcgctgtcggtgacatgggaccgggagtatcatgactagaggcttgggcagccgcggtcacccacgtggcctgaccccctcggggggtcgggcccgagggggacgtgcccaccccctcctctgtctccccgaggggtcgagccgctcctgtttcggccccgagggctggggcgccctgaccccctgtggtattggcgccacgggtgtgggttaggtgggcacagcggcgctcaccaaaccacttttattgcggaatggacaagcgcgccacgccgcatttaatgcagcacggcgcacgcatatccggtccgtgaccggtcgcagtgtgtgaccggtcacagaccggtcagatcgcgggttaggtggcagcaggcggcctgtcacacgcctcgccccgtcccgtcggaatgatgagagcctcttgacactcgtccctagctggagccggcgtggtaactcctggagttagcacgtcagtcccgactcgattcatgccaggcttcatcgcaaccattgcaaggaagtcactgtatgaagaagggcagatgtgcggcatgctaaactgacgcgtggtggagaagaatgactggtctgtgactggactgatgccggtcacgtcatcggcagacaaccgtgctcccacgttgcatctgcttccggcggagtggaggtaggtatgacccatcccatcggagggtcattcagacagcggccattgcagatctcctcctattaatgaagaaatgacagggtgatcccctgtgtccgacgagcgacggcgctgggcatcactcaaggacaagcggtgatttagcttccaggcggaggcgtgagtcaagatttggtcaagatagggtgggtccccacctagaagaagagtaggtagaagtagtgcatgtggtatccccttgagatataaaaggaggaccttgcccacctaaaaaggggggaggagatcgagagtaaaaaagaacgagaagagaaggaaaaatgggggttctagagcttgaactctcttgctctccatttgctctgtaactccttcacacacagatccaccagaacacaggagtagggtattacgcttctcagcggcccgaacctgtatacatcgcccgtgtcttgtgcatttgctctctcgcgaacgttccacagatcgagggtgaagaacctcactcagcgcccccggccgaaccggcaaaggggggcctgcgcggtctcccggtgaggagcttgccacccgcgtcggtacactcttgggaggatttgtgccagcagttcaccatgaacttccagggcacatatccgcgccaaggtgaagaagcggacttgcatgcggtacagcgaggggacgatgagtctcttcgctcgtaaattcagcggttctgtcaagtccgcaataccataccgtgtatccccgcacacgcggtgatctacgcgttcagggggggcgtgcggcacaatcgcatgctcgaaaagatcgcctccaaggagccctagaccaccgtggagctttttcagcttgcggaccgtgtggctcgcaaggaggaggcctggacctggaacttctctggttccggtgtggcagctccggccgcccccgggtccgccgctcggtcagggcggcgggacaggaggaggaagaagaggtcggcctatttcgacgacgaggggcacgtcctcgccgtcgagggcgcttcgcgggccacccgaaaggggaggcctgcgagcgacagaaagaaggaggccggtgctcccagcagggagcgcccgaccggcaagtggtgctccgtgcacaacacctccctccacgacctcgcggactgccgcgcggtcaaaagtttggctgagcggacgaggaagtaggaggaggagaggaggcagaagcgccgtgagggcaaggtcccggcggcccccgccggcaaccagcgaggtgaggccaagcagaaggcccccgccgaggacgtcgacgatggcgacgataacctggggttccaggagcctcaggctactgtcgccaccgtcgatgggggagcgtgcgctcatgcttctcgccggagcctcaaggccgtgaagcgagagcttctggccgcggcccctacccatgaggcgacgcggcgggcgcgatggtcggaggtggccctcaccttcgaccagaccgaccacccgccgtgcgttgcccggggaggacagatcgcgatggtggtttcccccaccatttgcaatgtgaaattgaggcgtgtcctcatagacgggagtgcagccctcaacatcctttcccccgcagcctttgacgcaatcaaggccccggggatggtgctccggccgtcccagccgatcatcggtgtgacgccggggcacacttggccgctaggtcatatcgaccttccggtcacttttggtggttccgccaatttccgcacggagcgggtgaactttgatgtggcggacctcagtctgccctacaacgcggtcctagggagacccgcgttggtgaagttcatggcggcagtccactacgcctatctccagatgaagatgccgggccctggtggccccatcaccgtccatggcgacctccaagtcgcgcttgcttgtatggagcagcgcgcggaccagctcgccgcggcgtccaagcccgagggtggcgacgagaggctcagcgcctccgtcccggccgccccgaggcagcggatgatcacgtgcgacgaggtcccggtcaaggaggttgccctgggcgacggcccgtccaagaccacacgaatcggtggtcttctggacgacaaataggaagacgcgctcgtctccttcctgcgggcaaacgccgacgtcttcgcctggagaccggcggacatgcccggggtccccagggaggtgattgagcaccgtctcgccgtacggccgggcgcaaggccggtccggcagaaagtgcggcggcaggccccggaacgtcaagccttcatccgcgaggaggtggcgcgacttctggaggccggattcatccgtgaggtcatccatccggagtggttggcgaacccggtcgtcgtccccaaggcgaacggcaagcttcggatgtgcatcgactacaccgacctcaacaaggcatgtcctaaggacccttaccccttgccacgtatagatcagattgtcgactccaccgcggggtgcgaccttttgtgttttctagatgcatactctggttatcatcagattcgcatggctagggaggatgaggaaaaaactgcattcatcacccccataggaacttattgttatacgacaatgcctttcgggttaaagaatgcaagacctacttttcaacgtaccactcgaatttctttgggtagccagttaggacgcaacgttgaggcttatgttgatgacatggttgtgaagacgcgcaaccaagagaccttactctcggatctagcggaaactttcgaaagtctccgctccgcccgcataaagctgaaccccgacaagtgcgtgttcggcgtgcctacgggcaagcttctcgggttcttggtcactgcccgaggcatcgaggccaaccccgagaagatacgagctatagagcggatgcgccctcccagcaaacttagggatgtgcaatgcgtcaccggctgcatggccgccctaagtcggttcatatcgaggctgggagagaaggcgctacccctatttaagctcctcaaatgttccgggccgtttacttggacggaggaggctgaacgggccctcactcagttgaaggcgtacctcagttctcccccggtcctggtcgccccgaaaccagatgaaccgttgctactttacctagcggcaaccccgcaggtggtcagcgcggcgttggtcgtggagcgcgacgaggacaaccctcgctccgcgcacccccaccctgtatcgactcgacccgggagagagcagggaggagaggcccccgagccgaacggtggcccgatgcccccgacggccggagctggccctctgcccgcttgtccgacggtgccaggcgcccccgaccctcaggatggccccggggccactgcgggaaggccgcgcctgtcgccctccgaccccgaggtcgtcgacacagaagccgagtgcgcctcgcgcggcctttcggacgaaaagcaccctggagatgcggctggcgaagaggatcggccccgccgaaaggtgcagcggcccgtctacttcgttagtgaggccctccgggacgccaagacccgataccctcaggcccagaagatgctttacgctattctgatggcttcgaggaagttgcgccattatttccaggcgcatcgggtcacagtggttacgtcttaccccctcggccaaatcttgcataaccgagagggtactggacgggtggtgaaatgggcaatcgaactctctgagttcgatttgcactttgaaccacgccacgcgatcaagagccaggccctcgccgactttgtggcagagtggaccccagctcccgagcccgtctccgtccccgaggccagctcgggcccctcgcagctgcctcacaccgcctactgggtgatgcagttcgacgggtccctgtctcttcagggtgccggtgcgggggtcacattgacctcgccgagcggagacgtcctcagatacctggtccgcctcgactttcgggcgaccaacaatatggcagagtacgagggactccttgcgggactcagggtagcaactggactggggatccgccgcctcctggtgttaggcgactcccaactggtcgttaaccaggtctgtaaggagtaccggtgctctgacccgcagatggatgcttacgtgcgccaggtgcggcgcatggagcgccatttcgacgggatagagcttcggcacgtgcccagacgggataacgcggtcgccgacaagctctcaaggctcgcttcctcgcgagcccagtccccaccgggcgcctttgaagaaaggcttgcccagccgtcggcgcgacccgaccccataggggagacggacgcgcctgaacggcccccgaggcccgtcggagtccaggcctcgggacccgaggggagcgctcccagctcccttagatcgattgcttggatcccttagactctacccgaggaccgcgaagggagtgaacgcgtccagcgcatctccaagcgctacgtgctggtagaagggaccctctatcgacgcgcggctaacggagtcctcctgaagtgcattcttcgggaacaaggcgtcgagcttcttgccgatatccatgaagacgaatgcggagcccactccgcctcacgcaccttggttggcaaggcctttcgccagggtttctattggccgacggctctcaacgatgcggttgacctggtccggcggtgcagggcgtgccagttccacgccaggcaaccccatcagccggcccaggccctgcagaccatacctctttcatggccgtttgctgtctgggggctcgatatcctgggtccgttcaggcgggccccggacgggttcgagtatctgtatgtcgctatcgacaagttcactaagtggcctgaggcttatccggtcatcaagatcgataagcactccgcgcttaaattcatcaggggcatcactgctcggttttgggtgcctaaccgtatcattacggataacggcacccagttcactagtgaactcttcggtgactactgcgaagacatgggcatcaagctctgcttcgcctcccccgcccaccccagaagcaatggccaagtggagcgcgccaacgcggaaatcctcaagggcctcaaaacaaagaccttcaacatcctcaagaagcacggcgacttgtggatcgaggagctgccagcggtgctctgagcaaaccgaaccacgccaagccgagcaaccggggaaacgcctttcttccttgtctacggcgcggaggcggttctcccatctgagctcaccctgaggtcccctcgggccaccatgtattgcgaggctgatcaagatcagcttcgcagagacgacctcgactacttggaagagcgaaggcggcgcgcggccctccgagccgcgcgctaccagcagagcctgcggcgctaccatcagcgccacgtccgggcccgatcactctgcgtcgacgacctcgtcctacgccgcgtccaaacgcgtgctggactgagcaagctctcaccaatgtgggagggtccgtatcgagtgatcggcgtcccccggctgggatccgttcggctggccacgggcgacggcacagagctgcctaactcgtggaacatcgaacaccttcgtcgcttctacccctagtgggggtcgggtgtcaggtctcgggctcaggccaaccccgcacccccccgggcgtgcagggttggccgggggctaccacatacagataattgtcttttttctcttccgtatttcaataaaagcattttcggtttcctaatgactgtgtttgtgccattgtttccttttgtagaatcttgactttaattagcacgctcgtgctcgatcctgccctcggtggcccgggccggctaaaatcgccaaaaggggcccagaaccgagccgtgccccggggcgtgatgaactccgggggggaatcggcaaaggcccacaatcgggtcatccataaccctcggtcaccacgctcccggcctggccagtctcgacatgtggatctccccaggcactagctccggcccgcgccgtttgaggctgggacccgggcacgagcccttgttcaagccaagacacagaaggaccgcggcacagaccatcctcgtctcatacacacaacaaatagaattgacacagaaatttcctctttatttgattgcagattaagttagtctatacaagaaggggacccgaaggcctcggaagaagaaataaaaaactatataagattggcatgggcctgggggctcattccgacgcgcccgggtcgccggcctcatcgccgctgtcgcccgcaccgccgtcaccgccctcttcgtcggagtcgagggcgaacgcgagccggggggccgtaccctcgaagctgtggacgatgtggtcggcagcgtcccggacctgcgcgcgcgcatcgtcctcggtcccgggaggaaactcgtccagcgctgcccacggggagaagtccgggtccctggcctggtagcttgccagtacgagctccaccgccccccgggcgaggtccctcgaggatgacttgatcgtctcctcgagctcctcggggagccgctggagggtcccggccatctctgagaggcgctgggcgaggcccccctggttggcggcatacttcgcagtccgcccgccccagaggcccgcctgccgcccggcgcggtctatacgggagacggcatcccgaagcatgccgggccctacctcgcctgccaagcggagggcctcgacctccccggcggacgagtccagcgcgccctgcagctcggcgatggtgtgttcggcagctgcgaggcgggcggctaggtcgccgtcgcccgcggccgccccgccgctgcgcgccctcgcgtccagctccttcgcccgcgcctcgagctcagtggcccgctgatccagtgcggccctctcggcgcgggcgccttccagattacggcgcgcctgctcctcccgcgctgcctctgcggagggacaggctgtccgacagccgatgcgccgcggactcggcctccccgagagctcgctcccgctcggtgagcgcgtcctcgctgaggctgagtgtggactcctcttctgcgcacgcggcctcgtgcgccgccagcgttgcctcccggatggcgacggcggcctcgcggtccgccaggtccctctccctcgcgcgggcgcgctcttccagcgccttggcacgagcctcaagggcctcttcgcgccgccgggacaccgcctcgttctccgccgcccgccgttcccgtgcagcggcggcgtcaaggactccccgggcggcgtcgagtttcttctctagctccgccgcccggctcccgtattggaggcggagatcgtcccgcgcctcgttgagcacggcggtggcgatgagggcagtctcccgctcctcctccacctccctggcgatctccgccagctccctccgacgggcctcgagctctgaggcgtgccggcggtgtgccttgcggcccgcctccaccatggcttccaccgagcgccgcccctcctcgacgcgcgcccacgccgcgtcgagctccgtccgctctgctagcaggacctccatctgggcacctagctcgtccagcaccgtggtgttcgcggcggctaaggcctgcaggaggggctccgcgttcagtggggcagcggaaggcagaggggagagccgcctcggtatgggcgccgcgcggctcggcccgccgatcgacgtgccggacccaggggcgacccccgaagctggctcgtcccaaacgtcgcccgaggggtcgggcccgagcggtgcgcccgcgacctcatcgtgggtggcctcggaagtcatcgtcgcctcgggcggagtcgggtcgggggtttggcaggccgcttggcgtgcacgcgccacctccgcctcccgaacggactcctcggcccggcggagtttggcctcctcccgagcggcttcctcagcctggcgaacccggacggcctcctgggcagcttcctcggcttcccggaggcggtctgcggcttctcgccggtcagcctcccgcctccgggcctccgcggtcgccgtctcctcggcctcggactgtccggacttggaatgacgggaggagcgcgacgggatctcactgaggcagaagaaaaaccagaggacaaaaagaaacgggtgagtgaaaacttgccttgggagatgggagaatgaatacggccgcagtgggcgcggggacgaacctgcgaggaggtcggctaaacgaccaccttgggggagagataaggtttccccggcgtggttcggtctcccccatcttgcggcgccgcttcttctttcgctccccctcgggctgcgacgtcggcacggcaccatccaggcgcctgctgctggcacgcgccgccccgccccctcggggaggagatggggaaggggtaccctcctgcttcctcttcccccgggcgtcggcagggtggctgcaccccgggcccccatcgtggggcccagaagcatgaccccctcccagggtagattgttcccccctgcggctcccgcccgcgccatcgtgacctcgaggagcccgctcctccgacgccccgaccgcctacatgatggtcaggatgttggcgcgatctggatcgctgcagagggggaggactccttgggggatgagggatgcctccacggagctgagattcagcacccgttggaccaccatcttgaagtcctcaggggcccagtcccatctgcccccctggtgggtcctcatgtagtcctcggacccggtgtactcccaggcgcctctggcgcgccgctggagcggcgcgatctggcgatgaaggtagtcgccgtacaccatggccctcgtgagcccctgggatcgcagacctgccaggcggtcaagaacggcgtcgtagccgtctcccagatctaccggcgcccgccagctggaggcctgcgccgggggctggctcggaagtcggaggcgcgtttcatcggcgaggggggtgtagaaccagtcgctcttccagtcgtcccacttcttgcggaggacgcagggaatgtagcggttcagcaccggcccccgcggctggaagtagcagccaccgactaccgacggcggcgacaccggctgtacggtgaagaaccaccggaacagccggagagatgggcgcaccccgatgaacatctcgcacaggtgcgcgaagatggccaacgtcattaccgcgttgggggtgaggtgcgccatctggagatcgtaaagttccagaacatccatgaagaaagaagagaatggtgggaccagtcctgccattgcgaaagagaggaagaagacggaccgccccgggtagtgtggcgccgggcgtccctcacccagcgcgaccacctcccggccggtggcagattccggcatgaatcggcgcggcagcccggcctgcctctcgctcacgatgcgggaaggcggcagcacgctaccgtcgagcggtgcggagccccgtgccatgacgccggcggaggaggagcttgagaacgagtgagtgcggcaagggtagggcacaggaaacaaggagttagggcgcaagcggcgaaggcaaggggaataatggcgagaggaaggaaacgaatctcttccttggcgcctttatacccttgccaacgttatgcccggctcctcgtttctcgcgcccactatctcgccccctcgtttctcgcgcccacgcctccactaatcctactcgtccgtttgcggcgcacgaggcggatgtgcggccgtggcagtcaagatgggacatatcgtgcgcgtgttaactacgctcgccgaccgaagcgccatcatcatatctccaggcgaaatgaacctgctcgtcccgattcgcgcgctactcgagtaatgtaacggtcttgaagaggccactcattgttatcggtcgtttttccctagccgatgcacgcgatttgcgaccgctgggttcctgcccgcctgtagagagcggccccacctgtcaccaggtctaaagagtggcgtcacgcccgagcgcttccctcgaggggggcgatcgccctggcataacgccgggggctactgtcggtgacatgggaccgggagtatcatgactagaggcttgggcagctgcggtcacccacgtggcctaaccccctcgggagggtcgggcccgagggggacgtgcccaccccctcctctgtctccccgaggggtcgagccgctcctgtttcggccccgagggctggggcgccccgaccccctgtggtattggcgccacgggtgtgggttaggtgggcacagcggcgctcaccaaaccacttttattgcggaatggacaagcgcgccacgccgcatttaatgcagcacggcgcacgcatatccggtccgtgaccggtcgcagtgtgtgaccggtcacagaccggtcagatcgcgggttaggtg

SEQ ID NO: 6432 - DNA, 17498 bp, Oryza sativa
aagagtaagcaatccaacgcataaatatgcaagattaacattatcaaaaacaaaaatgaacccatgataccatgctaatgcccagttcaagagagtatcaagatggtaataaaacatagaacatgggcttttagctctatcacatttgcattttattccttttcggatttttgaagaaaactatagcacaatcgcgatggtacgcctaatcttatcagtcagcgagtgatgagggcgccaaacagtgtcatcaaatctcaaacaagttttccagttagagctcctgttacaggtagtctcagtgctatcttcagcactacttatgcgtaaacacactcagtagcctgggacaaaagcagtggtaaaacacataaagcatagaaagaacataattgatgcacccatgaacaatcaagcgtgagcattcaaaaggatgtgccgaaagctattgctaagatgataaaaacatggcatatctatgagaaggatattgcatcaaaagcaaacttctagagcaagttgtgcacattaattaagttcaagtgtagattcaatttaagcaagtatcaatgcgcatgaagagcatagcatgaacatacaagctacttaagcacgtgtaacctagacaaaagatctagcttgcataaaagtaagagatgagtatcaaaaagatgtccagtaaattgttaacaaagctctttaatgaaaagatgtataatacaatgcaagaaagtaaacatgatgcaaatgttacaaatgcatgcaaaagaaaagaactccctctcaacgcaatccacaggggtggatcacccctaactcactttgcaagaactcacatcatgctcaatagagaggttttgtaaaaatatcagcatgtcgtttctcggatttaacaaactctagcacaatgtgttgacgaaaaatccacgcccagctaatggtgccaaatctgtgttgatgcgaactatgtcgacaaacacaatgccgggagatctgcttagctgccgggagatctgcttagcttcagtgcaggtccaaaaatttggattcgaatgcgggcgtgccagtcagtttgatattgcgactgacaggatagataaattgatgatcacatagtcgatcgaccaataaggcgatatggcgataccagacgatgttgataggattttgaacacatcggctatatgtccgatatagattctgacacttagataaataatgatataaagacaatcgactgatgataatataatgaaataaatatccaataaaccaattagccaacaatgatatgatagaataaatattaatctgatggttaaagcatacatcggctgggaatctgatgtcattagaatttaaatccaaaagattaggcaatcaataaaaccttgctgcaattggctaaaaccaacttgtatataatccttataagccgatgcaacatttaaataacttatcgactgaaaccccaatgaaacattgattcatgtttactaacttaaataaatctaacttacaaccacaaccctacagggcgaacacaactggatgtagcataaggttgataattacctgatagatttaagcaagccaatatgacaccaatcaaagtgatcatgtattaaatttgactaagacagtaaaatcatcaaagagaaatttaacacatcaaataaaccccccgatgaaacattagcacgaacctatcggcttaacaagactttgattattaataacaattgaggtcggacctaaccgatgcagcacgagattgcgtttaataatctgatctcaatgagtcgataaaactttctaatgcgatggatataacaaatctatttaaaatagcattgtgattgtagagatatgtcggctaagacaagatcagacctaaccaagatagtcctaactaaattgatgcgtctctaaacacaatgcaattaaaaatacaattcaaatatcaggtaggtaaaatataccaaccgaaccagagcaatccaagaggtcaaagcgatggagccttgaacaacaccaatataaccaatacaactaccagggccggcagaacttaggggttaccccttcaccgaagatcaaagacatgcagccccgcgttaggtgccaagttctgcaggtaacaaaaacctcggaaaagagggtgttatgcgccaatattgatccagagataaatggcaatgaccccaagtgtacatatttataccctcgggctgatacgagtcctaatcggacacgttacaagtttcctaaagataaaaagaaagatagaagtcttgatcagacactagacaaaacttaaggaaaattactaaaaactacctaattattagatagaattaaactgttatgccatggtcttcacgattccttcctaaactcgatctcttctagataaaattacatcggctgcttgacttctttccttaaccaaatccactaaagaatcttaccaaattttggtaaattttggcgttaacacaatggtacatttctaaacatattttcggagaaagtggtaccgtatctcaatgtgcttggtccttgaatgttgaaccggattcttaacaatgttaattgcactgttgtcacaaaaaaaacactcaaagacaagcaaccatacaccttcacttgtggttttgaatttaaacttcaaaagcccaaaaggacatctctcataaagaggtacacacccatgggcaaatgggccggcaaagtgactctaagggactactccaaagggctccaaagggagcctactcaccctaacatccacctctctatttatagcccaagatggatgaaatccccctaagataatgtcaaaattgcccttggggcaaaacccatagctcagatgaaatctaggccatccgttgttccttctcctcaaaggaaatatctcagatgtccaaacgagccgaagcttctcatgcgcacgcactccagggtgaacccgtgattcgcgcgaacgcctcctcggccaatcaccgcacgcacttgcttgcatttgcatccttatctgtcacttggtcttgatttttcaatctcttcaaataaccaagtttgacttgcaatattatttgctttgtggagcaaaatcaaattttcaaaattttgcttgaagttgccaatgtttccatcaagggggagattgtgaaacaaattgtggttttgatttattgtgatggaaaattggcgagtgtcggaagtgcaagaaatgtgtgctgactaacacgagtaaggttgtgatatctatgcccgaacaacgggcgttttgtttacgtgtgtgtgcaggtgatcgaagtcaaccttggtcaatggcgaggaccgggactatgctcagggaggaacggaggtccgacgcagtcaagaggccatgtgacaaggtgggactgacgtcaggatccttggaggtctctctaggtcaacggcagatcgggactaaactcatggaagagttgaggtccagaagagtaaaggatgccagttgacacggttgagtacaaggcggtgcccgatgaacgaacaccgtgtcagtagtacttcgcaacgagattcacaaggtcaagtgtgcaagtgtctgagattcgcgaagagtaatgtacaatgctagacgatacatgcacttggacagcgtatgtgtactgtactcatgcaagcaagtgattgggttgcgcatatgtgcacgtggcccaatgccatgcacttgtgcatgagtctgatcgacttggcttggaggaggtcaagccaattaggctcttgcttgttgacccaagacggaggcggtaaggcgtccggctagcagccttgttggcagggaggccgaaccatgctggtccaggtgatggtccaagacgatagttgcagatgaggcctggctagatgcaagacgcagcgagggcatggaggcgaaagccgtacgggacatgcggttgtctcatactcgccgcacaagcgcataaggtcgcataggtggagcgcgcctcccagagacgcgtggtgaacgggtattcggcgagcggcaaagacgtggatcaacgacgaccaagtacgtgtggtgattggccaaggagcatacgcgcggatagcaggccccaccgtagattgctcgtgccggagaagcttcagccttcagctcatctcactggtaggtgggcctagctagcaaggtgcgcgggaggagtggttcgatgcatattttatgtggaaaatgggatctggagcgggcaacaacatggaggacatccgagttatttcctttgagaaggaacaacggatggcctagatttcatctgagctagggtttcacccagagggcaatttgaacattttcgtagtgggatttccgtcatcttcgactataaatagaggggtggatgttagggaaagtagtgtccctttagagccccttggagtagtcccttaaaatctctttagtgtcccttctgcccatggatgtgtacttctttatgagagatagccttcagggcttttaagagtttaaattcaaaacaagtgaaggtgtatgattgcttgtctctttagtgttttctttttaacacctttcgtatcaaagatattctggagttggatttaatttcagtttttgcgctacggtctaagggaattcttcgctaaagattttttatgggtattcaatgaagaatttcaatacactatatacgacgactttgtccaaaaatgccatcgccgttatcgtcgttagggttccgtccattccgcgacattaagtgctataagatgaacaatgtacttaactccgcgacattaagtgctataggatgaacagtgtacttaacagtgcaaaatagacagaaccctaacggcgatggcattttgggacaaaatcgtttgtacgatggtatttcttggaactcacacttgctaatggcattttttggatttggacgcttgtcaatagcatttcttggattatctcaaagatgatggcgccaagaccttgtcacacgttgtaagcaatccacgtcactagatggtcagctccaggaaccatccacgtcactagatggtcagctccaggaaccttggcattgatggaataagccttgtgctcttagtagccttgttggtttttggtctttgtcgttctgttttgcttttagcatcttaggacagcatcctttcagttttacttttagcatcttaggacaacatcctttcggttttgctctttagcatcttaggacagcatcccttttatgctttatgttttcctttcacctttagactagcccgcagctagcaagctatggctataaatatgtatccaacctcccccggatagtatgacttggtactagagccactctatcctgtagtctagacatctcttgctcatccccttcacgagctcccctctgtcctcaaccggcagctggaacatcggctattcctgctcatccctcttcccctgcactgacgagcagcagctcgtcagaggcaaactcttcccccacactgcaggcccccaatagcatgccatgcccgcaggacagtcttagcgctcggtcgcctcgagcgcgcggctccggcaggaggccgagctcgccgcggccgaggaacgccagcaagcggcagcagagactgctgcgatggcagcgagggcgtcaaggctgcctgcggcggaattggtggcggcaagggtggaagtggaagcagcggcggatgcagcgcaagcggcggcggcagagctcaaggctctgcgcgacaatagctccagcagctctgtctccgcctacgacatccctgctgatgagctgacgagggaggcagctcgtgagcgggtggagcaacgggcagccgcgcaaccccacacgcgccgtagcagcagcccagccgggcgtggatgcgtcggcggcgttcctggcaggagcgcgcgcggcagcggtagcccagacgggcttggacgcattggcggaccccttggcaggggtgcgcatgacggcggtgctcccggcggcaacggcttggtcgacggagatcgcggccgttgcaggcggctcgtctctccctccccggaccggtaccgtggacaccacgggattcaggccgtcatcagggaagtcagccccggcggtggttggcctgccttcaccaagaccaactacatcgagtgagctgcggtcatgagggtgaggctccaggtgcggcacatgtgggaggcagttcggtacggcgacgtcgactacgacgaggatcgacgggcactgaaaggatgatgtcctaagatgctaaaagcaaaactgaaagaatgttgtcctaggatcgctaggatgctgtcctaagatgctaaaagcaaaactgaaaggatgttgtcctaagatgctaaaaacaaaacagaacaacaaaaggcttattccatcaggcattgggcttatatacttcttaaaatattaacacaccattagaacaattatacatgtgtggtgtggtgatgagatgcctgctcttgcctcctagcaagcttagttcgaacattgggtgggaatcttttttgttttcctttttttaagtggcatgcacaccttgaatggaccagcaaaagaagactagacaggaaaaaacacccatcatgaagatttgatcacatgatttccaggaacgtaagagttcatttaaccactttaagcactcgtcaacttattatagatgatagcccattaaattcttaatctcatatgagctcatcgccaacaaaatattttagatacaatttttgtgcatcaatattgtgccatgttgtgttacgcattcctggtaatgcatatgtgagctcatatgacagttgataatgagctatattctataataagttgattaatataccaattgtttaatgacatcactaaaaaaattgcactggccaaggatcgaactcaactaggtggcaagtttagacatcttaccactacaccattcatgtaccattatgtggatgggtgtgttaatatgttagaaacatatgagcccagaaccaaagttattggcgcggaccatctagtaatgtggattttgtgccacttgtgccatggtatcaatgctaggatctttggtgacaagatattgaggatgtttgaatcccaagcaaggaaaagcatagcctagcctagcaaggagagttgcttagtattagcaaaagaaaaaaaaagtattgcttagtaaggccaactaactaccgagaaaagctcacccaagacaaaaagccaaatcggttagcatccgatggcaatttgtcgggctaaacatccaagcattgtacttttgcttttttatgccatagctttcatgggctagcttgagcttgctaggccaagcaaaggtaattgcacaatctaaatagaccatgaatattggtgctaatgatcttggagccgagattcaggtccaattattttataagttttgtcaaggtctatttataaagtaagttttcaaatggaccagattataaaagatctagtccatggtctgcttcaaaatcgagctcaatgctctttagaaatcacaacaccacttaaacaaaagcatcaatgtttatgcctcaatcaaataaacatctatagcattagcagtatgctaacaattcctaggtaccaaatgaattgtcaatgacccgagaacacttaaaaaaaccatcttcaggtttagcaacttacaactaataaaattctatcacttgtaaacatcaatccaaaacaaatctattgaatgaggcaatttcaagcaaatattggaagcgctatcctaggtcacaaaagggaatggagacaatgaatgctttaaaatcttctaggcacaggactaacataaacaggcagatacgaaaagcgaaatgtttcatccgagaaagagtaacggggcctttacttgatgccaagatcaatgtgctcctggataccgaagccgaagcatccggtgtcactgaagttcctcctgagcagctcgtactccttgaccttgagcccgctctccagcagctgcatcgccttctcccctctcaccgtcacgtagcacgcgatcttctcgttacgcctgattccgaacgaccgcacggtgtacctcgctgcaaagaaagcgccccccgcaaactctcgtcatcaccacaacgaagctaagagtaaactagagtagagagacggcaatggcggagagcttaacctacccttggagaacaccggggtctgcccgctgagctgctccagcacctgcaagaaaccggagagagaggggggttgaaatggaggttggcgagaggagggttgggagaattttggggggaggggggttggtgaccttggaggcgcgggttaggcggtcgccgctctcgccgacggagatgttgaggacgagcttctgcaccttgatctcccgcatcgggttcgactgcttcttctccgacgcctgcaccacaactcaccacacgcacgcggaagaggggtgttaggttgaggagatgaacagcgatgagtcgggaaggagggagggaggaggcgaccatggcggagatggccgggagttcgtcggcggcgaggagggaggagggaaggtggcgtggcggcgctgggataaaagagagagcgcaaccctaggcggtggctgcgaccaagaggtttctggatgggcccaattgtggtaagtggccttttgaacgacagcgaaaagaatggcccaatgcttcgatgcaaccacaaaatgggccaaaagcccaaattctaccacgtacaaatgtgcccgcttgatgagttttggattatttttgggattttaaatgttctaatggtaagaacattttattcggtatttttgagtaaatttcaaaaaactacatatactttgacaaactattataaaactatagatttaaaaaggtgtatcacaaaactacagatttaggaccgaattcatcaaagaactacatatttaaggtggaagatcaccaaactataaatttagtaataaaattatcacaacagttcatgttttgcatcatgttaagtacaaaactacacatttatcactctaacatagcagtagtggtaggaatttaagctgtaaaatatgtagttttgtgatactctagtattaaatctatagttttgtgataaattttgtgttaaatatgtagttttataatacgacgccttaaatctgtacttttataatacttcgatcaaagtactgtagttttataaaatttactcgtaattttatttgtatgagcaatcataaaaagagatatgaccaacaaagaataatctcaaaatcaaaatcaaattatattattatagattttgattgcaatccaaatatttgagggacctaagagttgtatctcaaaatacaactcaactttttgaaatcttgctctacgaaaaaattacacgaaaatatccgctagttgtaattattgtagctcgagtacatttcaatcatattagcttaactagtcgcaagataaattttagattttctcgcattgccgccgctagttataacggcatttcattctagaaaccagactagaaaatcattacaatggagaaaaaccttagatgtggtgcatgacttcactcacaaggtctaaattctgatgttcataattatgcatgtgtggatacttaactgagattgtggatgtatcaacaggctttcatctctccagttgtatgttaaaaggatgtactcgtaggtatgtgcatgtgcagtgatgcatgtacgtgcatatatattccatataattgagatcacctcgatgctttcatgtgcatatgcatacttttggacaggggcagacccaggccacgggtcaatgcctaggatttggattgaaatctcactacgtagtacaaaattccatcatgtaagttcaatcttaacccaaagtgcaatgggctagcctaggccttgaccaaggctgggtcagcccctgcctttaaatcataatgtagagcctaaatattctttctcttacacggttcccacatagaaaaaaaaaacatgagcaagtaggagtgaatcgctgggcaaatctcctttggcagatagggatgggatcaaatggaagcatcagccatatccatatccaatccatccctctgccaatggagtagttgccctgcaatgcacatccacaggctcgatctcaaccattttcctcatcagaatgcctcagatagtagtagcaagtagtattacatattgtacatattgtgattgctcgagatcgtgttggtgtgatgatgagcgaaggggcgacggcggtggcagcatttatttgctgccggaaacggcatatccggcagcacaatgctttgctgcttctccagctgaattcgagagccctttcccctttcgtcgtattgatatttgacggccgatgcggcgatgccatattgccatggaagaaaaaaaagggaaaagaaaagagagggtgaaatgccaagaatccgagttagctttattccgattttggagatagatctcgcgtctttcctggacagcctacgtggaccctgtgttacgcgacgagaggccgctgctgcatgcgatgcccagcgtttgttctcttcttgtctgattttttctttgtaaaaatattttgcagtccagacagcacatagatagagagagaaaggtaggctgccatttgtgctgtgaacagttttgcagaatgcgatgccattgttctttcgcaccaaagaggaattgccacttgcgatctcaggatgcgatgctgcctatatatctgtcgaaacatgaattcggcaataataaaacggggtagcgcacgagacctaaaagtggatggatgtggagacaaaggatttagacaggttcaggccctctcaatgagaggtaataccctactcctgtttggggatttgaatccgccgagtatgtattgatctgacgatcaggttgtctcatcatgcccctagaggggctccctgccctccttatataggttggggggcagggttacaagatagaaaccttaaccaatacggtatcggtttcctaaatctactttacaatcttatcaaaccaggactttaggccgttccataatatacagggaaacgtaatacccaagtcatgatctgttacatattccatagatataagttatcccctatagccagtcggataactatgccatgtaggtatggggtacccataatctccacagtagcccctgagaccttcacagtcgaaaagataatcttctctcgaactagattactccaaagctgagtgcttcaatcatcttcgccatggtctccgaagtacttttaccaaatacgaagactgtggagggctgaaaaataaagtcaggtgtatcgactagatgcacctaataggtgtagcccccgactatgtggttaattgaacaaaccaagcatatagtcaaggaataaataatccaaccaaccgagtggttttaataattatagtcaaccaagcgacctgatattaatatgtagcatatgcggtgtgaatccctgaataacatgatccgagtgatataccgactgctttgtaaaatatgatgagtgtaacctaaagttggttacatcattgaaaattcacatagcaaaacagctataaagaagcttatatattgtgaataaagaaatttccaaagtattgggcatacgccatgcgcacactgctttaacagatgtgcttaagtccctaaaagacacatggtttcaccacacccggaaatatatgacatatgtggtataaaatccaagtaaataaactcataaaggatttaccaaccgcctgaaaaatgaccacaatatataatcagcctaagccataatattggtcaataaaaatgcacacttacgtggcgaaaagcaatgatattgtatctaatcaattgcttaaaaacccaaacaacaccttgacttatatataaaaaagtcagcgggccagctatataaagctttactgtttgacaccttttaagatgcattgtaccaactcctaaaaagttgagtaactgcggtataaaaggattttaaggtattgggcacttgatcacgcgcactttggcctaagcaaaaagtgcctaagtccctaaaagaacgtgacaggccacacctgaaaatatgggctgcagacatattaggcctaggccaaaaaatatgccttcgacaccctttaaaggatgacgcatgtaacatgctcccaagtaataaatcttccgggtaatatagaccaagtgtagctcatatgaatagcttctgatctgaatgattatcccttatgggatactccaaaataaatataataattgaatcccgactggcgcaagtattcggttgatagcccttacggggaataataattggtccagtctttgagcatagaaaatagactcatgactatgaatccatgtggaatgtatccggaacaagtccaaattggagatataatcctcacgcttgagttgatgagcccctgagcatatagcttgtccttctgtcatagtcaaaattgtctattggcaataactgacgcagtcggcatggagatgaaatgaccaacatgaagacgaaattgctcatcagaagtaacggaagatgtcagtggtagtaaagatgccaccaatcaaatgtaatgaagttgcataaccatggaggtgaagaaaccagtcggcaacagtcaggtcagctagcagtgaagatgtaggcgcccaacaacaacgaaagaacagtcggtggtgacaaaagcaaaccgacgatgaagacgtagacgcgcatcaacggtgatggcgaaatccaccaatcatgaagatgaagaaaataatcggcggcgacaaacgcatccgacggtaatgatgattggcggcaacagagatagccgactatgatgacgaagtttcccatcaacggcagcagagttggctatgttgatgaggcttgacaagatgttgatgaagatgacgatgtcggtgatccagtcaatagcgatgtagcagccgatgataacgatgagatcctctatcggcagttgcgtagtaggccaaccgtgaagacaaataattggaggagagttgatgttgttgcccaactcgtctaaaccgaaatatttgaagttgttgaagtagaatgtctgttccgaagcaaagatgaagataatgactcctggagttgactcattggctgattaattgatttcttcagcttgacataaaatttgtcaaattttgagccttatatttgtgtagcccccgactctttggttagttgagaaacaactgaacatagagtcgagaattatagcttcttgtcgtcgagtagtcattgcttgattgaagatatgtgttgaaggtgtccaagtagaaatcctgaatattggagagtcacttgttgtagtaaaatatcatggcattgcatgccgagatgtcgaggttcacaaagacgtcgtggttggtgaagtagtaaaacttgcgaagtagcagcaatagagtttgccggtgccgaagataataaagatgaagtcgctccaccatgatgacaaagttgtattgccgtaatgaagtgaacacaagtcggcggcaacagaagcaaaccggtagtgaagacgcgtagttgtgaagataaaagcaccaatcggcggcagcataatcagtcggcgacggaagatgaagatgtagaggtaagggcactagtcagcagcagacgagacgaccggcgatgaagatgtagatgcccaacaacagcggcataataggccaatcaacactggcagaatcatgcagccatggaagtgaagaaaccagtcggcagccatggcaaacgtaggcagcttgtgttgaagatactgatgcctattagtagtgacagcgatgtagccagccgtgaagaagatagcatcagttggcgttataacaggccagccgtgctagcggtgacatcagtcagtggcggatgcggcggccggccggtgaagacgtagacgcccaacaacggcagcataataggccagccgtgcaggcggaaacaccagtcggcggcggtcgaggtagccggtcggtgacgacgtagacgcccaacaacggcggcataaaggccagccgtgcaggcggaaacaccagtcggcagcggcaaaggcaagccagtcggtgaagacgtagacgcccaacaacggcggcataaaggccagccgtgcaggcggaaacaccagtcggcggtggcgaaggcaagccggtcggtgaagacgtagacgcccaacaacggcggcataataggccagccgtgcaggcggaagcaccagtcggcggcggacgaggcggccggtcggtgaagacgtagacgcccaacaacggcggcataaaggccagccgtgcaggcggaaacaccagtcggcggcggcgaaggcaagccggtcggtgatgttctgactgatccattcctggagcgtaagagataagcttaaagccatgaatcccttttatgcatatctggatctggatcttgcagaacaaacatataggatgagtagtatctgatataaatataatactcgagaaaaaatcaagtattttaaaatatttataaatatgtatttctcctcttgtcaattttgatttccccgagcagatgactctgtacgtttaaacactctgtccgactagtcatgaccatcaagcaccgggagtcggcctaggcacttcccaaacatgcatatgagtgacatgagttcgtcattaatggaacaaagtttcacggatcagaatttactactcgggtacttttgcaattattaagagcagaaaataaatttatctcatctctatgcttttgatttattccgaataatacttagcaccttgcgttactcggtccatccaacgagcccccgggtgctaggaatcggcccaaaggcaaccatccattggcaaaccaaacggaaagcataggaagatagaactccataactcgataggtacttttgtactcagattatgtcgcaagcaatcaagataaatattatgaaaaatatgatataacatctgtagcccccgactcactactcaatggaagaccaattggtgtagtgaggcagaggaaaaggaaaaatatcatataaagaataaaataaatgatgacttagctttgtaatattccccttggtgatggcagaagtggccaatgtgggaacaaagtcgtccatcaataacaatgaagacaccagtcggcggcgacgaaggcggtcgacggtgaaagcgaagatgcccactaatggcggcataataggtcagccgtgtaagcggaaacaccagtcgatggcaacgaaggtgagccaacggtgaggacgtagacatccaacaacggcggcataataggccagccgtgtaggcggaggcaccagtccgcggcgacggaggcaggccggcgatgaagtcgtagacgcccatgaacggtggtgtgaccaaccaaccgtataggcgaggacaccagtcggcggcgacggaggcaggccggcggtgaagtcgtagacgcccaacagcggcggcataataggccagccgtgtaggcggaggcaccaatcggcggcgacggaggcaggccggcggtgaagtcgtagacgcccaacagcggtggcataataggccagccgtgtaggcagaggcatcagtcggcggcgacggaggcaggccggcggtgaagtcgtagacgcccatgaacggtggtgtgaccaaccaaccgtataggcggggacaccagtcggcggcgacggaggcaggccggtggtgaagtcgttgttgctatcagcaatggcggtggcgaggacaagccggcggagtggactcgcggccgatcgaccggaaagctgagacgcctcgagtccatgaccagcatcaatcgcctcaatagtgccgcgtagttatatgcgaacaacaacaaaaaatagcaagaaattaatctgagattagaaatcaatctaatatatattgataacaaattgaaacgaaaaactcaagtcgagcagtgaggctggatcatgagtgatagccggcgacgtgccatgcaacatgtataagccccggcaactaacagctaactcgatgttctttcggcatgatgccatcatcggaggtagccggcggagcccatcaaccatcatacatgcaaacaggaatcgaatcctggcggcctgtgccactcctgcaacacgtccatctgcaaggaaaggaagagaggagcactcggacacggcaagggcacccaagtaggcgacgatgatggtcgtgtttcgatctcatccagtatatgaaattcgtcaaaatatcaggaaatcaaacaatgattaaaaattaatctaatagagattaaattggaacggtagacccgattgaagatttgagccatcgaaattgatgagattgatctcggggtttcttctgaagttgattccatcgcacttttcgacaggtaattcgacgcaccccctacctggcgcgccaactgtcgaaacatgaattcggcaataataaaacggggtagcgcacgagacctaaaagtggatggatgtggagacaaaggatttagacaggttcaggccctctcaatgagaggtaataccctactcctgtttggggatttgaatccgccgagtatgtattgatctgacgatcaggttgtctcatcatgcccctagaggggctccctgccctccttatataggttggggggcagggttacaagatagaaaccttaaccaatacggtatcggtttcctaaatctactttacaatcttatcaaaccaggactttaggccgttccataatatacagggaaacgtaatacccaagtcatgatctgttacatattccatagatataagttatcccctatagccagtcggataactatgccatgtaggtatggggtacccataatctccacaatatctttgttatatttaactagaaaggtagcccgcgcattcgcgcgggcatgtatcgtaagctgcatttgagatactcgtaagtaataggctgattgtgttaaaatgtcgtatttgttgtatagtaaactataggcatatggatcttatatcgttggtttgattataaacagagcaatagttagattagaaatcagacgtgaaacttataattatagattatttatattttagttaaataggaacgtaagaggaatgaaaagtttagagcttgagccagagaggggaaggagcggctgtgtagtgatgggcgcgtgtggaggggattttttttttaatttttctaagtgattaagtgaaagccaattattagatgtaattttcctaagatttgcaagatttttttaaaatatgtgacatgccacttattaagatatatttttctaaaagtagattagatagttgaaaataatgttaataggtcatcgatctaggtgaaaaccgttag

SEQ ID NO: 6433 - DNA, 5615 bp, Oryza sativa
caagtgttagtttacatacatacaagattgttattaataataatgaataaacaatttaacttacaagctcttgatgtggtatgccacttggatgtcgacgctcaatttgctcgtagcagccctgaaacttgcttacttccttctgaatgttatcccaaagtgctcaagagagtttgcattcctatcagacttaaaatcacagttagcatggtagtgctctgcaatcctttgccaatatgccttccctggttgctcattgccaataataggatccgagctaatgctttgccatgaaatgcacagttgaatgtcctccttacgattaaagttgcttgatcttttggctcttccttttgcaccatttgttgaagtatgaaggtcttcattttgcattggcaaggaatatgcctcaacatgggtctcttcggacatcatgcacacaaaggaatcacattcatttgccatcacaatctagtcactgcaataagtagataaattgacaacttctccaatcaatctcaggaaaaatggcagatactagctaatatatgttggtagaatgcataatggtagcaaatttttccaatcattagaatttagaacaggttatgctagagctctacaaaattgaattaaaaagaaaaccatatagcaccccaaagcagcttattttttctcttttttaacagtctactcgaagaacctgcatataactaacatcggtataaataaaattgtgtagctcaggaaattaagcagcactacacccataccctctagaatatgatcacaagatttcagctggcacagtgtctcaaagtcatgcatattgaaaatcacactgaaaaccatatagcactatccaaaacttacaattcccaaaaccatattagctcgatccaatttatctttccccctgctaatttcagttacagtttttttttgtgttgaccttattactaatgcaattgtttaactacttgaaatcaatcatcattacatgagctcacctgaccatattatacatggattcagattttcatttgtcaatgaaggagttactatccaaactatgtttcctatacgcgtatgcatggctacttttcatatttctgaaactacaagattaggaacctactttcaataaattagattattcaggaaaaaatcaatcagatcattccaaagaaagtataattacatatggattatgagattaattattgtattaattaacagtcaaacatttgaggaaaacaaaatcacataataaaacaacaaaaccatctcatcgtggaaggttagttcctacccatttcttctccaaatatacattttcgtactgacaacttttctctctaacacgctaggtgctaccatataactcaatccacaaatccactggaaaaatgaaaacatgataccttcaactagcgccagggagaagggcgtcaggatccaggaggatattgccgggtgggcaggtggccggccaggaaggagggcaccagggaggacgcctgcaggggaggagggtgccgccgtgccggccaggaggaggatgttgggaaggaggaggcctaccgaggaggagtgtgacgggcagggaggagggcgccacccgggatgagggcgtcggcaggggaggagggcgctggccaggaggagcggtgtagatccgtggaggcgccgctagcaggatatttcacgcgaaaaaagaagtgcccgcgcgtctctgccgcggatgggggctgcggagaaagcccctgggactgggggcctgaggggataatttggaggccttcctattttaggggctttagtaggggtcttgttggacctgattttttagtctcaactctcaaaattagtataggggctgtgtttagaacctctactggagatgctctaataagcaaaaaggcttattagaaaataaaaatgaatttgcaggtgaaacttttataaatgtgttttttgacttaaaagccaatgttgaaaaagaaactacgttgaaaatatctcaaaattaagcttgaaaatttaaaatttagctttttctttggctgattaggccatccgatgggaacctaggtaggttccaaacgagcaccagctaatttaacagggcagcgaggcgagtcgatcagtcagtccacatcgatccatcgatggatcgtccctcgtccgtgttcgcatcaacgtacgtgtaccacttacacccgaatcgatctcgatccgcatgtgtgttgttctgttcagccagcgcaccctgcggccggccttggcgttttatctacagtagggttttatgtcttggaaacgtctatttctaagggtggtgggtgataggtacaaatggtagatcatttcggctagaaattttaaaaatggggtgaatagtaaattcggtccttgaacttttattcaggggttgaatcagtgttcgttgttatatgttatccaaatttcaaataagcccctaaacattgtcgtgcggctttgacccactgaaaatgccatgaggtcttgcagccaaagtcaacatttaaatatccattttatccttacatttttataaaaaaaggaaatagaaaaaaggaagaaagatatcataaaacaaaggaaaatgttaattctttagttactaatagttttttttttgctaatggttaattgccatactattttttgttattttctcaaccgttctttttgatttactatgaaaatgtaagagtagaatgtacatttaaatgttgactttgtatgcatagatgatatggcatgttcatgcggtttttttaagtaggtctaaggactatattaataccacaactaatcttggggatttctttggcaatatgaaccttcaagaactaaatttatcatgaagcgaaagttcaacgatcttattggttattcacccaaaaaaacattcttacgatcagaatagtgaatcaaaaagaaaatccaaatggtgtagcacgggccaatttgaattagtgcacaacaaaaattttggtagtatcaaagcttgagtaagttttgactctatacatatgtttaaggaaaaagtccaaaataacacccctccccgtgatcttttgaggtagttcgatttacatccctcaattttagtatagatattttctactaccaaactcttcaaactagacaaattaccctctctaacctacactaaggtggtattagtcctacatggcgtacatgtggcggtagtttggccacatattaatctagctagcatttgagaaaataaattttaaaaataatttcagccccacttatcatcctctatacatcttatctcttaccctctcatctttctctctcccatgccattgccacatgtcgttgccttacatgtcacatgttcgccttgtgttacttgtggaagagaatggaggggcctacattagctctcccctccaccaccatcaacgagcttactggcagccattctctgtgaatgatgagggaggctgtcacgccccgaactagtaccgaccggaactagcccgtgacgctctaaattaacctgtaaatcgataccagtcccaggaaacagtgctggtatcacaggaagacagattattacagcaacagaggtctctttattatagagtagaggtacagtcatgttgggctgcggacagatcccgagctcacaactgcattacaaaagggaagcggaagccaggacttggaccaaacaacacaggcgcgacttgggaactaggccgaaaccctaaaactcatcgtagccagcttgctcctggaagaactcctcatcagcaggatccgcttcatcttcttcagcaactggggggggaattatttatatagagcaagggtgagtacgggagtactcagcaagccaggggaaataagtgtttaatgcatgcttcaaggaaaggctgttgtttttgcaattgattttatttaaactctttttgaaaacaactaagtgagtgcttctcaaacgacacggataagacagtgcgtcttgtccggtcggagtatgtgcaatgtatcagtctttagaattgttcaagattggcacccggccaacaactttcaaacggccacccgggcctagctgatcccatcagccgcagattttccaaacatcgaacccctttccacaacagcaatttcacaagcagtagtcaaacaaaactacgctaggaatcacctcacatccgcccatgaccgtgggcacgactgttcgaacagtttgttaacctctgcagagggggtacactttacccacacgacattactaacctggatcacccagcccgtggggattagccacgtcgggagacctccaagctttcatgacaaggcatttccaaagccgacacaggtttaccatatgccgacgagaggggtcccagaccgacaacaggttaggtcccagaccatactgtgccaggaagcccaggggtcctccccgacaccaccccggcgaatccacatgtctctcgtcatcaaggctcccctgatacactagttactcagctaggggtgtcccattccacccatgtggtcgtacttgtcttatgttggatgaaattccaaggaaacgttccttaagtgcaagagcgggaaaccgtacacccggtacgttccccggtccgcggttttggaaattcatttagttcgcaagcaccgacccaggtgtcgggttttccaagtcttttgtaaaacccaagttttacccaagaagttactcagattttatgtttgaaggcggccgtcgatactcgtgcagagtgcacggtttccgaggcgcaactgggtggtcacaagggaacatgggataacaattaacaaaggaaggatcaaatgcaacaaactaggtaggtccgctaatctgccttgcagacgggacaaacagattaagtgcgatcctatcaatgcataatatttttcaagcaacacaattaaattcaaatataggctcaagatgttcaaaggtggcttgccttgctcgagatctggaggttgatcctcgaaatcctcgcactgcgggtcttcgggctccgaaactacacgcgaaacgggacaactcaacaaacggcgaaaataaaaccctattaatgacctctaagcgtgccattagatagatctcgagatttgaggaattttggaagttgaacggagtcaaacggatttacggttgggaagatattgaatttctaagattattggatttttggtctaaaggaaaacgatttaattaaatcctttttgaaaaagaaaagaaagagagaggagaagtagacttccctcgggcggctagggcgcggcccgagagaagaagcgcggctcggccgagctaatgggccggccggcccaagaggattcggcccagtagggcgcgcgggaggggaggagagagggagccggtggaccgggctcatctcgcgtggtcccgggtgggacccgcttgtcagcgctcggctcaccgtgaggagggagcacgtggcgcggcgctagggtgaggtgtggggcgcggtgcacgcgcgcggttcgcggaggacgcggatgcggcgggcccacgtgtagcctcacgggctgcagga

SEQ ID NO: 6434 - DNA, 8026 bp, Oryza sativa
tgtcactgaattcatattcagaaatggtacattttcatgatttctttacctgattggtgatgtgatcccatgacaatggtgaacctaggccttcgagattttcccggagtgccttccgcattccaatgattcgatcagccataccctgagacaacccagtggcgatattaaactcctttccatgcttcacatagattaatctattaggaacttacgtagttaagacttcttaccttgacctctttcaaccataaactctttaattctggatcattaaggattatggagacaaccagtgcaccatgaacaggtgggttgctgtacattggccttgcaatctgttgcaattggctcttaacagaaactgcttgcatctcatcctcacacagaatactgaaacagcaatacaaaatcagttttatgatcattagagtatgatcattgtttaaagaaaagataacaaattggatcactcaattctatttgatgttatatactcttccccttaatggaacaggagggcttcctgaagggaaaatatttcagtctcgctagatatgagttccacttgcaaattccttttttttttgagaaatcaaataactaatgctctaagacacgtttcattttcaaggaccatgcatggaattagtcatgcaatacagagagtagctttgctatgctctccctgaagaaaacagtacaaatcctgaatcaacagtagttaacatgatgtaaattttgtgcctcttaattatatccagagcataggagcactgcattgcacaactatataactttcaagcataaatgacactaggcgagtgaatacctcaagcaccctgccctttgcccatacagtcccatgttctttgcatatgactgagcacatccaatttgatgcccatcttcaaggaagattcggattgccttagcatctctctctggatcaccgctggcaaatccttggtatgccatgtcaaagaatgggaaatgattctttatctgtcaaaacacataaggaaaatgtgatatctgtcgttggtgataacaccaacaaaaagccagtccttttcacttctgctaccttgaattggtaggatatctctctccattgttcttctgtaggatcaactccagtaggattatgggcacaagcatgaagcaaaaagaatgaaccatttggagcgttctgcagatgagaggaacaaaaataaattaaaaggagctataggaaacccatcaacaggtcagaagcacctataagaaagtgagaaaaactaagtgtacctaaaacttatcatttatcaatgagaaagaaagctaaatcagtattgactctacaaatatctaatttcaaacaatatccatgatcttgctacagataccagcaacaatgtaataattcctaaaagtaagatatctttctaacaatactggagaaacgaatcaccttaatatcatccatcagtcctgcgaaatcaagccctcttgactctggatggtaataggtgaatgtcctttgaggtacttgagcatccctccaaatgttatgatgactggagaagttacacacactgaggttagaatgttagatactgatgatgttaacaatattggagagcaagaatcacaggtgcctaccatatcatgtagagacagtaatacacaccatctacatctatgttttctcttcctatttctttctttaagagatttttcttagatgtaaagaaaacaacaacaattcatgtctcagcaggattccaactcacttggaccatgtaggtgtaggtatgtagatctgtgaatttggcaagaaacgcctctggaaatcggcaaagagccggcatgcacctgtgcctgaaagagcctgcaccgcagcaatcctcttatctttgatgaaatcagaatcctcaccatatgccagctttagtgactcttcaatcatctttatacttcctcccattggaaggtactccctgttttacaaaattagtggaaattagaacttaaggcaacctccaacggtccagcactaaaacaggtgtagcatcaactgcaagacagtattatgctttagttgatcatttttttcaggacaaaaaaaaaaaaggattggagtgtctaatctgtactgcaatgatgtttacttccacaccacaaaagagcataaagaagcatctggaaaccattttaccacagaatgcctacaggaggtctaaaccgcggcaggatgggacaacaataattttttttttcgcatcaagcgtacatacattgcgtgattgaagaaggaaaaggaagctttacacatgatccagatcatgtttgaaaacaaaatactagtgatagatcacgcttcagaacgaaccagcggtatcagcatgcttttatttcagaatggaactaaaaatgaatcaagaaccaaagattattgaagctcatatctacaaaacacagcaggtatagctcagatccgcacatgcacaagtaatcaagcattgaagctaactggaagagacagggagggatctcgttctgacatgttgaggttgccggcgatccggcgctcggcctcgcgcacgcactcgagcacgacgggcttgccgttgtcgtcccggtaggcgccctgcagtttcagcatccccgcccaacatctccgtcagaatcaagcgagatcggggatcccaatgagagagagagagagagagagagagagagagagagagagagagagagagagagagagagagacgtacgacgccgacgttgactttgtcgggggaggggtcggcgaggaaggcctcggtgacgccgaggatggggtccttggaagccggctcgacgtggccgaacagcgacgccatcgccctcgtcgcgtgcctcctcgccctcgccagcgccccgacccgccgcccccggatcgcggccgccgagcgggacgacgacatcgccatggctggcggatgggcggcgcggcagcgaggaggaggaggtggagactggagagcaaagcagtgagggggagaaaagctgtgggtgtgtgggttttggtttggtggttttcgcgaggaaggaggccaaaagaaaaggtgtctcgctttgatgattccttgcgtcgtcctccgaagctttttgatgggtgcgtgcgtgatgagtgacgctgacacggatggacggatggctgcgaataccagtcggcgcggacgcaactcttttttttctttctttttcttttaccgttttactgctagttccacagtgtgggagcacctcgcgaggaattaaatttaaaatataccattcactttttttttatttctcagaaatatacttgatgtaattttatttgcataaaattagcattggtctcgcacgctcaatgagcgagaccgtcacacttgccgctaatcaacaattaattagtgattaaataataagataattaatcgctaatcatcattaattgatcgctaatcttttaattttggcaaaatttgctacatgacactcaaagaaagcggtcttggttaggggtcatctcgaaaacgtgaatttgtcctatgacactgaaaaaacatagtaatttaccacgggacaccacgagcattaaaatacaatattcaattagttgaggagagagaaatcacataaaatgtctattctaccctcgtcttcttcttccttttccgtttcttcctcctacacaggttgtgcgaagcagccgtgagcaacgatgaggggcaaccgcgacgggcggtgacgaggggcagcgtcacgaccgtcgacgaggactgcagatccacgacgagccgcgaccgagacggatggttggatctcgcggcagaggacaacggctgagaaccgacgaggtttgatggcttaccgctgctctttgtttgctgcgagcttgaagttagcttgctgctgctgctgttgcgagcctttgaacaaacggatggggttgccgccggcgaggatgttggcttcgcagctgctgttgcttcataaacagagacaaaaatgctactcctgttgctgttacttcacaggctggcgacggctcgtggcattggacatcgaggatgggtcgcggacgaatgattgaaggacgaggcgccgagcggcggtggcaaggacgccgtcgcgatgggcagacggacgactttccacttgctgctgctctttgttgtgaatgaatggatggagttgtcgcccgcggggagaacacaccgtgacgaactgctgtggaagatggcgggggtggacaaagcgacgggcagcgaggccggttttggtgctgagtcgaccggatttgatccccgtcgacgaagattggtctcaggggcaaaagtgtcattttgtgaaaattctctctctgtaatagcgaaaaattataaaataatacgtataagtatctatcaacaaattaccatgttttttaagtgtcctcaagcaaatacacgttcttatggtgttcctcagcaaagaccatatttttcgagtgtccaagagcaaattttgcctttaattttcgaaacactttcgtagacttgttgcacgagaatgctcgcggtttgacacgctcgtcgctcgacaccgcgcggtctcacgctgcccctctacaagactgtctgcatcttcatcccacgtcaattttgcacaacggttcagcaagaccaacggtatatttgtgtccaaagatttgcatctaggatatttttaagaaaaaaaagatatgaacggtatattttcaaatttaatttcctcatgagtaccatcacggtgtaaaattttaaacgggaaggctaaaggacagaccctaactcctcgcttgtgtgtaggcacccacattgacgttgcctcactcttgatgcggcagactagcacgtcatatagatggccataaggcccgaagctaggctagacggcccggcccatagcatggctatttggcccggtctaagcatggcatgccatgactggtgtcgagcccatgccggcctagcccgatagttgggccgtgtctgggttgatgccttggcatggtggactggcccggcatgacacgaaccaatgagcacgaaagaaaaatatggtcgagggattcaaaacagacttaattcagggcatgataaaagagaatagggatgcagaatagacttattctagaaatataagatggcccaaagagatgagcgagggaacagacttgtggaaaaagtatacttcgactccctcaactatggtccaagtatgacttaaaacctccaaacaaaaaaccgggtatatcgactcctccaactatcaaaaccaatgcaaaatatatttcttagtggtattggaagcggttttggctgacgtggcgcctacgtgggagtgttgacccggtcttcatcccacgtgtcattaacatgtcgcttatgtcgcattttagtgtaaaaacaaacaaacaaaaatacatgggatagagatttttataataccggcaaacaaacaaacaaccaaacaaagtaccagcaaaaacatctttaatttttataatagtggagatagagattgttcggtttttggcattaacttgtgattaatcatttcgctatgattttgttcaaattaatccatccaaaacttttctaatactttaattctacatactatttggcgcatggtgattttgcctacatgaggtattttggtgattgataatttttatgctataagagaaaattcgtctcaaggtagcgattgttaaatatgtgatccgaatttaggtctacactatattcagattaattttcgagtaggacttgatgccttttcctgttagttattttttcttttatcttctataaatactcttgtaaaccgtataggaaggttacgttcactgctattccccgacgtttgtaattaaactcaacgatagtgatcatttgccggtcgattgccggtggaattgattcagggtccgttcttttcagattttcggatgacgactctagctgcagccgtggcagctagactaccgttcagagtattgagcctaggatcgattgatcaccttgcacccactggcactagtactgcaagccacggcctctgcttgcccggaaacattggcctaatcgcttgtgtttttcatcgcggtactagcttgcccggaaaccttgccttaatggcttgtgtaccgtacgctaattgcaggctcggcagatgtgtgcatttgtccacctcaaaaaaaaattcacctcaaaaagatgtgtgcgtgtgtaccatacgcatgatatgtacgctgttttcttatgttccgtggaagaaaaagttgggtacctcgtacggtgccaccgccacagagcaagtactcccttagttttattcacataaaaagtctttttaaatttttttctaattaaagttttttaagttagactaaatctctacaattataaaaattgaagatgtttccgctagtcatatgtggctgcgtttacttcacgccaaaattaaaagtttggttaaaattggaacgatgtgataggaaaagttggaagtttgtctgtgtaggaaacctttgatgtaatggaaaatttggaagttggaagaaaaattttgtaactaaacatagcctgtgtttgaatcggttttagttttatgtttcggttttaattttatgtttttgtcaagtaaacatctaagtagttcccaaacataattttttacactgtcacaatcgaatatttggacacatgcatagaatattatatgtagaaaaaaaccaattacacagttcgctaggaaattgcgagacgaatcttttaagcctaattgcgccacgatttaacaatgtggtgctaatgacggattaattaggcttaataaattcgtctcgcagtttcctggcggaatctataatttattttgttactatactacgtttaatacttcaaatatatgtctaatatatctaatataacaatcaaatctaaaaattttcctcaactaaaccaggcttaagtataaccacgtatctctagttgcctacggtgcgccgtctcttcattgggccaacataattttttcatttcagcccttgttatatataatttgttttactggttagatcttttacggaaagaaccactgcgtttttaagtgactacgtatgaatagacttccctctattctatgctagggaattctatgctatagcagtagatagttggttttaatattatatttcttactattaaatttgagttttaacattcgggttgactaaatgtatttaagaaaaatatagatcacacatattataggcagcgaggtctagaatatatctactctatttttattgattgataggtaagtacgtataacaaattgcgttagatgtgaaccaattaaaacaaggaataaaacacatctattagcagtaacctttatttagatttgttaaaaataagagcccaaaacattcaattaaaaagaaaaacaataccttactttttaatttagacttaaaatttaaacctaaagatttacgtcttcttaaatgattttttttacgtgaaacagcaggagcaggagaggctcctactgcgctatattaataataaataaaaggtttacaatatttacaaaaatacaaaacaattaagagagagagaatcaatccatgattgcaggatgggtttgtctgcttttttactctgtgcatatgcagagcaaaatccttcttgaactctgatttccacttgactaaactgatagtcacattgttgaaaataaaatcattccttctacaccagatgtgccaacaaccaatcgcctgagcttcaaagaagaagttgagatgaaaagatacttagctgttgtaatcatgttcatgagctccagcgctagatttcactgaatgcctatttgctgccagcattgttgtgcaaatgtgcaggagaagaatagatgggtcatgctctctacaatcattgcttaaatatttgatatatcttactattaaatt

SEQ ID NO: 6435 - DNA, 1483 bp, Oryza sativa
tcctgcagcccttacatgacccgtaatggcagaataaggtacaataacaggacttttagtttttcatgttgctgaatctttgttttaatcgaataaaaatctaactttctgtcatttctttcagcatggctggtgtaacaacaggaaatgtggcgtatttggctaatgctattcatgaggtcactaaaacaaatgaagctacttcctcttccctcttcggccaatgaaatgaggcttgcaagcggcggcgttttttttttggggggtggtctattgacctttaagatggttgtactagagaaataatccagtgaacatgctggtgtttctccaacttcggattttccctgtatggaggagagaactagaaacctacccaattttgagagctatagatgccgatcctgttatttcaatcgtcagatgttatgcctgtggcagcctggcaggtcacctcagaaacagagatatgtgaaagagaataaatgcaaatgagctgagcattttgacaagtcatgtgtggccctgccgaccgaccatgagaatttagataaaatttgctgctttttttgtatgtgatatcaagacgaggcaggcgtattctgctgaatattttttggtaaacgtagcatgagagtttagcatgtagactcgcaggaataagccgtctcagcgaagaacatttcatattgattcgtgcttttgggctctttcatactgattcttgtaactgagaaaaacatgcaagatgcaatgtaattttctcgagaacatattgtaggatgggtagcatactgatttgcactgtacagtgcatacgccaacacgaccagaaatgaccgatctacctagcagttagagattggatcgtgaggcatttgcaacaccagcaaactccttgcagattccaagtaaaactacatccagactatacacgtttttgtacaattgtcatccttttgtttgtggttctcccccctgatgtacaattgtgatcatctgggaccagatagctcaattggctctattatgaaggatgatgaatcatgaggatcctcatgccttactgagaaactgcaagatcctccatagggaggcacttctctattcaagtcgatgccgttctctggcagggtgacattagcttcaagggcattaaggacttccgacatcttgggacgcaaaatgggattggtctgagtgcattgcagaattacgtcaacagaacactccaactcggcgaaatcaaatgaatatttcagatccctgtcaaccagtttatccagtttattttcttccttgacttctctaacctgcagagaattaagattaggtggtaagaaagtatacaaggatatgggcatcaaatgacagtagttaggtaattagataaagattgaactaaaagaggatacccaatctaaaatcattcccttctgagattgcgcgtgcccattgctcaaggttttaggcccagtgatca

SEQ ID NO: 6436 - DNA, 3314 bp, Oryza sativa
aattcctgcagcccgatcttacacgtgacatgtgtgaaaatttctttttctagcatttttttccttcatgcacaaatctcgaaacgattaaatggtcacaaatctaaaagttttggaagaaaaaaaaacttgcgaaagttttctagcaaatcagccaaaagtagcacacatgcatatcctgatatatatactctttacaggatctacagatctttctgtcttatgtcgtctccctgctagtccctactaccgatcattcacaaccttccaaatatgttgcatgtgccgatgctctgctcccagctggtttaattcgatcgccatgggaagttttgagggaggatcggtcgtctaccatgcaaaggaggcatgagttactcgtttgttggtccatgcatatacaattatccattgctgctagccaacaagacgaagctatacgcccgtgatgaagggatggaccttaggattgaatggagggaggcttatcttctcttctttttcctccatcctcctctactcttcttttcccttcccttctccttctcaccatggagatggagatccaatgaggttgggggcagggcttgagccaatcatgttggatctgccccctacccagtagtatataggatcaatcgagctacaaagctaagggtttaattagttggcaaaaaaatttacctctgcatatcacatcggatatacggatatacggacatacatttaaagaattaaatgtagtttaataacaaaacaaattacattcctccaagaaaccgcgagacaaatttattaaacttaattaatccgtcattagcaatcattagcaaatgtttagtgtagcaccacattgtcaaatcatgacgcaattaggtttaaaagattcgtctcgcaattttccggcaaacggtgtaattagttttttttatatatttaatactctatatatgtatccaaacattcgatgcgacagcgtgaaaaattttgtttgtgaaataaacaggccctaaataggattgtagtgatggaccgatcgtatcaatcttcggcaaactccatccttataagtgcttatctccgctactttaaaaacaaactcgtactcctaattcctcatttctcacagcagtagttcataaccaccttcaaataccacccacccaaaattttgatacgaaaatcaaatcgaaaagccagataaaaaaactaaaacaccaaaattttgatccggataaaaactcctaaaccatataaatctcaatcccacttcaatagacaggggggcttgagccttatacatgtttccagaatctagtttaaattttgttaaatcatcgtttagattcaatactatcaattgagctctatcttaactaacgctagcctttaataattttctgactccgacactgctaggtcgtgaaagaagaagctagtgagattagtacgtgtgtgtctccctacccatcgccggccatcacagtaagggtccccatcgtttgtcttattttctaagagcatctccagcaatatgctttattttaaagcccctaaaagtcaaatgagggctgcccccatcttctaaggatccaaaaaaatacctccaactctagcaatagcccctatttcttagcccctactcatgtttctctttattttaacatgcaatccttctttacactatgtttaacaccacaataattaaacataaatatttctaacgcgtataattgaaccatagttaaatttacaatttcaaacgccacaattcaaatccaaaatcaaaattttcaaacatgtaaatatggtgtgggcagaatgccatatacaacaacatgcaaccaaaatttatagttcaccaatgaaaacgaaaattgctcaccaacatgtcattgtctgtctccatatcaccacaataggctatgtgaacctagtgatgcattattttttttgcggagatgcactatataatttaaaaataacacaccctactagaatgaatggttcgatcataaaaataacaaatctaaaagtagtacatatcctactagcaaatgacacttagataattgcagaaattaacacaaaaggactccaagaaccaatcgtggaaatgatatatcctactagcaaaggacacgtggatcatccaaaacgatccaacttattccatcgaagtgctcaaacttctccattaccgtcaccaaactcacctccaaagccactactaccatcaaatccaccattgagggcagccacctttgaagctgcaatttgtgtcctcatagccaacacatatgttctcacatctggttccaatgtggaaacatcacaaaacatgatcttctgttcttgatcccacactaaattatgctcagcaaataagagcttgcgctcttgaatctccttagtttccttccatctctcttctttcactttagcttctttctctttggcgtcaagcaaatctttcatcgcctccttttatggtccatcttctccattcttcatcttctcctttgcttgcttcctacccattggtctttttttagcacttggctgtaataaatcaggagttgtactcttcctagcatcatctccttcttcatcttcttcactagcactctcaattggggtggaagacttcctagaccttggcctcttgtgggattctagagtttgaaactttggagaattcctcaacttgagccaacaatgattaaactgaaatgccctattcttcgatgcattggatgagtacaatgcctcagcttcaagaacctgaagcaaaattcaagtgttagtttacatacatacaagattgttattaataataatgaataaacaatttaacttacaagctcttgatgtggtatgccacttggatgtcgacgctcaatttgctcgtagcagccctgaaacttgcttacttccttctgaatgttatcccaaagtgctcaagagagtttgcattcctatcagacttaaaatcacagttagcatggtagtgctctgcaatcctttgccaatatgccttccctggttgctcattgccaataataggatccgagctaatgctttgccatgaaatgcacagttgaatgtcctccttacgattaaagttgcttgatcttttggctcttccttttgcaccatttgttgaagtatgaaggtcttcattttgcattggcaaggaatatgcctcaacatgggtctcttcggacatcatgcacacaaaggaatcacattcatttgccatcacaatctagtcactgcaataagtagataaattgacaacttctccaatcaat

SEQ ID NO: 6437 - DNA, 6092 bp, Oryza sativa
  unsure (1)..(6092): unsure at all n locations
attttaagcaatttgtcccagaaatttaagatacacacatcaactcactagcactcatgatcatcaatacaatatatatttatcttctcagtacaacatatattatttagagataattgcacaaccgtttattttaataaaaagaacacgatgacaaatcaaagttagtttgttgctaacgaacagcaacacatctatctatctatctatctatctatcttctattatatactaaaagtccattaaactttctacaaacgctctcaatccgccacgtgtcactcctacaaacactcctagaccgccacatggcactatataatctcaccgtcgattttcacttaaattggtggacccgatattttagaccattggattagatctattatttaagaaagtaatcccttcctctgctgtgggccaaaaaaaaggaaaaaaaacgtacgtacgtacgtgtggcttaaacttcctacatacgctttcaatctgccacgtgtcactcctacaaacactcctaaaccgccacataccactgtataatctcaccgtcgatttttagttaaattggtggacccaataaagtaatcccttcctctgctgtgggccagaaaaagaaaaaaaaacatacgtacgtacgtgtggcttcgtataaccgtgggccggaaaaagaaaaaacataagaacttagtacgctctccctgtctcttcctcttcctattcttttatatctccatctctttctcttcctaattcttttatgttatcaaattaaaaacgagttaagttgaccatttaaaataatttaaatgtacatagctaatttatattctattaaaacgttgctctatttataattaaattgacaattttacatccaatgttttgctatatataagcaatatgttattgtggtatagactgtgcattttgcaagtttgcatgccatctaaataaattaaatacttattaacaacatatattatatatctatctatctatctattattatatactaaaagtccattaaacttcctataaaccctcttaagttgccacgtgagactcctataaacactcataagccatcacgtggcactctaataaattagaaaaaaatatataacttgaactggtgggccaattggatttatctcataaaaaaaattcttcctcaactactacagtacgttctcatctccttcccctcaatcccttctcctcatctctttccttttttctgtatggtagttaagatttttgttttattacttaataattaatttcttcacttctatctaacgagaatggatgtggactcttgattgcatgtcccatgcctaaatatataaatgattaatgatttgatgcatgcttttataaataacaaatctatttttaactaacaatttagaaaaaagataatagttacatagcaaaataatcataattttaaaaagttactccctctatatcatattataagccattttaacttttttcttaattaaatttctttagatttgaccaaatatataaaaaaaattaacaacatctatcacacaaaattgttttgttagatataacgttccatatatatccataatatgttttttttgaaaattttactatattttctataaacttggtcaaacttaaaaattgacttaaaaaagtcaaaatgacttataatataaaacggatgtagtatatctgtttttatttagtttgtttgaacggttgtttcataactagacagctaaataatttaaaatcaatattaccaatatttcactataaaaaataaaatatgttatttgaactgccacctattctttacctgacaacccaaataacatcctatttttaatttatttgaactgtttatttatgttactcatattttactatgtaaaatttaaaatacgtaatttgaacatacaccaacaagcaaacaacactgaaacattgaaaatttgacaatatgtattatgtcatcttaatcattctacataataaaaaatagaaaaatacaaagtcaccatgtatgaccttttagatacatgctaaattaccaagtgtcacattttaaaaattagtaaaatcttatatattaaaagaaaaaaaataaaacatctagctaacggttttcacctagatcgatgacctattaacattattttcaactatctaatctacttttagaaaaatatatcttaataagtggcatgtcacatattttaaaaaaatcttgcaaatcttaggaaaattacatctaataattggctttcacttaatcacttagaaaaattaaaaaaaaaatcccctccacacgcgcccatcactacacagccgctccttcccctctctggctcaagctctaaacttttcattcctcttacgttcctatttaactaaaatataaataatctataattataagtttcacgtctgatttctaatctaactattgctctgtttataatcaaaccaacgatataagatccatatgcctatagtttactatacaacaaatacgacattttaacacaatcagcctattacttacgagtatctcaaatgcagcttacgatacatgcccgcgcgaatgcgcgggctacctttctagttaaatataacaaagatattgtggagattatgggtaccccatacctacatggcatagttatccgactggctataggggataacttatatctatggaatatgtaacagatcatgacttgggtattacgtttccctgtatattatggaacggcctanagtcctggtttgataagattgtaaagtagatttaggaaaccgataccggattggttaaggtttctatcttgtaaccctgccccccaacctatataaggagggcagggagcccctctagggcatgatgagacaacctgatcgtcagatcaatacatactcggcggattcaaatccccaaacaggagtagggtattacctctcattgagagggcctgaacctgtctaaatcctttgtctccacatccatccacttttaggtctcgtgcgctaccccgttttattattgccgaattcatgtttcgacagttggcgcgccaggtagggggtgcgtcgaattacctgtcgaaaagtgcgatggaatcaacttcagaagaaaccccgagatcaatctcatcaatttcgatggctcaaatcttcaatcgggtctaccgttccaatttaatctctattagattaatttttaatcattgtttgatttcctgatattttgacgaatttcatatactggatgagatcgaaacacgaccatcatcgtcgcctacttgggtgcccttgccgtgtccgagtgctcctctcttcctttccttgcagatggacgtgttgcaggagtggcacaggccgccaggattcgattcctgtttgcatgtatgatggttgatgggctccgccggctacctccgatgatggcatcatgccgaaagaacatcgagttagctgttagttgccggggcttatacatgttgcatggcacgtcgccggctatcactcatgatccagcctcactgctcgacttgagtttttcgtttcaatttgttatcaatatatattagattgatttctaatctcagattaatttcttgctattttttgttgttgttcgcatataactacgcggcactattgaggcgattgatgctggtcatggactcgaggcgtctcagctttccggtcgatcggccgcgagtccactccgccggcttgtcctcgccaccgccattgctgatagcaacaacgacttcaccaccggcctgcctccgtcgccgccgactggtgtccccgcctatacggttggttggtcacaccaccgttcatgggcgtctacgacttcaccgccggcctgcctccgtcgccgccgactggtgcttctgcctacacggctggcctattatgccactgctgttgggcgtctacgacttcaccgccggcctgcctccgtcgccgccgactggtgtttctgcctacacagctggcccattatgccaccgctgttgggcgtctacgacttcaccgccggcctgcctccgtcgccgccgactggtgtcctcgcctatacggttggttggtcacaccaccgttcatgggcgtctacgacttcaccgccggcctgcctccatcgccgccgactgatgcctccgcctacacggctggcctattatgccaccgctgttgggcgtctacgacttcaccgccggcctgcctccgtcgccgccgattggtgcctccgcctacacggctggcctattatgccgccgctgttgggcgtctacgacttcaccgccggcctgcctccgtcgccgccgactggtgtcctcgcctatacggttggttggtcacaccaccgttcatgggcgtctacgacttcatcgccggcctgcctccgtcgccgcggactggtgcctccgcctacacggctggcctattatgccgccgttgttggatgtctacgtcctcaccgttggctcaccttcgttgccatcgactggtgtttccgcttacacggctgacctattatgccgccattagtgggcatcttcgctttcaccgtcgaccgccttcgtcgccgccgactggtgtcttcattgttattgatggacgactttgttcccacattggccacttctgccatcaccaaggggaatattacaaagctaagtcatcatttattttattctttatatgatatttttccttttcctctgcctcactacaccaattggtcttccattgagtagtgagtcgggggctacagatgttatatcatatttttcataatatttatcttgattgcttgcgacataatctgagtacaaaagtacctatcgagttatggagttctatcttcctatgctttccgtttggtttgccaatggatggttgcctttgggccgattcctagcacccgggggctcgttggatggaccgagtaacgcaaggtgctaagtattattcggaataaatcaaaagcatagagatgagataaatttattttctgctcttaataattgcaaaagtacccgagtagtaaattctgatccgtgaaactttgttccattaatgacgaactcatgtcactcatatgcatgtttgggaagtgcctaggccgactcccggtgcttgatggtcatgactagtcggacagagtgtttaaacgtacagagtcatctgctcggggaaatcaaaattgacaagaggagaaatacatatttataaatattttaaaatacttgattttttctcgagtattatatttatatcagatactactcatcctatatgtttgttctgcaagatccagatccagatatgcataaaagggattcatggctttaagcttatctcttacgctccaggaatggatcagtcagaacatcaccgaccggcttgccttcgccgccgccgactggtgtttccgcctgcacggctggcctttatgccgccgttgttgggcgtctacgtcttcaccgaccggccgcctcgtccgccgccgactggtgcttccgcctgcacggctggcctattatgccgccgttgttgggcgtctacgtcttcaccgaccggcttgccttcgccaccgccgactggtgtttccgcctgcacggctggcctttatgccgccgttgttgggcgtctacgtcttcaccgactggcttgcctttgccgctgccgactggtgtttccgcctgcacggctggcctttatgccgccattgttgggcgtctacgtcttcaccgaccggcttgccttcgccgccgccgactggtgtttccgcctgcacggctggcctttatgccgccgttgttgggcgtctacgtcttcaccgaccggccgcctcgtccgccgccgactggtgcttccgcctgcacggctggcctattatgccgccgttgttgggcgtctacgtcttcaccgaccggcttgccttcgccgccgccgactggtgtttccgcctgcacggctggcctttatgccgccgttgttgggcgtctacgttttcaccgaccggccgccttgtccgccgccgactggtgctt

SEQ ID NO: 6438 - DNA, 4027 bp, Oryza sativa
tcagcgccatacgatttagcgttgaacaaaagggtcatttttgaaataagttttggccgcggttcatttgtaaaattagttttcggaaagggtcaaattgtcaaaatttgtgtgtttaagttgtatattgcaacattttgaaattctcatgcgggaacacttgatacttgccttgttggtgctggtgatttctatttgtttcttttgagggaagcaaacaaacaacattgtattgagactgctgagttcttacatgctaacagaaatacaagctaaaatttcaattgccttttcttttgcagttgaagcacttaagggaatagcacgcaagcttaacaagatggattgggacttcagtgtggatccatgcactgggtctaaaacttgggttaatgccagtgattccaatagttacccaaaatctagttatcctaattttccagtcagcaatctgacatgtgattgttcattcaagaacaacacagagtgtcatgttatcagcttgtaaggataatacctattattccacttcttttattgctctagagtggttcttatccagaatagttcaactgtttcagtgtctttcgttgttcactaaaatgttttttttattctttgttcatgcacatggcagggaacttatgcgtcagaatcttagtggagttctacctgaagaagttgtcaacctcacttatttgacaaatctgtaagtgcttccatccagctacttaaatttaagaacattcaccagcattcataaataaaagtctcactttccctgcagtgacttatcacgcaatttcatccaaggaccaattccagcatcatgggctagcctacctgtttttaatctgtatgttttgcatgatcctacatcatatcgtcagaatgcctgtaagtagtcatttgttcaactttctagtgcaattacaggtctctccagggaaatcgcatatctggaacagtacctaaggagcttggacgcatgcccttcttgaaatctatgtgagttgtggttgcacgatgattacaagcacctggagcttgctgggctgaaagtgtatactaaaatatggcaacatatcctatgcatagaagctcttacgtatacacacgtgcacaccaactaacaaatgtcaccaaaaaatataaaaaaaatcatacatgtactttcaatagtattacacataatggtaaaatcttaacctcaaattcattatattttagccgtaacaaaaaagaacatctgacagttttaaggttgtaattctgtcagaattttatcttttttgttactctctattggaagatgtgactttgcgcgtagatgtaatactattggaagtacatgtatgaatttttctagaattttttgtgataatttttagttggtgtacacggtgtgtacacgcgagggcctatgtccataggatatgctcccctaaaatattagaggaactaacttttgaacctcaaccatttgcatgcagaaatctagaaggcaatcagcttgagggtcatattccaccagaattcggtaacatcatcagtttggagagattgtaagttcctgtactgatacctttatataattatttacatcctcattgctaaggaggttcacttgtcttgcgttgttgtttaagacatatacttatgttgttaccgggaatggaaattcaaataaccagacttctttatttaaagttaaatttgcaacgactttgaaaactagcatgaatgtgataagtaaccatacctaattagcattaatacatcgttgctgttcaattgttcccattacagtttatatactgttaattagaataacacgatgccatgttttgaatgattttttttctccttcagatgctgataacttttatcaattaaagaaacatgaatatgccttgaaaacgaagtttctcattatttttccactaaggctgtctaaagtttcttgaattattactcattttcctcttacagtttcatttctgcaaatgacatcacaggagagttgccttcaaccttttccaggctcacaaatatgacagatttgtatgtcccacccttatttcaagaaaatcttttcttgactaggaagttctaatttttgttgtaatttggaacaatttcagccgaattgacgggaccaatatctcaggaagaatacccagtttcataaaaaattggcaacgggtcaacagaatgttagtttcactctgatgtagaacatttcacgagttgcagttgaaatggatgaaaatgacttttgttcaatgttctaatttcgtttaaatcttctctcttgatttttcagagacatgcagggtaccttgatgagtgggcctattcctccagaaatttctttgttgaacaacttaacagaactgtatgaatgtttcatacctatgctttattattttaccactgagtcacaactgatgtttttaacaatatatcttgtaaccattacataatcaggagagtgactgatttgagtggaccgagcatgaaatttcctcccttacaaaatgcacagcaccttacaaaagtgtaagtttatctttcagtgatttttactagcttacattagtacttccagcagagaacggcattgtagcccggtggtatgggagcttccaggtgctcttgctgggcagagttcgagtccctcctcagctctggttttctcaccatttcttctctcttaataattgatgctaagttccttcttagtatcccacattgagtgtccgttcaaaaacactagtacttccagcacaatatggaattctcaccatttcttgttcaaaaacactagtacttccagcacaatatgaaattctcaccatttcttctctcttaaaaattgatgctaagttccatcttagtatccttttgggtgtttgttcaaaaacattagtacttccagcacaatattaaattctcttatgttacagggtcctaagaaactgctccatatatggtgaaataccaccttaccttggacagatgcagtatctaatactcatgtaagtatccagccattattttgcttcaaccattaccttttagagtgaactttcttgttcatatggttatggtttttctgtttgcatcatcatgggtgagacgagaaaagtcagttgttagaattggaaatgtcatggtttattattctaatatgaaatatgggtgtcttttactgcatgcgttggacaagggtgtcttttaccattatctatttcacttgtttttgttgcactattagggggtaatagtattaaggggtaatcttggcataacctattgtctccttttacactgaatgctgataattacaaatacttgtttctctgacatgctaactcattctctactataggatgttgtataagttttactgttcattgaagctaacatatgtggccacacaaagccctggtgttttgctcaatgccatgattacaatctgtattaatttcagggatctaagcttcaacaagttgactggtcaaattccacaaaattttgacagaatggtggcactacaactacaatatttgtgagattaaatccttgagattttactttatgtgtcaacattttttgtttgattttggacaaaataaagtgtagaattctctccaacattggtggttttgtttattgcttttggaaggcgcctcatttcaattactataaataggtacttaagtgacaacatgctgactggagatttgcctggttggatgttgaaaaacaaggcaagcaacaaagtaaacatgtgcgtatgctataatgcaatactcttctgtgcacatacatatatgctctctactggtcactcttgtttactttttatagaatgaaaatcagttgtatatgtcactttctgttttggtgatatgttcttggataacaactgatgaatgcttgcagggatgtgtcgtttaataacttcacgggtaaccctccaaatgaatgtcaacaagcaaacgtgtatgctgctcatttg

SEQ ID NO: 6439 - DNA, 68962 bp, Oryza sativa
aacggtatgattagaattttacaaaatttcagtatcacctagccaatttcatgtatagcaatgccattttttcaatgtggcaaatttacaaaggcataggtcatttaaccttcatactaagcccctctttagtgcctccactttcctttcaaaataatttaaaagttaatgtataaactaaatcttatagtgtaattaccgcctaagttttgatttttacattgtaattacaatgtaagtgtacgtagaaatatatctattaatctcattttcatgcacgacagcgctccctttaacttatcaattaattctacgagattggagaaagcagttaataactaataatgcctacattctcatatatatacatagattattttcctctccaaatatacatagataatttgatgatgtcatagaatatctatgcagccaaaccacaaaatcttaaactgttaatatagacagaaacaataggatttgtattgatatgtaaaaatgatattaatagattattcattgtgaaaaaaatatttcatatagttatattgtaataatttttataaatagtttccaaaaacaatagagaccgcgtcgatgcctatctatactttctataaagttaaatcccacttagtctaaaactcaacatgcaaccattccatatcatcgaccaatagcaataatacctcatgcaagcatacaacattatctacaatttatttaattctacaaatcaacatgcaaacatatctaatcatcatctctcatatcatttgcacaatattttaataaatatatctatcacttttacaatatttaacatatacttattaatgtgtttaagactaaagcaccagtatcatttgacagataaaccctaatatttttttttctttttactcctagattgattgtcaaaaaaaaaatttattgagaattgcatacgcagtcaagcgcggggaatcagctagtaacgtcaaataaaaaataacggagatagcagttcaaggaggaaattagtaattacagtcactctctttgggatcacgcgattggcatctgggcattcctgtccctgtccccggttaatttgtcacacgcggacgcggtccattaaatattcgcaacaacaacgtatatatacaatctcaaagctcttttaatttaatttggtcggcaatccaatttacttttgcacttttgcatttgaaatgagtggcatttgaaaaacaaccacttaattatttgttggcctttacggagcgaataatcatcctttttctcgggttggtgttacgttttcttctgtgttaattaactttgtttgtgcgcagggatatgtatgattggacctttttttggtcatgcttcatccagtgcttatgcattggattttcatggacaaattaatatgtatgttattgtacgcttgaggagtgaggacaaacatatgcgacctgtacggacaataatatgcatgcacattattgtggagatcaatcatgcattcaacatttacagaaacctactccctccgtttcaaaatgtttgacaccgttaactttttagcatatgtttgaccgttcgtcttattaaaaaaaattgttaaatatgtaaaactatatgtatacatgaaagtatatttaacgatgaatcaaatgatatgaaaagaataaataattacttaaatttttttaataagacgaatggtcaaacacgtacttaaaaaatcaatggtgtcaaacattttgaaacggagggagtatataggtagatactaatctagcatcaaaccagagtcaagcacgcctagctagctatctgcatgtcaagccaaatcgatcaccccccaaacatgagcatatatgcacaatatatatcatccacctaatattatcctcgttttccttatacctaacatggctatatataagatgcaatttcacctttacatattggaatttttaattacaatgtacaccatcttcaaaaaaaaaaacaagttctagttatgaatctagacattgtctatccaaatttataactaggaaccttttttctttgaacgaagggtgtattgtctatttttaaatttatgatgttgtttacttgcggatatattgaccagctgtcttaactgtccataaggattatgtatttttttacatgtttttatcattaaagacactttaaatatgacgtaatttttatatttacactaattaaaattttagaataagttgaatggtaaaaaacgctcatgagtcgattgtgtcatatatttataaaacagatggagaaccaataaaattataatgcgtatgaaaattttaaaagtgagtcaattcgtaaccacattaaaggtgtgtttggttgctggttacactttaccacaattaaggttagacaagttgtggtagccacaaaaatgtggtggataaattgctatgccacaaaagtgtgataaagttggcaaaaaaaaagagtctataacttgtgggacaatgttattgaaaagtgtggcaagccacaattgtaatataaaccaaacacatgtctaacaaactgtaagtacctaaaagtgtggaagtgtggccataaaccaaacatcccctaagactatgtctggtttaggtctttaaacatattatttctgcaaattatttactcaagaaattaacttaataaataacttaaaacattggtgtaattaatgaaatagaagaaagtaaacatagtttttaaagcccgaagcgataattaatctattttaaacctggcttaattaagatagtttttgccttatttgtgatcaaactaacccctcatataggaaaagattgacagcatagattactaaataagaacgaagacattatatataaacaaatcattaaccctcatcaactagataattgtctttgatctgtaattaacgtcagtaaatcatgcaattagcttcatggattacatggggacgctagcttgccggcatatatataactggaaagatctgctcatctgcatgccttttctgacagggactcttgccgtactgtcgacgagcaaaactagggtgccgacaaataatggggaggacattatttactcagaacatcgatcgaaactccagtaaattatagatgcattcaactactttgcttaagcaaatattaaaccgatgaatcgcctgggcctgcaagttttgataagttaattaattgccaattaggtctatatatatatatagagagagagagagagataagttgacataaacaagaagttctttaattcgggctagcaaccagtacactgtcaataattccgattaattcacgaggaatgatatatatcaaccattactatatttaagaaaaaaaagccatcgaggtgctgtttatttgtgacattattaatgttttagactaatgtgaagttcggactgtttccaaaacatattaacagtccctgcatccgtgccaattgctctttctgaattcaaggacttatttagttgggaaaaattttgggtttgattattgttacatcaaatatacggacacacatttaaagtattaaacatagtctaataataaacaaatcatatatcccgtcaggaaactgcgagacgaatttattaagcctaattaatctgtcattagcaaatatttactataggaccatattgtcaaatcatggcgcaattaagcttaaaagatttgtcttgcaatttacacgtaatctgtgtaattggtttttttgttttgtctatatttaatactttatgtatgtgtacaaacattcaatgtgatgatgtaaaattctttgttttgataactaaacagggccaaattaaccgagcgttgttgacgtacgctgacatcacgacacacgtcatcatgccagaggaagcttgctagctaggctaggcggccatgaaagaaagagaacagaatgggttgtcaggtcccacttgtacaccgtcaaaataataattctcacagtggtgatgctgtttaactaggcaggcatgtacagctagtacagaataatttcatttcagattcttcatctgcaacagctgccgattcatgcatgcatatatatagcgcatcacatgcatattttggaaattaattactgttgaatccacgaaccacatatgaagtatagctaaattcttttccctcttttagaggacacatttctcttttttaaaattttgaagacaagattatacttatacagctgtggtgtctaattgggccttaggcttttggcggcccagtagtaggttgagattctgcttgatggattctttctagaatctggactttctagtcattctaattaattgattactgtatcattatatttataacagaggtccttttaaggggaccatacacacattgtagcaaaggtcaatagataaggttaattcacagtgtgataagttaatctgtctactaattatttgggaatcaatcacaattgtttgtagtcttggcagaggaaggatgaaatcgaccagtgatattccagttctgtgcacaagcagagataattaacccaacatggatattgatttatacaggtagatgtataaaagtgatcagaagctcctctataatgaagtaaattacaggcaaaatgtgggtatatgtggtggttgattgtttgacctgcagtcaccaccctagctaaaataacttatcgtgtggtttcataacaaccaagccacatgattcctagtttatttatcatggagataaatgttacacatttgtttaccagcatacaagacctggacacgtgcaattggggatcgtagtacatatctagccagatctttctgctcatttagtttcatggctagattttactatgagttgctttatgaatcaaaccagaaattctgtactgaagtatttgtgaatgtgtatatttgtcatgtagtaaaaaacacgaatattagggaacgacctaatatgaaataattagaaggggtgagacttcgaacccagatcatttagcccgctatcttgtggagctagccggaagacgacccatgggtgtttgtcgtatttgtcatgtagtagtgtttatattctccattattttttaaaatttttttaacattagttaatcataatttgcatttttttttaattatgacgcattcagctagtatatattcaaccaaagttacaacatttccatttttgtccgattaacgagggaaccacttatgtgctagtagtatatatataatataatacacgcatgcatggtaccagaccagctcataattttcaggtactttggtatgtcattcgtgtttgactcggtttttaaattcactcgtttttaaaaatacatatatgtgtttgagtcggtttttaaattcaaatgcttttggaaatacagaagaagagtcgtataagaaatctctttaaaaaaactcgcatgctaacttgagacgatcagactcctaattgccgctcatgattctgtaaaactaaacaaatccaagcgaattctcacggtgaattttaccttaactaaaccatataataataatcaaaagaaacctcacgcgttgcaatgcacgggcattttttctagtctgattaaatatttaaattgccacatgaatgcatcaagagcatgaacttggtataaacagaaactaaatccgaagttccgaaccaaaccaaatttggcctattatttttagaacctcacttatgaaatatttcccttgcaattatgtacgcgttcctaaaatccttgcgttccaaattaaggaaatcgctgtgtacacaaaaattaaatccaaaattagttgcttaattattacaggtgatcaaaagtactcccttcatctcaaattacttgttctagatttgtccttaattggtcaatgatattaatctttgaatatgaatttatataattaaacttatatagtttgacacatcacaagatttatatatttagatttatcatgagaaatcctatcataatgttgccaaaccatgcagattttcaaaaattaatagtcaaagttagctagctagacacatttgatttataataactaatccgaaacgactagtaattaagaccacgtttgattcagtttaggattatgataatctgaattattaggagtaagctgaaacaaacagatagcttattatgattgattattataatctataagccggattattataatatgataatccactctaaaggtgctttttctaaattattgggtgaataacagctaataatccagagaatcaaaaggctaacagcttattctatgtcagtttattataatccagcttatagtaatctgatttaataatctatattataataatcttaagctgaaataaacaggcctaagttgaaacggagagagtacgtagcaaaatcaatcagagctgggtgcatatgcaacgaattaaatcggagatcgaacggtcgatcgaaactaaagcagtgtactgcatgcaacggcttgcaatgtgtgtaccagtctaaccacttaggtacttaaaccaaccaaaaaagtgtaagcaacccaacgaatccttgcatggttcgtcaaccgtacgtacatcaactccaaatcgggtccccgtaactatacggcattatggcggcgctatatatttcttctatctatctactctctccttctccagatattttgacgccgttgattttttaaaacatatttaaccgtttatcttatttaaaaattttaattaattaataattcttttcatatcatttgattcattgttaaatatgctactaccacttaagtttttaaataagacgaacggtcaaacatgtttaaaaaagtcaacggcgttaaatatttagggataaagggactaattaactatagattatatatataataagatttacttcggttcaacaaaaaaatatctcgagatatcggtaccaaatcattttctaattgttgaatctaacaatgcacatcctgaccagctcgatccaacgatcgaaaacaatttggtaacgtcaggtaccggtatatcgagatacttttcgttggaccggaaaaaatctcatatataatagccatagttagccacacaatgatgggttgcagctgacacacactgccagtactacgtggttatactgctaatgcgtcattagctcagttaattagccattgagaggcgagctcgatcgaggtgaggaggttagctcagctgtcgctgtgaacacggagctctctctctctctctctctctcctctctcctcttcacccgctgccgcccactactactaaaacgggcaactcatccacctcctcgacgcagcctcactcctcctccattgctacctcaagctccagctcgagctcgaggctttgctttggccgcaatgccggagctggaggtgtgtagccctgcgtcgtcgggtggggcgtcgccgccggagtcgccggtggaggggaggaggggaggaggaggaggggagaagagggggagatcaggggatggcgggaggcacccgtcgtaccgcggcgtgcggatgcgggcgtgggggaagtgggtgtcggagatcagggagccccggaagaagtcgcgcatctggctcggcacgttcccgacgccggagatggccgcgcgcgcccacgacgccgccgcactcgtcgtcaagggccccgccgccgtcctcaacttcccggacatggccgcctcgctcccgcgcccggcctccgcctccccgcgcgacgtccaggccgccgccgcccgcgccgccgccatggagcccccccagccgccgccgtcgtcgctcaccgtgcaggccgactccgccgccgccgcattcctgacgcccaagaacggcggtgtcagcggcgccggcgcggcggacgacgagctcgaggcgatcgtcgagctgccgcggctcgacgagctggacgccgccgagctcgtgttcggcgccgcgttccaggacacggcggcggaacacccgtggtgcgaccccgtctggatcgacggcggctacgcggcggccgccgcggcggcggcggcggccgcggcgcacgacgacctgttcggcctcgacgccgaccaccatggatgggcccagtcggttggtgccctcttatggaacctgtgattcgatcataataataattaatctctaattaattaccaagtaattaacagctctagcttctttaattttaatctctccttttttttccagcttcctaaatctgtacataggtttccagttttttttcttctttttttaatcttttttcaggcaggcttaatatatatttctgcttgattttttcccctttcgtttcaagtgtcctgtagctttgcctttttgttcagtttggggctcttgtcttctgaatttgtcttccctcttgcctagtggctctacctgcagagtgtcaactaagctaagtcattaatgacttaattatgtataataaaaatctttacatgcaagcactacattgttaatttggccatcaatggtccataattgaatcctcctcctcctcaaccattactatattatcattatatactccatccgtttcgaaatgtttgacaccgttgactttttagcacatgttttaccgttcgtcttatttaaaaacttttatgagatacgtaaaattatatgtctacataaaaatatatttaataatgaatcaaatgataggaaaagaattaataattacttaattttttaataagacgaacggtcaaacatatgataaaaagtcaacggcgtgaaacatagggagtatatgtacaactcctagctagcagctaggttcctgcatgcatatatattcagtgcagggggcaattgattaagcaacaacttcaaatgacggctttaatttagtaccattgctatcaattgggtaattaactagctagtgttctttgatcactcatcctaattataaagtgtaaggaaaaagtagccgaagcactactgactagtagtactgaggcagccatttttgtgcgtgtggtgaaaattgaacttaacttaatttgatcaaaatgtaactttctttcactgctttagtaattatttggtcagcaactagtccaacgggccatcttttggcttattcaaggaataagtaaaatggtatatttgtaaacgaaaaataatttatgaataaaacttttatatacgcgttcttggtgatataaaagtaaaggttgaaaaataaaactacaattaaaaaaaccctagaatcaactctaaatttaaaattaaaaatttaaatattggcttataagtataagcgaaaaaatgagattgcaagtacgctgccgtagctagctacacactttccgtcctaaaaataattaatttttaaggatgaatttggccgtacctccggaagttgatattttagggatagatgggtataggtttaattgtgtgcttaattgattaattaatcctatatatatatatatatatatatatatatatatatatatatatatatatatattgattattatttgagagagggacacacacttcagtacatctctctcacggacacgcaaaagcaattaagctagctagagagttgtctgttgtattttttggatggtgtgaaattaagaaagcaacaagatatatggctcaatccatgtaatgcaccccaaaaatatcgccatgcatctatcgtccaaatatttggttgtactatacctttttttttttttggttccatccttttgttcgtttcttgtcatttttcttggacagccactgattggaagagagccatttccagtctattatatagctaggttgtggttgggagagatgccagctccatctgagtaatgactggtcagaggttttctccaagtgaacagtgcttcttggtgtgcatgtcaatatgcatgtgtgtggttttttcagaatattcagagttttgtccaggtccaagtacgtcatgctgctgctaggtagtaaggcttgtctgcactgttctggagtgagctcgattaattggtcgcaaatgtaatccttcagacaatgcgcagagagtttcacaggaccaccacatgggagagaaaaacaaaaagacagatatattactccgcttaaaaaaaacttaatttctgattgtgtaactggacaagtatttaaaaaagttaatgttttcttaaacaacttaggaggagtttttattagctttttgactcagctacctttctcatctatcataaacacgtttttcaaaccattaaatgatgtgtatcgtaaaaactttatatatattcttttaaaaaataaatctatttttattttataatagttagtacttaattaattatatactaatacctaatctcattttatatgccgctaaaaatctcgacctatatatccagctatatatccccacattcggacaaagccaaattgagaggagggagtactagatttgtgtgatgcatgggcatacgcaacacacggacgtgcgcattcagggattgatttgtacttgtgaagggaaacaacacaatgaacgggtaaagaaaaggcgagtcatcatacagggtgtagggatatgcaacaagttgtgaaagcaagagagatgtgtgtcaggtgatcaggaccagatcaatgtagtacacagggtgtgggtactcctgcatcttgcaaaggacaggattgactgcaacagtgcaagtcttcctggtaaaatctgatttgggaatgaaacactggaacatgccgagctagtgtacgtactacggattacggatcaaactgtcgtgtactgtagtactccctccctactataaaatatatgtaaagcttttcactatttatatgtccaacgtttgatcgtttattttatttgaaatttttttatgattagtatttttattgttactagatgataaaacatgaatattactttgtgtgactaattttttaaactttttattgtaaatttttcaaataagatacccacggttgtacttattttagaacgaaagtagtactttgttatactactgcatactgtgtcactgaaacgaactgagtaacacagcaacttagttcgaagttaattagttttttcctataatattgtggtaatgcctcttttcagtgtcaaaaccaggacgggttttgacaataccaaatttattgaaatacaatttgtattagtatgagcaaaaattggtagcaaactaaatacaactgagcttgtcatactactgaaatggccaaaaaattggtacgataaaattttggtttcaatctaaataaccctaatatgtgacacgaaatttgcctttataaggcgtcgtcaaaatttaaatattcaaccttaattttagagttaattttaaattttctttcagcatgattccgtttttaatattgatttttttaagacgttaagtacatacatataaagttttatctataaattatatttaatttattaataagccgacataaagaccgaaacaagattttttttcccttctagatgatcgatcgccagcccaaggtaaagaagcagtgtttacgggacaaaggtgaattggagaagcgtcgccatcgagcgatccatctttgctgggcgatcgagaaataatgaagctctcgcagggggaggggggggggggggggggcactgttcgctgggaatcaaaatcaacgcacagcacagagtaagtctagctagatccatcctttcctttgcaattttaatttgcaagcatgcatgcattgctctgatcgatcgagtgtctctggacgtcaaactcagctgcagtgaaacgagtgtgcaacactactgctgcacacatgtgtatactgtatggtaagcgatcgatcgagtagtcgtcgtcgtcgttgctctctgcagctgcagatgcatatgggagatgtatacagtagtaagaggagctagctagccctgcattggcatggccagccaccgccctgtctggctgtctctggccggcggttagcgatgcaccccattattctctaattaattgagatatactgtatattctacctcagtttttatcggcatatttttaaattattaaatggtacatttcttatgaaaactttatatacagagaagtttctctaaaatgtcagatacatttgttttttaagttcatcttcatcttcatctaaaacttcatcttcatattaaagtatgaacaaacaccactttagtaagtcccggaataagttgatttttatgctatctttagaaaaaataggagggaaatgtgtttgtacactattggagaaaccatctttggtcagttgaccaaattccataataatctcgattgcaaaaaaatcagaactaatatattctttagtcccggtttaaaaggttagagctattttttttatctttagttccggttggtgttatcaatcaggactaaagatcatttttagtcctggactaaaaatttagatgccctgagtaacttgcttttaggccgagtttagttccaaactttttcttcgaacttccaactttttcatcacatcaaaactttcttacacacaaacttccaatttttctatcacatcattttaattttaaccaaacttttaattttagtatgaactaaacacacccttagatatggagggagcacgtagaccggccggtccgactgttgtcgattattacgtcttgtcacattaacatctcgaacaatcttctgacaaagccaattaatgcacaccgttattagctggttttgcaatttgtacttattgacctggcatgcatgaacatcgatctcttcttgcgtactatagagtagtaggtatgctccgttccgattaatcattatggattatgggtgtgtttagttcatgttaaaattgaaagtttcgttgaaattaaaacgatatgacgaaaaagttgaaagtttgtgtgtaggaaaagttttgatgtgatggaaaagttagaagtctgaagaaaaagttgggaactaaaccatgcctatattacatatgggtgaaaaaaagaattaaaaaactactccttgtgtcccggaatataaatatttttagatttagatacggttattaagaaagtaggtagaaatgaatggtggaaggatatgattggttgtgtagtggaggtaggtggaaaaaatgaatggtggagagttgtgattggttagaaagaaaatattagtggggaagttgtaataaacatctggtactatatttacttcggtaataaactcgatatatctaggatcctcactattttctacttcctccgttttacaatataagtcattctagcatttttcatattcataataatattaatgaatctagatagatatatatgtctagattcattaacatcaatatgaatgtggaaaatgctagaatgacttacattgtgaaacggagggagtagccaataacaaatcacgacattatatgttgattatatatatggatgcatgtatcaatattcatttactctcatgcataaataacgaatagccttagaaaataaatacaaatatgattgtcatttgagaataacctcaagatatatgtatgataattaattggaaatggatgaagtagtgtataatataataattttacacctacagttatatagacaaaatctctattatgatacgaagataatagcaacatatagcaagttttacagtattagagatgatagtcgtttataattttattcatatcatctactcctttgttcgctaatgatcgtatgatttataagtactctttctaaaatatgatcagtgcacttgtcccaacaccccgtaatagttttaatttatttgtttgattataatctattcatctatttctttcatctcttttaaattttctgtagatatctcattcgtttatctcctctattttcttcccacctcataaatgtaagcatacatatcatcaagagactagatacgtgcctacttcctccgtctaaaaaaaccaacctagaagaattgtttctttttttggacggagggagtagatgttattgcaattgcatctgctgatgtcatggacacgtcactactgatactcctaccccaaacaggcaacagtaacagatgaggctgctagctagaactgctcggaattattttcaagagaaaacttagaatcgggtgcccgatggtttggggaaaaaattgggcgttgatgtcagcatgacgtatgcgtgaaaaaacactttaaactatttttttctcttaacttatttatccaaatcatgatccgattccactattaaattcgttgcaattaaatcttcaaaacaaaaccacacatggatatattccaacgaaaaattcttttagcttattattgaattatttttaaggcaaaattggttatatagcattgatagttcacgttttttgttttatagcacccaaagttcaccatgttcaccatgttcctatttttaacgcttatgtcaattttcgatcgttttctgtctgtcttgatctagccacacacacgatatgacgtttctacccctcacaagtacaagtagaatgcatgtcaatgaggggtagaaacatcatattgtgtgcgtggctgggtcaatagcgatcaagacggatgaaaatattgacggatgtgttaaaaatgggaacggggtgaactttgggtgctattaaagtgaaccggtatctttcgatgctataaaaccaaaaacgtgaactttcaattctatataaccaattttgcctatttttaaatattgcacgatgttctactaggtatatcggaattgtttcactaagtagatcaaaaatgtttcaatcgtttaattcgggcgttgtttcacattatataaaatcaatgtttcagcaaattcagttcactgtaacatttgatacatatatactgaaacattgaaacatttttggtgaaacaaaaaatggaacgaattcccttaatagagggtttccaaaatatgtaggtgatttattgcaaaagaatatttcaattcactgcaacattagatctatacatagtgaaacattgtgagtacactaggtgaaatatttttggtggaacaaaaaatgaaacgaattcccttaatagagggtttctaaaatatgtgggtgatttgttgctaaagaatgtttcaattcactgcaacattatatctatacatagtgaaacattgtgactacactagatgaaacattttttgtatagacacatggcaagtgggggcagaggaccgtggtggggcccaagcatcacgtgtcacgcgcgtggggcggggggagcgcccgatttttgctcccccccgccggtcgaccgatcgctcgcattcttcttattttcctggccggccggacgggtgcattacaattatattattctctcgtgtttaaaagggaaaagggaatgaaaaggaccattgctccacaaccattcgatcgatctggagttaccgctgcaggacacaaaaagcacaatgaatcgccacagcggacaaatcactttcgtcactattgctactgctcgacacttttttcacgcagtgaatttcacaaaatcaaatatttaatggtctaagcttcacaaaaattagctattttaactgatgacatatatataactgtaccgtcccccagctattgtggttctagaattttgcaaaaccacaccctataacatagtgtttatgatttttttttattaaattcttgactaaggttgatatatagttcaactctttgctgttttcaaaagtattgtttcagatatgttgaaattaattgagatttgtatgaaggtaaggctttataacacatttaaatacaaaacctgtggtaataaaacataatgttttctacttctttcaaattatagtcattttcttctccaacactactacataggatggccatgcatcctacttaagtccttcatgacactactaaaagaacctaatgaacctaatataatgggtgccggttatgaatcacacataggtattggtttcctaatcgacaccctaatagcgattctcatatgtgatattgacaccaattttagattaagaaccggcacccatagtgttccacaagccaagaaaaaacaaacaaaaaagccaacttgagccaatactcagagcacccccaaccctgtccctaatctacccaactacaaagtttaattcacagataacacatgagcacaacaaagtttacttcaacactgatcccatattaacaaatcaacaaataaaaccaaataatagcctctagatgttcatattaacatatgaacaacacattccacatgaacataacaacaatcaataatcccctaagttgtacacgcatctggagcctccattgttagatccgtcggcctggtaccatggagaatgcgagggagatgaggaggccaatgatggtccatgacagactcttgataaaggcacgcgagctcgaggtaacatgcatcgtcttcgtagctgctactgctcgttctcgtcactatcaagttcgcggcggctgtatctggttgcccccgacctaattgctgctagatccgccggtggtcaccgacggacttgctggcgttgctcatgctcatggtcgcgaggatgcgcgatggaagagaggggaaggggcagcgaaggtgaggagatagcagaagagattgtagctactagaagctatctaaattgggtgttagcctctcaccgtctctcttactggccgtaaccaaataaatttaaattttaaaatttaattttagagttgattttgataatttttatgatagtctattttctatttctttgaaatcacaaataatacatacccatcaaaaccttagacaaaattcattctccaaaggaaaaagaaaagacagagaagacgacgttttctccatccaagtatgagttgcatgcatcacgacgtactcgcgatctttccctttcatccaagtgcaaatacaaataattttattactacgtattaatttatcctactgttcccgatgcggctgtagcttttatggttcgacggttaattttttacttgtattacaaaagttcctttttcgtagtacacaagggaaccattgtaattaacttccatattaaatgaatgaacaagttgcctaacttttgcaaattggcatatactcctatatgcaccgcactttgcaaaagtgctccatggatgttgatttaccacacgcgtaattaattaagttaattggtcattaatgtaagtgtcactccttacttttgctactccgtacatagtttaagtaaatgtgtgtcttgctgatgaggagggccggaggtcaagtggaacaggaggtcaatcaaatgatcattcggtcgcaatgcagtgtacctgattaaactaatggaggggcaataattccaggggcactgtgcggcaacaccgtctgcttttcttgtggattcatttaggagctgtttggtttacatggacttatttcaagtccatgtcacatcggatgtttggacactaatttagagtattaaacatatattaattataaaacccattccataagtttggactaattcgcgagacgaatcttttgagtctaattacgccatgattttgacaatatgatgctacagtaaacttttgataattatggattaactatgctttaaaaaaatcgtctcgcggattagctctcatttataaaattagtttttttattagtctatatttaatactctaaattagcgtccaaacatccgatgtgacatgggctaaaaagtattagccccatctaaacacccccttaattatagcatgtcgtacaagttgggtgataaacaaaacgatggatcccttggttcactgccactcctgctcgaacgttcaccggattaatgtgcacgcacttgttctcctgtgtgacgagtagaaaatgtagtacgtagtactatactgctcgaagtaacgacgaatagtacaggcagtcgggacttggacagttggcatttgaatgcactactacatgtttttttttttcatatgacaaaaatcgatattcgggggattggacgacccgcatgtatactggtgtctgcgtaaaaacatattttcctgtggtgcccagcgcagccgaatggaaaaatattttcgaccaaaaaaaaaattcaaaacaaaaaatgggccaaaaccctagcccgctgctggcccccagctccccgaggcgctgtcgtcgtcctcaccatagtgcactgccaccatcgtcacatttgtagctgtcaacgagggctgaggacggtggatctgtatctcccgagggcgggatccctcttgcccaagcccaccgccgttgctctcgtgccaacctcgcctgccgccaccgtcgccggagcttgccaccaccggagcccgagcccgctgcctttgccgccggagtccgtcgtcacgaggagaggggataggagtgggtgtgaggagtgggggaaactgaaggagtgggatggacgggaggggacttagtgggagagagagaggagaggataataaaaagagttggaagagagagggtatttttacatgcgcgccatcatatcaacccaattcaattgaaacgaaactcttcaaaattcaattgaaatcatatcaacccatatcttggcacgttcaagatgggcgatggtaccgaggccataaatttttcatcagttattctcttcttcgtctacgatcctactaaaacatgtttattctcttaattagcgcgctccaataatagtttgatgataatcatggccaccttaaagaatatgtatctaatgaagtgatcgcattttgaagaaaccaaatattctacttatccactttaatttgtaaagaaaaactaactagtatgtatacgtagttgcattttcgacacaactatatctccctagacgtacgtagttagagcatatccaccaacattgtcgactggtgagcatcctctcagccgctgttgatcatgtgcaattctttactcatttagtaccaatgcgtagctagataaattaatgagcgtgttaaattgatatctaattctcctgttgtgtatagagagctgctggccgtgatatgaataaaacaaggagactcctcccaacagattgcagagaatacctaatgttcaacaagcatgagacggatctggcatggagaaagaggagctcgagtctccacctttggtgtggggactacgagagccctctagccccgccccctaaatttctctatcatacattcggaagggttagagatctatctagtttgttcagctctctactatttttttgggatatgttcctttaaaaagtaaacatagttatgtagctttgtttaaacaaggcttcattttgtatttaattacaccgaatgatcaaatcttagatatggccctgaattatactattaaatatcttgttatcatcgcctataaattcagtaaagtctaaagcttcctttcatataaatcaaccttaattatcatgtctgtcactaacacacacccccacccatcctcttcataggtactcactccgtcccaaaataagcgtagttttacactattcatattcagcgtttgaccgttcgttttattagatttttttatgattagtatttttgttgttagtagatgataaaacatgagaagtactttatgctgactaattgtttttaattttttcataaaatttttaaataagatggacgattaaacgttgtacacggatacctatggttatactctctccgtttcaaaatgttcgacactgttgactttttagcacatgtttgaccattcatcttattcaaaaaattttgtgaaatatataaaactatatgtgtacatgaaagtatatttaacgatgaatcaaatgatatgaaaagaataaataattacttaaattttttgaataagacgaatggtcaaacatgtactaaaaagtcaacggtgtcaaacattttgaaatggagggagtacttattttgggacaggtgtagtagtggccattcgcatgacagatgacatgcacatatataatcaatccacagagattcatagtacatctgcccaagtacccagcaaatcaattaattaaactaatccactatcgtacctgttccacgtaagaaagtctcgatgaacagataaccttctacaagttcagcattgatatccatcgatccaaacagtgcatcgcattcgaagtttccaaccacagcattaatttatcatccaagattactaatgcgtagtagggttaacttgacccagcactgttggagaaaccatctttatttggtccggcaaaatccacaatagttccggatccaaaaagaaccgggactaaagattgtttttagtcctggttataaatattttgatctttagtcccggttggttcatcccctgtcaaatgtatgtcagggggccgaggatctttagtcgcggttggtgtcaataaccgggactaaagatcaccactttagtcccggttggtagtaaaattaaacacgtagtatataatctctatcccttatcctctcctccacagttacaacttaacggatcgaatctcaccccctctcctcatatctatcctctctaactctcttctccatctcctccccttcctcctctcctcccccttctctccccttcctcctccccttcccggccggcctccccttcccatccggcgggccggccggcggcgggcggcggggcggcgcccagcggggttgcacccggcggagggcggcgggcggcggggccgcgcccgtcgttcgtggcgaccggcggcggcattctctttttttttttaatttgtaatgattcactgagatgtatttatccgagaagttacaaatttgtgattcattgtttggatttgtgatgtatttgagtaatttcttaggatattgtgatgtatttgatttgtgtgtataagtaactttatgatttgtgatgtggatttggtgatgtgaatttgggatgttagttagatttggggatttgcctacttgattcgggagaaaataaaaaggaaaaaagaaaaagaaaaagggaccatctgcactgccgctattttctctttaagatcccctcatcacatctttagtcccggatccttactcccggttaaaaaaccaggattaaaggggattcctaactgggagtgatgatttctccaccatctgcattgtacgtgtgtacgattgtaccaaaagcacgagctcacaatgttgtgtaactgtgtgcaagagctggctaaacgtacgtgcatatgctctcggtgattgatcgatcgatcggctgtttaattggttggtttggtttaatcatggcgcctctgctgctgtttgcacgaggtgacagcttgatcagattgtacgacgttattacgttcaccactatataaaccttattaagcgctagttaattaaaagccccacaaaagatactgaatttttatccctaccatgaaagagaagctattggtatcggttcagaaaccggcatataaggttgtacgagtaaaaaaaaaaacgttggctttgatgcacgaatcgagatgatgcttcaaacggcttctcattaaatcctcatcctcaaaccaatcatcataatacacgaacaaatcattttatatacaaaattataaatggatcaagatttacatatacataattgacgttagaataaaacgcagggtgtggctaatgggcaggtgactgctccgggcgatcacccccatcacccctatacgctactctctcccttcctcctcactttcttctcttcctactgtaccatatttttttaaaaaaataaaaaaataaagttggaaaaaattatgtatagaaaatactatttataaaaaaatatttgaattcaaattcaaatttgaaacgggtatgtaaacttttgacttataaactttgggtctataaactaatatttgaattcaaattcaaatttgaatcggatatgtaaacttttgaattttaaactttggatttataaactttaggtgtataaactttagatgtatagaaatactatatataaaaaatatttgaattcaagttcaaacttgaatcggatataatttaaattcaaatttgaatcgggtatataaacttttgacttataaactttggctctataaactttaggtgtataaactttagatgtatagaaatactatatataaaaaaaatatttgaattcaaattcaaatttgaataggatatataaacttttgacttataaactttgggtctctaaattctaggtgtataaactttagatgtgtaaactagaggtgtataaactttaggtgcataaatttactaaaatatgaaagtaatgtggtgtcaaaaaggaaaccacgtggaggagaagggatcgcgccctgatcgccccgggcgatcgctcgcccagtaggactttcctaaaaaacatgccaatccacaaagtaaaaaacacataagatccatactcatataatcaacttaggccccgtttagtccccagacaaaaattttacaccctgtcacatcgaacgtttgaacacctgcataaagtattaaatataggctaaaaaaataactaattgcacagattgcgactaatttacgagacaaatcttttaagcctaattgctctataatttgataatgtggtgctacaataaacatttggtaataacagattaattaggcttaataaattcgtctcgctgtttactgacggattctgtaattagttttctattagtgtccgaacaccacgtacgacaccctatataatatccgatgtgacacgctaaaactttataaccctgtatcaaaacaccccttactactcatcaaggctagagtagtctagacacctacaaactaccgtcgagcaggcctgctgcacatggatctagccgtacccgacatctgagaggatagatttgactgcccctgacctcttggtgtttggatcgggccacctacgtaccgagatatgcattgagaaagtcattggtgtcaccattaccactgaacacctgggtcacacgctagctacaaatgcatggggaaatcgatgaagccattggtgtcgtcgacttgtcgcagctcgatttcaccacgtacgagcctgtgctcctcaagcttgtgaaacaaagtatccaaatgccacgagcttgagggccatcacatttggcggcccccgagttcaaggtgaccggatccagtcagcccccacattcttgacgtgctgatgcagatggtggtgagagagatggcacgcgggtaggaatgaaaattgctcgaaaacagatatggtacgtactataccacgctaatgtcatcatgacgtcagcatggtaccaatggctgtcgtgtatagtatcacggtatcagatctggtatctagctatcagatctgaacatacagtaccatactgatgtcaacacacataagctattccgtaggaagggtatagccactacaacagagcaccctataggtgtatgtaccattttactaaccgataccaatttaggagtacctctacccattggtataggtgccagttttaaaaccaacaccaatagagattataggtgcttgttctgaatatataaccgatatctttggttttctaggagaaaaaaaaaggaaaacctaactcttgactagctcaaatcgagccaattcatcaagccctagatcccagaatgaagctccaaatcccgtaaaatgaagatgaacacatgaacaacaatcaataatccctatattcttatttcaacaaacaaacaacacatctagatcttcaaaatcaacacaaagacatgaataaacgtgaacaaacacatccagctgctatcgccttcaccgacgacacctaaaccatcgccatggaggtcggaggtggccaaatccgacgacccccgacttccaggcagccagtccggcagccccctacctccatgccagcaaatccgctggccaggccaccaagaaaaagtagagaggagaggagaggagaggaaggagcggtagtcactgtgtcctccgttgttgtcatcgcccctccaatgggtggaaatatagaggggcttctgacaaaggagatggagacagagtgagagattgagaggggtgagggagaaagaggagagaggtcagccacctcctcctcccacttcaccacctcccaggtaactgtccctccttccgcgtggcggcgggagcgcgaggcgcggtggaggtgtcagcgataggggtgttgtggtgtacatcttgatccgatggtcacctttggccacaaagccgtctgtcttgggggcagaggaggagaagtagccattggcggtgggggaggaggaggggaggtagtagtcgttggagtacgagaaggcaaaagatggtggaagggggtggcttcggagagcaggagaaggggagagaggtgttggtgtggataaggatgggtgggtggataagaacggctcggctcggctcggtcggtttttttaaaacatgtggtatatgtttttaattaatcgatacctatacatgtcggttcttttaaaaaatcgggtacctatagtgaatttttttatataatttagacctttttaaaatatgattttattaacaaaccacctaggaaaatattttcaaaaatgaaccttttggccaatagcagtggtgtggccaaactgtgagctgcaacaccaatgttcgtggtgttgcaaaagctaccccgtggtagttgttgccattgaaaatgtcaactgagcgcggactcaaatgggtttcaaattgggggcaagaacattggattttgagtggatttggaaggaattgaggagggggcgtcagttgaaactcgcggacgagagagagaaaaaagagagggctggaagaggagaagagatgaaggaggaagaaagaggcaacggtggctggggatatttggcatggcagcgtcacgccactgagcctggcgtggcaagaccactccctcctcccccgcgccacgttggcgcccggttgacgttttcaatggcaacaactgccactgagcagcttttgccatgtggtagttcagtttgaccacgccaccactgtcaataaaattatatatttgaaaggtctaaattataagaaaatttcacctatagtactagtgcttgctttttctagagccggtacctacagtgataaaagatgctagttctacattttttttaaggacagagatgggaaaagatccaaaccgatatttatgaggagttttgtagtagtgagcgttcagtagtactccctccatccacaaaagttacgtctattttacatttgagtttttctaaataagttgtttctatttgtagtctttatgcattcaaagacttaaatgaagatataaattaaatattttattagaactaaggagacatctaaatactcattggttgtatgcttgcattcattttttgttttttaacatccaaggtgatttaatttctccttagtcttagtgtcaaaagtaatactccctctgtactcgtcaaggaagttatttaagatagcgacaaggtctccaaaacacaactttgatttcttatttctataaaaatatttattgaaaagtgatatatgtatacttttatgaaagtatttttcaagaaaaatctattcatataatttttacatattcaaactcaacaaattaaaagttattcatgatttatattcttaaagtttgacttaaacattgtcctaaacaacttactttacgagtacggagggataacttttatggatggagagagtagtcctctttttgttaggctcaaataattctgtgcttacgtggaggccatgcaaacggacggacggacaacaagtgggtacattattgcaaatcatatccgtcaagatacattgctgtcccggcccctgaacaagtacgtgaggcatgcagcaatggcatggaaaaagaaacatcctactatgaaataatccacgcgttactaatctgggatcgttaattggacattttcacaatcgaaattaaatcgtcgtgatctgatgtggtccagtgacgctcagattttgctgttgggttggacacacaaaagggcaccgcgtgtgaatacgcgtgtcagccgctagctcttgtcattgcatgttgtcgacaagaggacctaccagagctatctctcaagaaccatatatttccatgtgtgtacaaaatatactttatttatcatatatgtgcgcgcataccatattgagaaattgtaaatccaggatgagcattaaactatactcatcggtactcgaccgatataagataaaatatataatacgaatcatatatgtaatagaaacaactgttgaataaaaaaaaaatagatatctaagattcttccgtgtcaccataaataaaaaatttactccctgtaacttttttactcgttatgtgtaaacataccagtaaaatttttacttatgataacgtggacaaatctcaaacgttcaatttttaaaccaacgataagttttcaagttctatctgcatatctagttttcaccttgtatttttctacaatatcaagtgtaaattaattcgatcgagagctagtaccctatgattaatcgaaatctagcgaacatatatatgtccttgtatatataatctagcgaacatatttatttttttcctttcccttttctttttcctcctattcttttactatcttcttcctccactagagccatctcgagctcccctgcgtcgaagaggccgaagaagagataaatgaaagaggaagaacggagaaaaaataataataataataataataatgtgccatgtcgtcgtctacatgttataccacataggcaagaccacggtcaaatgagactttggaccgggatgatacaataaaccaagtttagaaatatcgatacacactttgcaggtacgtggacctagatgaaatctgcttacaagtttaaggaccgccagtgcaatttaattgctctataattaattcaagtttgcaacaacatcaacctaaaaatacaattgtctcttggaagaagtagatatattttaagaagcatgagtacacaacggattcgttgaaaacctggacaatgtgcatgtggccagaagacttgatgaagccattgtagcagaccgggatagcttgttttgcagcagattctgtaggaccgaatcacaataactaagccaaccagagaggggtgaatggttgatataccaaaaaaccgaaaacttttagcggaaatgaaagttaccctcgaaatcgacagaagtcggtctgaccgagattgatatgccggtctgaccgtgtggatgccgccggtctgaccggtatagatcaaccggtctgaccgccgaagccgcctgccacgcctaccgccgctgccggtctgaccgcctcgctcccgccggtctgaccgccgccttgccgtcggtctgaccgccggtgagtcgtcggttagaccgccgaaacccgatgaaacacaaatcgaagaactcttaaagtagatgacgactttattgattctctctgtatttacaaagtgcaccaacagcactccttacaaaaatttcgactaaactcgaaaccctaactcaaaaatcaactcaattgctctcaaaagcgataccgggaagcctcacactccccctctatttatacccgaggtaggcagcctaaagccacgaaccaaactcatactaagagtcctaaacaccttaggaaacccctttgccaataaattccaaataacaaaaccaataatctccgatgccaattgttcatcacagaataataatcaaaaacacctttgattttacaatctccctcttgatgaacacattggcaaacccatcaaaaatgttttggtgtttgaaaaaataaaaacaaaagcgataaaaagcacacttcgtacaaacgtacacatcgtgctcgaaaatcgaaaagaaaacttctctcacttttgaaaagaaagaaactcccaattgaaccaaaaacaacatgctcttctcaactcatttgcttctccaaaaattcaccttgcttctcccaaaactcatatcttctcccccttttgacaatgatttcattaagcataggaattatgttcattaatgttcaagagcttagcatacatatagcatatcatgtcatgtgttgcaataaagagaagatgaacccatctataacataacaagcatgtattaaagtataaccatgaaccaaagattttacaattaagcttgaatcaacaatcaaaattcatgatttcatacgatttataatgcaacatcttaacaagcacataggttgaagaataaacactaaacacatatacctattgcatttatcactctttctcaaataaactttagcacaaaataaccaagagaatttttttcaactttttcttttcttgagcctttttgctcatatttttctcttttattccgggtacgtccctgtcgttaagactgtttctagagattcggcacccattattttgctcacatcgaatacgtccttgtcgtcaagactgtttccaaggattcggtatttatttttttaatatttttattctcttttcacaatgagcaattaaagctatttgaggaataaaaattcaataaagcatatatatagagcatttatagatcaaaccatatgctagcatcaacattgcatattttcttaattcaagtataatttaagtgtcatgcatcatctcccttgaaagcaaaatctaaatctcatgaaaagactagaatacatacaagctatgctagagacaaataaaccttcaaagtattgctagcatgcacaagaaaataccatatgtatagaacaaagctctcttttatcaatttttctcattgtcatattttttgcttgataaaaccatgaggtacaaactccccctcaaaccatgccaaaaggatgaattatgcccaattcaccacgaagaaaagcaaagcgattagaatccaaaggtttagcgaaaatatcagcgagttgcgactttgtgtccaaaaactgtaattcaacatctcctttctcaacatgatctctcaaaaagtgaaaacgaatatcaatgtgctttgtgcgtgagtgttgaacaggattcttagcaatgttaatagcactagtattatcataaaagagaggtactttctcaaaagtaagaccataatctttcaaagtagataaaagccaaagaatctgtgaacaacaactagcagcagcaacatattcagattcagcagttgattaagcaacactagattgtttcctagaagaccatgcaatcaatgatgtaccaagaaaatgacatgttccactagtacttttcctatcaattctacaaccaccaaagttagcattaaacactcttccatatcgagaaatattcaacacagaatcaccacaagaatcaaaaactttacttccagttttcttaaagtgaacctcaaaatcctcatcaacaatttgtgaaacctaaagcaaattgtactttaaatcctcaaccaaagctacgttcttcaattcaaatttttcatttaccttaaccaaacctgtagcgagaacgacacttgtagaagcgtcaccaaatataatcgattcagtcttggatgcctttttgagagagaagaaccaatttttatcaccagtcatgtgccgcgaataaccagaatccacgatccacacgttctccttccgcggcaccaaagcctacatagaagcagaagtcgaagcctcagtactggggttagatgataataaaaatttagcaatctagtactgagacacacgaccataagatccaataggcatatatccacgtgcaaaaacagtttgagaattttcagaaaaattcctccgaggccggtctgatcgagggtgtgcagccggactgaccggaggccggtctgaccgcttctttaccgccggtctaaccggtgcccggtctgaccgacgctcagtagacggtctgactggtcgccggtctgaccgcgggacccactgcggtctgaccggtttcctcgagggaaaaccagattttttgccactttgattttgcaagagcaatctctctctcctttttctgtttatgagttaatctgaaataaaaaccaacaatatgtccatcttttccacaaaaagaacaagtatatttttcacgatgattagacacattggtagaattagaagacttagcaacacaagcaacaacaggaggttttgcatgcacaacattggattttgaagaagatgcattcaaggtagacatgataccagcagatttaaacacaattttggttagaatcaggtttaaccaaaatctcaccacttcaagcaccaacacctaacacaacaggaggatgtctagaattatgagcataaggattaaaacctaaaccacgattatttgtgctaaccttagattcatctaaaatcatgttgaggttctttttaccatcagaaaatcttagcaaataatttttcaaataagaaacctctttttccaaattagcacaatttttacaatctaccatgacacctttgcttttacgacacttggggcaagaaatcacttcattgtatttcacaacatcttccatgtactcaacacgacctaaagcatctttcaatttcatcttattcaaattatatgttgagcaatccaaaacatcatgaggttgttttaactttttagcacaaatcatgttaaacatcaaactagcatgaaaagcaatttgatatttttgcaacaactttttagttaaaaacaactcatccaaagtgcgtgtgtgcaaagcaaaactaagagcaagaaaagatctatttttcaaatcatgtgcagcattaatatctctaatttttgaaatctcattcattaaaacctcacaacttttgcaatcatcatcattaggaataagagattttaatctagcaatttcagaattaagagattcaatgataaattcctgttttctatatatcttttcacacttcttattttttgcacttaaaatattaatagcttcctcaaaagcacttatctcattgttttcacactctgaatccgattcaccacatgccatgaagcaaacaccggagatgttctttcccttagcttcatctccactatcaccatctacgtcgcttagtggctcaaatgcggcgtagacttgatcaaaagccttattgagattctccataatcctccttcctttgaacgtacccttctgcttgttgtcgttggtcttctcaccatctttgtcttctcttttgcctctcccaagcttaggacaatgcgaacgaagatgatcaattgaaccacattcaaagcaacgatttggaccacctcttttcctgttcctggcattattcatagctcgagcaattctgttagcaaccaaagccaaatcctcctcctcgatctgtttgagttggtcatcggatgtggcattaaaaacagcaaaaaaaaagaagacttagatgaagaagcatcaacatccaaagaagaagaagaagaaaccaaagcactcgacttagaatcaactttacgagaaagaacgttcatctcatgtgttttcaattttgtgtaaagcgaatccaaagtcaaagtagacatattaacagactcctgaatagatgtaacattcatctcccaaatagacatgtcaagagcattcaaaaagtgacgagaaatctcatattgtggataattagcatcataagaagaatcaacagatctaagatcactcaaaattttattaaacctagaaagatagtcatccaaagcttctccaggtttcatctcaaatttagtgtactcctttttgaaaatatcacgacgaagttctttaatgttatttgttccttgatgaaagttactcaaagcattccaaatttcatgagcagtttgaaaatgcgcaacacgatcatcatccgaacgagaaatcccactcaaaagaatattgcgagctttgcaattttgttcaaactcagtttttgcagtagcagtattaattacttcaggaatcacataaggatgagaaacttttctccaaatatcataatcttcagccataatgtaagattgcatcctactacaccaatgagaaaaatccgttcaatcgaaaacatgaggcttagttgaaaacctaacaggagtagccatggcaaaaactctagatcgataaaaatccaaagaagaaaacaaggctctgataccacttgttggatcgaatcacaataactaagccaaccagaggggggtgaatggttggtatacccaaaaaccgaaaacttttagcggaaataaaagttaccctcgaaatcgacgaaagtcggtctgaccgagattgatctaccggtctgaccgtgtggatgccgccggtctgatcggtatagatcaaccggtctgaccgccgaagccgcctgccgcgcctgctgccgccaccggtctgaccgcctcgctcccgccggtctgaccgccgccttgccgtcagtctgaccgccggtgaatcgtcggttagaccaccgaaacccggtgaaacacaaaccgaagaactcttaaagtagatgacgactttattgattctctctgtgtttacaaagtgcaccaacagcactccttacaaaaatttcgactaaactcgaaaccctaactcaaaactcaactcaattgctctcaaaagcgataccgggaagcctcacgctccccctctatttatacccgaggtaggcagcctaaagccacgaaccaaactcatactagtagtcctaaacaccttaggaaacccctttgccaataaattccaaataacaaaaccaataatcttcgatgccaattgttcatcacagaataataatcaaaaacacctttgattttacagattcatgggctcgtccaccaggatatgatgcgctcctcgccgatgagctgcgcgcagcgactcgaattgatcctagagacggctactgcaccacaccatgtccattgcaatgcaagcttctctgcggccaaggaggaggacgaagaggacgcagtcatgtattgttgtactttgaaaaattcataactatttttttcacgaacacgtaaaaagattgcacgtcgatatattagaaggaaaaaatagtttttttacacaacacaaccaaccaaactggtctatgccaggggaaggaagaaaaagcaaaaccaacaactgtagctaggaaaagagactactgcggcggctaaacgcaactccgatcagtgggaggggggcagggccacactacactcccaagaaacctccaaatatagcaatgccagcggaaaaccatagacagccatcttataggataaactccagaaccacagacagccctcccaagaaaagttcaaaactatgacatcccatatatccatccacacataccaaaagtgctacataacatacacatctaacttaaacttaacaattaacggtttttacacccgaggaggcagatgtcaagatgagtttattcagaattaacattacaatatatatgtatgcgcgcatgcacgcatttactttttggaaggtaccttcaaatattagactccctctccttattaatattttggtgcttatatataacatgcatgattcggtcaaacatttaaaatttatacgaaacttcgggcatcagttctatattatcatgagtttataagaatgtaataagtttatgatatataatgatattctgcttgcttttttatttaaaaaagttaacatctaatcaacaatcaaaattttaaaagcttaataattcctgtattaattctcaaatatatattatcagctggactgctggagtagtaattaacttgccatcatagagattttcattcaagcaaaaagtttgattaaacattatcgcacgatgcttttagtttattaaatactgtacgtgttgttcttttctgtgaacgacgacttctatatatatgttgatgtgaccacaattaattagctggcaaacttttcttttcaaaaaaaaatccgacctagtgcaggcctatatgagggcagaacaaaattggctgtgtttagttcagcgcaaagtttggattttagttaaaattgtgatgaaaaaggactgaactttggatacaaactttagatctaaatacagccattatcacaaaggagaagaagcatcgacgactttctccgttccaaaaataagtttatttttcacacacacacagatatatatatatatatatatatgtatatatatatatatatgtatatatatatatatatatgtatgtatatatatatatatcacatcgtaaaatctaaacagtgcgcgctctcgttttagtctaatcgcgcgacgcacctctgaccgtccgatctcgttatctatttattttcggcttacgttatcgctttctccactagtacttggctgcagacagtctgacatacccacgtagcaggaaggattgagatagacatgtatgccttttttctctttaaataaagttttctctcaaattacttatccgaactataatttaattacaccattgtgttcgttacaataaaatcttcacaacaagatcttacatgattatattacgatgaaaaaatatttatatttgtaaattacttttattatatacgtaagttacttttatcatatatataagttacttttagattttactaaattacttcttagacatataaaagtaaatttaataaagtctaaaagtaatttatatatatatattataaaagtaacttaaaacaaaacggaagtaactttgtcacgacattagaagtaaattcattgtagtgataaaatatgaatttatatagaaaactttatttaattagtacagatcaacacacataagtttaacaaattttaaaagtaagttcaatgttaacttcaacacacataagatacatactattgcatttttcaagttgaaaggagacactagatggagtataaactagctacgactagctgtgtagtcatgtccaatgaaaaatgcaagcattaaagttactttcttttgttctaagttacttctataatatttgtaaattacctttagtctttgctgaatttacttttatatgtctaagaagtaacttagtgaaatctaaaagtaatttagatatatcataaaagtaatttgtgatttttcattaaaatataatcatgtgagatcttgttataaagatttaattattacgaatagaacggtgtaatcggatcgtagatcggataagtagtttaagagaaaattttatttgaagtataggtggatagagtctctcataaatgacaaaccagctaccattagctgtgtagtcatgttcatatcacatatataaatataataaaaaatacaatacccttactttattaaatcctaatataattattcatctttttatctattcttaatttatttatttatcatttttatcaatttcgatgtaataattactaaaataattattttgagacaaacgaaaaaaagctaaaaataaacttaattactccgtaaccaagggtgtacgtgagtgtacggaccccacacgtaaaattctagtactgcttatgcttgcgatcgactaaaagctagggagagacagcaccattaataaaaaatttgtgccaagtcactgtcacgataactattttggacaataaaaggccagtccgtattgcagccaacatggtactactgctactattatacatatataaaactatatactattatacataaaaatgcggtaacatttgtgacacatgtgtgtatactgtgtgagtacatatatataaatgcttgtgacagcgatgcctgccggggaggggtaaacagttaggggatacgtagcaagttagtatcccatatactggcacatatattcactttcatattttaattaacaggtggtctggcgaccgaggcatatacatataagaaaaaatatatgcggcaagggacaggtcactccaataacagagcaaattaaacaagtgaaactaaataacattattgaatagttagaacgagattgtatggcatatattatactcattatttgcagcttatgttgttcctctattttaaataggccaggaaaggtccagctggttgtggctccagcagcttcaacaagtagagctgcactacgaacaaaagtttcatgcttacgtttaattatgatgtactccctccgtttctcattctagcatttttcacattcatattgatgttaatgaatctagacatatatatctacctagattcataaacatcaatataaatatagaaaatgctagaatgacttacattgtgaaacggaggaagtaattgataataagacattaatctttatgttttctaaaacaaattctcgcaaaacagatgagtggttagagtttgaaacaaacaatatctgatgataaatattttaaaaaagagaaaatgatgtagttagaaaatgtcatattgtacaagttcaatctctgcaaagcattactcggagatattagttattagttataatgggcgtttttacaatattagttattttgctccacggcctcatcttttcgtttatgtttatacttatcagctaaaatttaaattttcaatattaaatttgaagttgattttgttttttttcatcaaagtttatttttcatcatttgcttttacaccgctaagaacacgtatataaaaaatttattcacaaattattttttgtttgcaaatatgccgaataaacgaaaggatgggtccgtcagttcttggccgaacccctatcgatcgaggagataatgggagataccccccgtgtgaatgcgtgatccaagatcatcaaatgccaaggaaaatgcaggatcgcatctgagaataaacgaggcacctgatatacgtgatgaacagacagctagctagctagctcctctgtaaagacttttcaatctagaatgattgccaataattaaattaatttgctgcaaggctcggaatctcttttagaatggacctacacaaacacacatcgatctagcctattatacagtccgtaacaaaataaattcatttttagataaacaaagttcactttactatcctctaactaccctgctttgtaaatcgataaattttatctctttattacccttgcctactctctctcatcaacactaccactctctcatcaaaactagtatcatttttactgataagaggtattttagacatccgtaccaaagtgcataacaaactggctgactctcgcattgcccctcccccttgggcgacaccggaggcgacgcccctgccgacgcacgttcccccctcctcccttctccgcctcgccgccgcctgagcggccaccgacaaagccgcgcagcgcaaggatggcggcggcggggcttcgtcttcgtgccacgctcgggcaaaggggggattgctcggggccgcacaaatcgcctagatctgtgcctcctggccagatctagaggcgaggccgaatggtggggcggtgactggcggtgctggcggcggtggttagaggtgtggcggcggcggaggagaccaccaaatccgagcctggatctggcggggtgggggccggcgacggcgtccattgacggcggcggcggtgcctggtggtggtggcggcgggcggccggatccggctggacggtggatggcctgcggtggttgggttcggccgcggcgacgagttgcaggtgacggcgtcagcggcagaggcgcgagaggctgcgatcggcggcggcaagcgcactagcgcggacgcatagaggccgtgacggcagcggaggctcgggaggccacgatagcaggcgcgacagcagcacgtgcctagacggtggcaagtgcagtgactgtggctggcacgacgatggtagctagcacggcggagtggccagtagctgtgtggtgcgaggagggcgacgaggccggtcggcgcgcggtggctgcgcaacgggaggtaaggccggtggaggctagctaggccgaatggtggggcggcggtgactggcggtgctggtggcggcggttggaggtgtggcggcggaggaggagaccgccaaatccaagcctggatctggtggggtgggggccggcgacggcgtccattgacggcggcggcggcgcctggtggtggcggcggcgggcagccggatccggccggacggtggatggcctgtggtggttgggttcggccgcggcggcgagttgcgggcggcggcgtcagatgcagaggcacgataggctgcggtcggcggtggcaagcgcaacagcgcggacgcatagaggccgtgacggcggcggaggcttgggaggccacgacagcaggcgcgacggcggcgcgtgcctggccggtggcaagtgcggtgactgtggatggcacgacgatggcagctagcacggcagagtggccagcagctgtggggtgcgaggagggcgacgaggccggttggtgtgcggtggctgcgcagcgggaggtgaggccggtggaggctgagcccagtaaggtggcgcacgtgaagactggccggctgggggcaccggtgcggtggtgcccacacatcgacgtaggtttaaatggcggtggagcaacggtgcatttgtggtagatcggcaggtgaaaccccagcctggccttggccgggccagcaacgataacgttcaagcgtcattcccctcctgagggtgttgtcgtgctgtctcacccctcaagtgtggatgcagggcaaaagcccagtctcgattctctctctaagaccttgacggacggcggcggcggtgtttcgtcgcttctctccttagagacgtcgtctaggcacccccttgccgaaaccccccttgcaattggtgcaaacttgctctagattctcatcctcttgtattggcatcctagcttttacaagttggtcatgtcggagggcctaggggtagaggagttccatcttcactctcaccctctctccctaaatcctgaagacttggatagagtggggttttgttagttgtaagggtcgggttctgggcgatctcggcggtgttccgttgttggcctagcggcggccggtcctgtgctagccttctcctgggtttgtgtgttggcgttttcggtatgtgggtggtggtatacttttttcgttttcctggttacaaccttccagggttgtaatctcgtaactttttcctgctctatcaatagaacttcgcaccgtctagtgcgagttgtaaaaaaaaaggtattttagacattttcgttctatcttcattttttttctaagaattaaaagataaacttatttagaaacgagagagtaaattagctagagatcggtgagtgcagtaggcactatgcttgtgaaacaggtaacagggcacagagccgagatcggcaaattaactagctatacagcgtgggccggcccgcacgcacgcgtcgcgcgcgcggtgtcgatcgatcgatctccgtgtggccgggagcacgtacgcacgcaggcgcaggcgagcacagtggccgggacagcgacggccggcgccggagaagacgcagtgccacgacgttgacgcgcgagcagccgttggccacaaactcactcactgatcgatgcatgcacgcagccaatgggatcgaaatccaagctaattttagctcgatcgcgcgcgcgcgcgttgccgtccacgtaaaaaggtcgcgtcgcgtcgccggtgtggcgggccggggtggggcgcgtcagcttttggcgatggcgtgcgtgcgcgccagctgtgcggtggtacgatctagctgtggatggatccgccgacggcgacggcgcggggacgacgacgacgacgcgggccggccgctggtcgctgtctccatcgatctagcgagtagcgctcgcgcgtgagttggacgctgcatgcaaatgtgcaatgcattcacctggtcatcccatccatgcgtacgtgttcccccaccacatgacaacacttgctactaatttttccaacaacgactatttgcttgacattatacaccgcacacgctcaggggcggatcccattaggcagggtacgtggatcgaccgatccagctacgacccgtgtcactctatactcccaatacctcctaccatttatagtagtcatgggccatcaaaattaggtatagtaaggtgtgaacacccaacagattagtccgtatcttaacaacgcacgcacaccgcaaacaatgatcgaggcaattatgcgattgaactataaatacgatatgtattgtgttcgattgttcttatcgagtgatcatctctgttttccgccccatctatattttaaagttacgtcgtcactgacacgctggttagcgtgccatcttaatacacgcttaggtgtgtatgagagaagtcaaaagtagaaatataagaagatatgcaaaacgagatgagtcataaacacatttgagtattaatgatcccaaactattttttttttaacgcaccgcataattttttttaaaaaaaaatgcatcgtttagctgttcaaaaaatgtgcatgtgaagcacgagtaagttttcctcttaatctcactggtggagagatgatttttactcctgattggaaaccccctatagtcccggttttccaaccgggagtaagaatccgagactaaatatcgctatctttagtcccggtttaaatgcccgtgactaaagatttagtaaagttttttcccatttttttctatttttttctattttgtatatctcactcccattatcttaaatcattcacagcaatatagtcatcccaaatcattcacaataacagttcatcccaaatcattcacagcaatcatcccaaatcattcacagcaatatagtttattctcaaaatcattcacaacaataacacagatcgaatcatgcattaagaaaaaaagaaataaaaattccgcagcagcgccggcctccacccgctgctgctgcaccggcctccgtgccggccgccaccgggcgcggccctccacgcgaggccgccgcccccttcggatccggcgacggccggccgcctcctctcccagatccgccacgcgaggccgcctctgctgccacccggctgctaccgtgcgaggccgccgccgccaccgccacccggccttctgagaatgggaaggagagaggaggaggagatgaggaagaggaagagaatgaggagaggaggaggaagaggaagagttaggggtgaagaggaggaagagataatggtgagggaggaggagatagaacttattaactaatcctgctttctcctcctcgatcttgcgcacgcctcgtcctctccgccgcacatgctgattttttttcccggttggtgttaccaaccgggattagaaatagatatttagtatcgggactaaagataatagagggtctaacaccgcctgctgtttttttgaaccaggactaaaaatgatctttagtcctgataggtgttcccaaccgggactaaagataaaaaagtagctctaaccttttgaaccgggactaaagatatctttagtcccggtttttattgcaaccaggacaattatgtaatttggtcgaccgatcaaaagatggtttctccagtagtgtctgatgctaccaaacgtcaccaagaaaactttccctcatagttagcacccaacgaaactggatttccattgctctctagtcttggcggttattaattaacagttggtcgataaaatatattgtcttcccggtttagtttgatgttatccttgatggtttatggttgcgaagaaaattctggtttattgtagggacttcccggccctagcttattactactaaccaaatactcctccgtattttaatgtatgacaccgttgacttttcgaccaacgtttgatcattcgttttattcaaaatttttgtgtaaatatgaaagtatttatatcatgcttaaagaacatttgatgatgaatcgagtcacaataaaataaatgataatttataaattttttgaataagacaaatggtcaaacgttggataaaaagtcaatgacgtcatatattaaaatattaaaatatagagatagtatatagtacgtacttccagctcgatttggttcttttccaccacctgacaagcaagcaataggcatgcatgcataatttagatcatccaatctgtgacggtatttgtcagcttcctagctacatgtatggtccattataatgcatgtctactgtgtacgtggcaggcgccctgaactgaacccatataatttgagtgagctatatataggctatatctactgaagtttaagtcacatggaaccaaagacagctggtctagctagctgcaatatgcagctaggatatgttgtttgaagctaagtgctttcctttcaatatcctgcagtacttgcaaattactgtggtacggttttgtacttctcttgctgatctgaatgaatgaggagttgccatggctttacttacattattggtaatttactacagctggccgatctatcaatctaaagtcttcaaaccaactgggaagtgaagcgctcacagaattttgtgctgccgtggccatcgcggggtcacaacgcgtggacgcgcacttgagagcgggtggatttcgcggcctctcgtgagtccgcgtcggccctcctatactacgtacctccatattttaatatataaccaacgtcataaaaaaaatcggagaaagtactatatactctttttattcaaaataagttactaatacggatgtgacacgtctcgatacaacggctactattcaaatttgtaatattgtgatatgttacctctcataataaattaatttattttagaacagaaggagtataatggacaacctgctagctggctattgctgtatcagtggacatgctcgcagcacaatattctacctttaatcatgcatagacgaatgggataagattctcaacggttaaatcatccatatgtgctgatcattagttgtagctagctatgctgctatacagtcacagccattacatactactagtacagaaactatcataggttctggttgggaaccagttataggtgtcagttttctaactgacacctattggtcggcaccaatataagcaaccggcatctataggttcgtacgagcaagaaaacgagctagctcgaattgagccgatctcacaatcgccatcaccgtgccatgcccatatcgagttgctcccgacattcccaaatccccacatatcgcagatcacagatcgcattaacatactcaacaacaaaatcattcacaaattcacataaacattaaaattctacaaaatcatccacaaaaatccctcgggcgccgcctcctgctgcctctcctcgagcgcctcctgcccgccctggctgcccaacgcctccctttctcaccggatcaagcggaggggagggcgcggccacagccgctaccgtccccgaggtctgccgcctcctctctggccggatcttgcggagaggagggtgcggctgctgccgctgctgcctctgccgggccgctgaagcatctaggtccccgttgttaattttgataattaatgacaaacgctaattgtggactaaccgttgctattgagataatattttaagttaggtccacgtcagtgtgcgcatggatgactatcgatggattaaaattgacggcgcaaagcaaagagaaagaagacggtaaaactagtgctttaatttagaattgatcgaggtgtagggcgatcaaatttgctagtttactttttagtttcgccgtactattaagaggggtaataaccttgcaaagagatgattttaattgccgtattaggtcattatgcatttagacttgtgctcgtttttcatcacacacacacaatcacttaggatttcactggtttcggcctgaccagtggcggtctgaccggcaagacggcggtctgaccggcgcataaggccggtcagagcggcggcacatgagcgggcataccggccccttggaggccgcgatggtgctgctcgggatggccgatacagagccgacggagccgtatttggccagaccgaaccgatggcggtctaaccgagccgaggccggtctgaccgcccactcaacgccggtctgaccggccagtccgatggggccctctgacagcactacaacggctagttttctagccgttgcagagtagcacggtctgaccggccacatacctaggattgctaaacattaacataggagtgtgatttactttcctagagatataattgagccactatcaccctagatttgcaaaacataacttagttgcttagttagagttcaccctcaccaagcctagcaacttaggttagttttgattaggtgtcatttagttttaaatagcctattcacccccctctagtcgacatctcgatcctacaagtggtatcagagcttggtctctcttgattgggcttcaccgcctagagagaagatgtcgaacgaggtgaaccatgtagggaaggctcccatgtttaatggcacaaactactctacttggaaaattaaaatgtctactcacctcaaagctatgagcttccatatttggagtattgtggatgtagactttgctatcaccggcacgcccttgacggagattgatcaccgcaacctccaactcaatgcccaagccatgaatgctttgttcaactctttgagtcaagaggagttcgatagagtgagcaaccttgagaccgcatatgagatttggaacaagttggcggagatccatgagggcacaagcgagtacaaggatgccaagcttcatttcctcaagatccaatatgagacattctccatgttgcctcatgagagtgtgaatgacatgtatgggaggctcaatgtcattgtgaatgatctcaaggggcttggggcaaactacactgatcttgaggttgcccaaaagatgcttagggctctaccggagaagtatgagacccttgtcaccatgctcatcaactccgacatgtcaaggatgacacccgcaagcctcttggggaagatcaacaccaatgacatgtacaagttgaagaagaaggagatggaggaagcctcaccttccaagaagtgcattgctctccaagccgaagttgaagataagggcaagggcaaggtgaatgaagtcaatgaggacttggaggaagagatagcccttcttgatagaaggttcaatgatctcttgggaaggagaaaggagagaggaaggggctccaactcaaataggagaagaaataaaagacccaacaagactctctccaacttgaagtgctttgagtgtggtgagaagggacactttgcttccaagtgctcttccaaggatgatgatggagacaagtcatccaagaaaaagagtggaggctacaagctcatgaagaagctcaagaaggaaggcaagaagattgaggcattcatcggggaatgggactcaaatgaggagagctccgcttcatccgggtccgaggaagaaggtggtgatgatgcaagctccaagaagaagaagatggccgttgttgccatcaaggaggctccatcattgttcgctccaatttgtctcatggcaaagggctcctctaaggtaacatctcttagtgatagtgagagtgatgatgattgtgatgatgtttcctatgatgagcttgtgagtatgtttgaggagttccatgcttatagtgaaaaggagattgtcaacttcaaggccctaaagaaggatcatgcttctttagagatcttgtatgaggagctaaagacctctcatgagagactcaccatttctcatgagaagcttaagaaagctcatgaaaacctccttttcactactcaacatggagctctcattgatgttggcatatcttgtgatttgcttgatgatagtgctacttgccatattgctcatgttgcatcatctagcatttctacctcttgtgatgatcctgtggatatgcctagctctagctctagctcttgtatttctatttatgatgcctcacttgttgttgagaacaatgagcttaaggagcaagtggccaagctcaacaagagtttggagaggtgcttcaagggtaagaacactcttgacaagattttgagtgagcaacggtgcatccttaacaaggagtgacttggattcattccaaagaagggtaagaaaccttctcaccgtgccattcgttttgtcaagtgccgtaaggttgggcatttggtgaatgattgccccggtggtaagccttctaaaacatgcatgtttgattctcattatatgcttaggacggctcataatggtagcattgttgctagatatgtgggttcccctatactcagtggtaaaaagaatgtcatttgggtgcccaaagctttggtctctaacctccaaggacccaaacaagtttgggtacctaaaagagcttgatcttcttttgtaggtgaactaccgcactggtggaagccattgggtgcttgatagtggatgcactcaacacatgaccggtgatagagctatgttcaccacatttgaagaaggagggaaagaacaagaaaaagtgacatttggagacaatagtaaaggaaaggtaattgggttaggtaaaattgctatttccaatgatttgtcaattgataatgtctctcttgttaaatctctaaatttcaatttgctttcggttgctcaaatttgtgatcttggcttgtcatgtgctttcttcctgcaagaggttattgtttctagtcttcttgacaagtcttgtgtgttcaaaggttttagatatggaaatctttatttggttgatttcaattctagtgaagcaaatttgaaaacttgtttagttgcaaaaacttcattgggttggctttggcataggaggctagcccatgttggcatgaatcaattgagcaaactttcaaaacgtgatctagttgtgggcttgaaagatgtgaagtttgagaaagataagctttgtagtgcttgtcaagccggcaagcaagttgcatgttctcatcctactaaaagtatcatgtccacatctataccattggagctcttgcatatggatttgtttggcccaacaacctataagagcattggtggtaatagtcattgtcttgtgattgttgatgattattctcgctatacttgggtgttctttttgcatgataagtctattgttgctgagcttttcaaaaagtttgcaaaaagggcccaaaatgaatttagttgcactcttgtgaaaattagaagtgacaatggttccgagtttaagaataccaatatcgaggactattgtgatgatcttggtattaaacacgaactttccgctacctactcaactcaacaaaatggtgtagtgtagaggaaaaatcgtacattgattgatatggcaaggactttgcttgatgaatatggtgtttccgattccttttgggcggaagccataaacaccgcttgccatgcaaccaataggctttatttgcatcgtctcttgaaaaagacttcctatgagctaattgttgggaggaagccaaatgttgcctattttttgagtttttggttgcaagtgttatatttatcgaaagggtgttagattaaccaaatttgaaagtcggtgtgatgaagggtttcttataggttatgcttcaaatagcaaggcataccgggtctacaacaagaacaaaggtattgtggaagaaaccgccgatgttcaatttgatgagactaatggctcctaagaggggtacgagaatttggatgatgtaggtgatgaaggcttgatgagagctatgaagaacatgtcaattggagatgtcaagcctattgaagtggaagacaagccatccacctccactcaagatgagccatctacttccgctacgccaagtcaagctcaagttgaagtggaggaggagaaggcacaagatccacctatgccaccgaggatacacaccgctctttccaaggatcacccaattgaccaagtgttgggcgacattagtaagggtgttcaaactcgatctcgtgtcgcttcgatttgtgaacattactcgtttgtttcttgtcttgagccaaaacatatagatgaagctctttgtgatccggattggatgaatgctatgcatgaagagctcaacaattttgcaagaaacaaggtgtggactttggttgaaagacctagaaaccacaatgtcatagggacaaagtgggtctttaggaacaaacaagatgagaacgggttggtggtgagaaacaaggcaagattggtggcacaaggttttacacaagttgaaggtttggactttggtgaaacttttgcccccgtggcaagacttgaggttattcgcatccttcttgcatttgcatcatgctttgatataaaactatttcaaatggatgtgaaaagtgcttttctaaatggtaaaattgccgaacttgtctttgttgaacaacctcccggttttgaagatcctaaaaatcctaaccatgtttataaactctcaaaagctctttatggtttaaaacaagctccttgggcttggtatgaaagattgagagattttcttttgtcaaaggatttcaaaattggaaaagttgacaccacccttttcacaaaaatcattggtgatgatttctttgtgtgtcaaatttatgttgatgacatcatattcggttctactaatgaggtattttgcaaggaatttggtgatatgatatctagggaatttgagatgtccacgattggagagttgagcttcttccttggacttcaaatcaagcaactcaaggatgggacgttcgtgagccaaaccaagtacatcaaggatctactcaagaggtctggcttggaggatgcgaagcccatcaagacacctatggcaaccaacgggcatctcgaccttaatgagggaggtaaaccggtagatttaaagctttatcgttctatgattggtagcttgctttaccttaccgcatctaggccggatatcatgtttagtgtttgcatgtgtgcaaggtttcaaaccgctcctaaggagtgtcacttagtggccgtgaaaagaattctaagatatttaaagcattcctctactattggcttgtggtacccaaaaggtgctaagtttaagcttgttggctattccgattcgaattatgccattgcaaagtggatagaaagagcacatccggtagttgccaaatgcttggtagatcctttgtgtcatggtcatccaagaaacaaaactccgtagccctctctaccgccgaggcggaatatgtttcggcgggtagttgttgtgcccaattgctttggatgaaacaaatattgttggactatggcatatccttcaccaaaaccccactcctatgtgacaatgatagtgccataaagatagccaataacccggtccaacattctagaaccaagcatattgacatacgccatcacttcctaagagaccatgtagccaagtgtgacatagtcattagccacataagaaccgaggatcaactagccaacatctttaccaagcctcttgatgaaacccgcttttgcaaattgaggaatgagttaaatgtcatagatttctctaatgtggcttgagatggtgcaccatggttgtttctttttgcattatgtatatttgctctcatttgctcttatgctttggatttgttgccatttggttcttcattgcgaaaatggagcatgtcacattaagggggacttttgtactcttgcatgtgctctacttccctttatatgtgagcaaatcaactagtggtgctagtagtatttccaaaaatgcccaagtcaacataagtcaaaacttttgcaaaatcaatgtaatttgaaaactatctcttggaaaatgtttcaaaaggtttcctatatgttttccacacctcacattgcaagaaaaatgatttttgaatgaaaatcccattttggccctcttttgaagaaactagattcttagttttggccaaaatgagattgagaaggagtttgagaaaagtttcaaaacaaagttagtagagaagaagatttgaaatgtttttggtattcaaacctatttcaaaaaccaaatcattcaaaagttatttgaaaatcaaattcgcccaaaaacccctatagaccataaaaggtcacctcctagcactcaagtgagttttgttacaaatcttcataattttcaaatgttatgaatggttggcaatatttaaactcacacatttcaaaatatgctccaaaagtcaatttttttatcgaatttcattatgtgggggttgtcggcctgtgcaagggctgtgcacagccggcaggtggcctggcggtttgaccggcgctatatgcgcggtctgaccggccaggtttggcggtctaacaggccacatagggccggtctgaccagccgaggtgggcccagggaatttttattccccctcttcttctacccccacctacctctctcctcctcatcctctcacttccccaactcgattttttcttcctctctctcacctcccctcaaaccctaactccttcctccatcaaatccattcaatttgaccacggatttcattctggttacaccgtaagtgattctcctccgcttcctctctctattccatggattagtttgtgtttttgttgagtttttgatccatggcatggaaccctaggtgaagcacgaggtgttcttcaatttgcaccaatagagggtagtttcttggtgtgattcaactcctccaactggtaaatccctctccctcttgtgcattctctcaaatcgatctatttcaccctagggctatgggtagttgttccaatcttgatgaaataggtccaaccctttgatgttctagttccactcttgtgcaatattgttctagcaatttttagactcaaatgagtagatgtgaaaatttttggatgcttgaacttgtgggaggaggtctacctggagccacaggcggtctgaccgtgggtcagccgccggtctgaccggcgagtgcgcccggtctgaccggctggcaaccgtctgaccggcctgatgccgtcagacgccctgctggctgtggtctgaccacccctccataggatatagtcaaattttcacctctccaaattgtttctagaattattgctaatatctatcatcctttactctttgacagtgatgcctccccgcacttgccatggtcgtcgtgcacccactccggatgccgtgagtgagcctgaggaatcgagcggagatgattatgctcaaagtgatgaagaggttgaggcaaatgttgagggggctagtgaggaggctagtggagatgataacagtggaagtggagaggatgaggatgaaggaagtgataatatgcacattgatccctccatccagtttgttgtgaacatgaggaatccatcgcagtataccatcttgaggcaccatgatcagtttttgaggcctcgggacaccccggatccccgttttcacaccgctttccagaagtctgtgtatgagcaggtttatgcagggaaagcatttgcagagcataagtggatttcttggagagacataaatgagactccagagtttgagggattgtaggatctcttcaagactgttggcattgactggattgtgaccctcaagcaagactacaatgaagatttgatccggcagttttatgttacagtgtgggtggctggggactatagtgagatgaagtggatgtccgacaccctccactgttctatctctaggaggcaattccggcggctcctcaatattcgcttggactttggagatgacttgcatgagaagcacacccataatctgctctccatagactatctctctcagttttatgaagatggagtgcggtacacacatgggaaggttgccggcttgaggactatccccagtgtggttaacaggattgtgagagctaccatcctccctcgccttggcaacaatgatgacattaggggggtggcttggcacgtcatcgatgcaatcattcagggccgtcagttcgacattgtgtctctcatgatgcaagagattgccatctccaaggggaccttcactcagggaatctattatgccccttacatcatgaggttgattcaagacaagcttggggctgctgggcaaaatttgaagaagcacaagcagtacaagccccgccttcagcttggagctccctgtgctcctagggcggcgccctcctctcatcctggagctagctcaagctcagcacctcttcctcctcctcctcctgggtatgatccaaatactttcttccatccacagtatgcttattttggaatgcaacccaacgagtacttcaacccggtacttggagctattaataccctaagtgaaagcattcaacgcttgtctaccgggcatgaagctttgcatgaggatgttcgtggcttgcgcaccgatgttggagacttgaatgcttccgtggggagattgcacactagagtgggtacattagattctcgagtccaaatgttggagagctcccaagcatttgtgtatcatcgtagtcatgatgctccttatccttccactttggtgcgtcctccttctcctccacaagagtgaagacatttttggtgcttaatgccaaaagggggataaaagtgtgctttatgttttgtgggttgggactagtagtagtgaggatagtgccctcatatctaataggttaaggtggtttgggctatattttgtatgggtatgggctattactctatattgtgtgttctttgtcgttttgttaaactctatgtcatttggaccctttgtggtcttgtaatagcctatgtttatttgtgagcccttttaggatgatttgtgacttttgtgatttgattggttaagtgatgtgaacttgtgcgatgatggatggtgtatgcgatattgatatatatgtgaccatcttatgcttatggatgaatatttcttgaagtttacattgagatattgcttatgtgtttgtgcttattggaatgtgaaattgaaatgtgcattggctccatatttgttgtctatgattgatatgcacatgtttacggggagcttttgatttccattgcaatatatatatatatatatatatatatatatatatatatatatatttgtggtgtttgtcatcaattaccaaaaacggggagattgaagcatctaggtccccgttgttaattttggtaattaatgacaaacgctaattgtggactagtgctttaatttagaattgatcgaggtgtagggcgatcaaatttgctagtttactttttagtttcgccgtactattaagaggggtaatgacctagcaaagagatgattttaattgccacattaggtcattatgcatttagacttgtgctcacttttcatcacacacacacaatcacttgggatttcactggtttcggcctgaccagtggcggtctgaccagcaagacggcggtctgaccagcgcataaggccggtctgaccggcggcacatgagcggtcagaccggccccctggaggccgggatggtgctgctcgggatggccgatacagagccgacggagctgtattcggtcagaccgagccgatggggtctgaccgcccactcaacgccggtctgaccggccagtccgatggggccctctgacagcgctacaacggctagttttctagccattgcagagtagcacggtctgaccggccacatacctccggtcagaccagcagagcacaaagttgggggattttgcccccaacggctagttttggttggtgggagtataaatactccccctccagcagcaagggggctctcttggtacccaatttaattgcatacaccccttgcacctctatcacacccacttgaactttgtgttcatccatctagtgtgttagaaggttaattagccaagagtcaagtgctttgcttccatttgtagagctagtgtggcacttgattgatcatctccacgccgggtcattgcttgttactcttggaggttgccgcctcctagacgacttgtggaggagttgcccggtgacctctccgagaagattgtggaggaggcccggcgccagtttgtgagtggtttggagttcaccaccttcggagtgaaggaagaactaccctagtgatcgaggcttgggtagtcctctccataagccggctcccgccttgcccaccccttgacgaagggggcgtgcggtggcttcgtgattgagcggtggagttgggctcaccttaacgggaagtaggaaaccgacgagtttccgaacctcggtgaaaaatctcttgtctccttgtctcatttgattgtcgcatttacatttgtgcaatttacatttctagagacatacttgagatcatatcaccctaggattgctcaacattgacataggagtgtgatttactttcctagagatataattgagccactatcaccctaggtttgcaaaacataacttagttgcttagttagaattcaccctcaccaagcctagcaacttaagttagttttgattaggtgtcatttagttttaaatcgcctattcaccccccctagtcgacatctcgatcctacagccaccgccgagacaggcgagagagtgcgagggagagaggcaagagagaaagagagaaggagagagagagagatgtagagacggagagagcaagagggtttgagaagatatggacggaaagacaaagagagcgagatggtttgagaagataaggacagagacgatcggcttgccagctcggctcgcctcgatataggtgccggtttttttaaatgaccaacacctattgtataggtgccggtttttctttagaaccggcacctatagttgtttaaaggtgctggttttatgtgtgcttttagtctgcggagaaaggaacaatattataggtatcggttttaactgttgcatcacctatagtggcaatctgtatgagctttgtttaagtagtgtacggagaataaacagccatatatataaaatgactctttcaagtaaataaatgagcatcgccatcgtcctacaattgatgtttgcgtaaaatggcacacacgccgtccggtttcaacagcctaggatgcccctaataaacagaaaatgaattaagctactcggtacagagacttaattataattaattaggtgtatgtataattgttggaatgaagccatcatatatatcgatcctaagctatagctgcagattaattattgaatagctagctctacttgtttttgagaggcggcttgagcttagctagctttgctaaattgatcattaattgagaggcttgaacttagctagctttgctaaattgatcattaactcaaacttgaagaaaactagcttctctctatctcagaatataaaaatttctagcatttaaaatttgtcacaaaaatatatataggaactctgttacacacttctcatatcaagcaatcacaactatctgatatcatttcatttctcttcgtctttcttaacttaaccaatcataattgaacatcacctacttataatttcatctcttttattaatctctataaagaaaaccttaaaacctagataaaaagaactatatatatagatatgtttatattttgagatctatatgtctatattttgagactgaaggagtatacgatagctaatacaggtaatattgatatggggaattttgtcaaggcgggtcagggtcacagcccgtgcgtcgcgtcatcagaaaaggggcagggcccgggcattgccaggccaccacctgaaggccatcagccaacacccagtactatccagctatagcgttgtatagcctcttcttgcatgatcaatcaaaatctaatggatgcaagctagatgtcacagttagggcactgtcgccacaatgtcctctcttggagggcatatacatgcactaattattattaattcttggaataactagtctggatcaccatgattataactccctgttaaatcctgacgcgacagccagatgaacagtgtgactaattgtgtgcatatggattagtagttaatttgattaattctgcagccaaattgacctgtgtttatgttgatgatgatgatgattatgatgatgatagcaactgcagatgaattcgcactctcgttcgtacgtacgttcaaaaactacgtcccaactaatgctagctgatgatgaattagtctctccgggctccattgatctttcttgtgtgtttgattgatcatgttgactgcagaaaagtattggagctttgctgtatgttcgttgttgctgtacgtgtgctaatataattaggctattagcagtagtttttgtgtactgattctctagagctgtagcgatcactgatggtgaagtagtcggttgttgcgatattcttacctgtccttttttgacattttcttcccttccagtacatgtacatgtaacagtctctcgtattaattgtgcactacctccagtgaaaaatatttgacgccaaatatatgctccctccattttcaattataagggcccctttgaatcgcaggattaagaaaacgtaataatagaaaaatgtacaatattgatataaatgtaggtgtaaaatagaggattgcaaaacacaggaatgacggtttgattggaccgcaggaaaaacacaggaattagaggagagataaagactcaaagaaaagtttctattaggtagaacctcatgttagttttcctacaaaatttacatggcattaggtattccatagaagttttataggattcattcctttgattcaaaggaatatataagaaaattcttgtaggaataaaatcctctaaaatttctatgaatcaaagggggcctaaaacgcgtatgcatgtatgtatgtaattaattagcacatctcatatcttatatgtcaaaaaattagcgcatcccatatcctttagtttgtattttaaatcatatattctcaagatctctaattttattggattcgcgcatgcattatatttactagaattacataaacgaaaagatgatgataattattttttggttttttagttacaccgtattactccgtactacattttagaatagatggtatagtgattagtgatttgtcataatagtaataatatcatatgtgtatatgcgcaaattttagtgattggagtaatgatttgaattgtacgagtatatcagtgttataatttgatggtggtgaatagtataattagttttgttggtgaagtaattattacaagagaatgggcggctataattgttgggagggagacacgtgtataagttagaacaggcagcagacagcggtctctgtcgagcgtcgcgacaacggggcaataacttggaaagcgattgtcggcatcacctacgggcgccacgtggacagcatcactcgaatgtgggcccagcgccgtttcacaccacgaacatcagtatacgatctcaccggtttccaaacgtactccccctttttcttggtggagattaaagagatagctaaagttaaatagtgatggtttgtgtttggtttaaatgaaatactactagttgatagagaaattaaataaaaaatgattatcattggttgagttagaaaggaaaaatatgtagtacatatcccattgaatctaggaataaaatttttactcttagatttgaaaatgattacaaatggttgagataggaagaaaaatatgtagtgcaaaacacatgtacactaaaaatctagaaactaccatttaatctgggagtacaatttttactcttgttgatgtggaagcttccatttctagatccaacagtaatttctaggttttcacagatagaaaagtagatagagagattgctactctgcagtagagaagggtgtgataccattttttttattttttatgtacttttatccttatattaaaaaaacacgtacacataaaagtatgctctgcatgttagcaatgtttgtgtgcatatatatatatacaactgtacattttttatgaatcataaattaattgtctaaaatttatatcatcaaatctaaaatatggatatcaatagtgtgacgtatatacacatgcttctttatagaggtcatatttttatcggaagtcgaagacatatattagtattgcaaagaaagaactcatatgccattaattaagctatatctggtaattaaacccatgcaatgcatgctcagtaaacaagactcgagtggggactacggagtggctcgttttcagatctgacagaagagatgatgaaatgatcagaaaacgtcgagcattctaattaagagggctagccgtcaaacctagctacaacttaaaaatacgatatttgtgaaataaatcatcaagctaaaagtatggtcagcaaatattaatcggcactaattactccttttgacaaaaaaaaagaaaaaaaagaaaagaggaacatatcaaccaaaaggaaagtaactttgctgcatgatggctatatataattcgtgcagccataaagaggagcaaaagatctaggtctctgcaggcatgtcgtcgttcttagcttctttgtcttcttcctcgtgcggtgtagctctagatcaaactatgcaattaatcccagtcctgtaattaaaattcatgcaagatttggtgaaatttgtggagaacaaaatcgataatcctagctactagttgcgccgtcattatcgcattgcaacgtataactgtcttgtgatatgtccacgcaatgactagtacactgctccctcctgatctcctctgaattaaaaaaagagatgatgatatgatgatgatagaacagaaaaataaacagtgctagcgctgagctgctatatatctgacttttcttcgttctaatgatgatgagtcatcgtgacaacgcccctcttgtttaatcgaaaattaatcaatgactcgatatcgaatctgcgattaagaataatgtcaatgcgccgatcgaatcggatgctgtttcttgtgccctacttttgggcaaagcaattaaatatatatctgatattaaccggttaattaatttactcgattatactattagagaagccatgatcttatatttagccgtcgtacctaccaatactaaaagcagacaagaattcaagacgtcgtccaaccacagctctgcaacggctgcacagagacaagactcttgcatacattgctttctttgtttagggcaagagggcgccgccatttgcatggagtagttagggttaattagttccatatactccagtatcgcgaaagctacgtacgtacttcaagtactatatataataaattaattggtacgtatatacttgctaagtgagttttggaatcaaataaattaatgcaaaatttcattgtacatgcaaaatatctgcagaatttttatatgggattgatcttaaggtggattgggcatttaataaacaatatgcatattttgtagatacataattatgcaagggcacattcagtggctataatgaatttaatatccgttgtgctaaagagcgcacctcgcagtaacccactcgactcgctcccctccccttccctcttatgtataaaaggttaatcccacgtctcgcctttacattggttttgtcgctaggatgtccatcagtctcctcccgtcccctcccccctctctccacttgatgaaaaaaattatcctcatctctcaaagaattgaaaagatcttgcaagtaacttttttccaatgctagcttcctctcatcttgatccattttttctaccataagtgatgtgaatttctttttttacataaagacaagggggatgggggtacgtgtggacgggatatcaggagagtgaggaagggggtggatggtacaggtggagaacctaccaacaaaattaatgtttgggtaaatgtgagtaatattttttttttacataaggagagaggggaaccagtctctttaccaaaagcagtgtggtgtggctccttttagcacgcactcgctccccctctctctctctctctctttatctctctctaagatataatagagtgagcaacaaaattgtccacggcaataaggaaatttgccacgtacatgtcgcaaaggtaacctttagctatattagacgaaatttacgttgaattgtacttcttttttttaactgaagcaattcacttaagttgtcatcacaagcgcactaattctgtgatggaggtgacattaataataaaatccagcgagagatgtgggtgacaaagtgcagagtggagacatgtagagacatggttctctttcagtaaaaaggtatacgtgttcaagtgactgaaagagcatgtcaatgtacaccttataaagtattgagctacgacatattgctttagtttttagctcatctatcacccaattcagtcaagtgtgatcgagagatcaaatgtttttcaaagaatcaaaaggtgctcgacctaataatggccgatatatatcatgttaattaatcccaaagggatcaaccaggcagctagcagcaagcctccgcgagcaagaatcggctttatttggtcattttattaacttgttaattaattaaacatgtttaggtgagggattaattaattaactaacgggaggagtggtgcaactatgctgtcattaattaatcaatctagggtaaattaatagcacactgacccatctcgtttagcctctgcttatctcacagcccttggagcgatgcgtctcccggccaaaattctattgcccgatcgatcgattcggatttcgccgaatctaatgatgtcaatcacgcaatgatttaattagcctaatctcgaaagccacttctccaccactcattttgttaattaatctctgggattatattagtaactagctgtagtggaaggtggcatcatatgcagcatgcaaagatttttattaactatatgtggaaggggtagatgattaatttttgtataaatgtagtaaacactttggtagcacagttaacgccttgctataataggagatgtacacatatatatatacacacacacacacacgatcgtcgcaatcattaaccattctaatacgtatacgtatctgtagtgtgcaggtcggccggaggaaaccgttaaacaaacattaacttttgaaaaattatttaatctgcttttgttctctttttgtttggaccttctccgtgcatggaaagtttgtgttctaaatgtagaagcttgctttggaccaatttgggttgatacaaaagtttcatatagtagcttttttgtagtacgtaggccaattgatcatgtgaaatttatttgatcatatatatctcttcctattttaattcaatttaataagcctataaatcccacataaaagcttccttacatttctacagctaggttgcctttataaaagagtacttactttccatatatactccaccttttgtacatcttgtttatatggtcaaatggatataataaatacatgcaactttccctattcttttattgattgtgtttttttatatggagtgcttgaaatttatcatacagcctataatataattcttgggaccaccaaaatcgccacataggtatacgataagttgtcttggtacatgtaagggtaaaaaaaaattttcacatatgggctatggtaaaagggtagaaataggaaaataactttttttcccaatggtatatgtcaaatttagccttacattattaatttgttttctcctttttttttcttatactgatcatcgtataagtttttctaccaaaaccaagaaagtctgattttcctatattttatttaatgagaatgtgatggagaaaaatcaagaagcatgcacactttaactttccccacgcacaagaaacgagagctttactgccccaagtgcatgcatacacttctggttatatgatgataatatatatgtaatggagggaataatatataagcgaaagtcgccatcaatatggaatggcatgtatgaggtgattttagtggacccaccaccaaagaactatattaggccacataacaaatttcaagagcttatttatagaaaaaaaaagaaaggtcgagtagtaaattgaccccagagcaaaactttagatgccatagatgccataaattgttactctccctctgaaagctcttctttgataggaaaaaaatttcataggaactacacattataatttccgtctaaatatacaatcatacatatatatttcatccgtttcacaatgtaagactttctagcatcatccatattcatatggatattaatgaatctaaatttatatgtgtgtctaaatttattaacatctatataaatatagacaacgctagaaagtcttatattattaaacggatgaagtaccttgtttctacgtacgattcaaacatggtatataagataaacatgtcgtcgtctgaacaacaaataaatattttgtctcgatgtcctcttggtagttgcacgccgaacgttctgcccatttttcagcgtaatcggatagaattgaaatccatatcttcgtctgcttctagcagctagcatcagcttgtccgtatgcttcagagagaggaaatatcatcgccgtccacaatataatgccgatcgaacactgtactaagatatatataaaaaattttgttgctgaggcaagaactagaccggtgtcgttgctggtccaacttggccaatggccatatatatatatatatatatatatatatagttttgcatatatatatatatatatatatatatatatatatatatatatatatatatatatatatatatatatatatatatatatagacacacacacacacaccccctagtaatagctggtcccatgtacatatatatgcttaattgggttagctcgagctaactggggtgccaaaatgaatgctagctctagtttaagtgcatgcttggtcaagatggataggggatcagatctagtttccctgtatgcgccccaccaaatcatcacggccattgatatgtcccctgcctctaattaatctgatccactccgttaaatatataaatatataaatatatatatatatatatatatatatatatatatatatatatatatatatatatgacgtatatatgttgttgattttatttggtcttgacactttgacttaattctatcaattgaggaggttttatccagatggctagaatacatgcagttaattttagttctgcagacaaacataagtgaaactattataacaagaagttttatggtgtttgtataaaaaggaataagaattcgactctccataataaaatgtttttaagtattgacagaaatttttaggtaagaaactaggaaaaaaagtaattttgctagtagatggacaagagcaagccggattgtctttgatattatttgatagtattaattagttttcccatcttcagtacgtgatagttatttatgtatctatatattatataatctgtgtgtgtttttttaggttatattgtgtccccaagaacatattgggttaagatatcttcatttcttttgtgttgttcccatcaacttgaactgattaactgctgcgcctaacctctaaattaacctgtggcgctggagtgactgagggaggagagagagagaggcggaggagaagaaaaaagaaagactatgttcgttttctattttcccctactgatatgcccatattattaatgattaattactccgctgtcatcggctataatagtttttattctgtatcttactcctctcttaatcaatggtacatattggttcacctctcaataaacaccgtaataatttatcgtgcaaaaaaaaaggtaatcaaactcagaatggggtgtgtgtactgaagaaccatgtcaatgtcctaaacacacatacacataaaaaggaacaggtggaaagtatgtatagattgattggatatacttagttaaatactaaagtcaatgcatgaaccacatgttcatatatattgtattgtacttaaagtatcatcaccatgtacaataataataatacaacgtaggagtgttggtacgtactcaacgatcagtaacatgcaaacacatcgcacttttgttaggtgaagagacagcaacgtggcagtgtgtgtatatatatattattacatgcatggtattgaccattggtgaacgtgcatgaattaagactacacggtcagtacatgcaaattgtagtagtagaaatgtatcaaatcatcaaaaaagctgcatacattgcgtaattaactgggtttaatttgttgaattttccgatcgatcgatgtgtcttcaacacatcaaatcaatgcagaatttcaaaaggaggatgcatggccagaagaaagaacaagatgatgagctcatcatcgaagtagtatatatgctttgatagctccaggtaagacattgtacgtatggcgccgtcgctgtcacacaaacaaaaggagaagagaaaaataaaaatttataagaaagaacacaagtctctttcgcgccactaagaaggcaaccattttttagggtttttttttttctaaaagatcgatcgagatgtcgaacacgaaaataaaacacacgtatatatcaatcggcatcgagtaatgaatttgctggcatcgatggatcggtcgatgttaattcagatttcagagtgagagtagtaggcagcatgtcaccatgcacatgcatccatccatcgatatatctatctacctagccattgggcccggttaattgcaaattaaggtgcgacgacgagaacgagtttatactacaagcaggctcctggttcaaaatttcagttctatcggacctcccctccacccccaacccccatattatattattttggtcaaaattttcaattttttaatttattgaatttggtaacattttgtttaagtttgacttttttttgaaaattcaaaaaaaattggatcgacgtttcaaaaattttggtatatcggcgtcgctgatagaaatgccgaaaatgaaatattgaaccagagcatgctagagttcagaaacactggttatgtagatatttttcaatcatagatagagctttaattagctgtatgattttatcatgattgtaataaatgcatggttttaaatctctaactatagataccgctatcttcggttatagctatttgaatagagatatagttatttgttcttgcatacaatttaaccgctatagctgctgctataactgtttgagaagaccaactgttaaataccttagcccgtcttttaaaacactgaataaatgtaatatatgtctgtctatatggtggtatttctttttctatcttatcgatggtctgttatgagttggctgaagttatctggacacatattgaaacaagtggctatagtctttttaagcaaatcaaataatatatattgttattaattatgttaaataaatctagctaggccatatgtgcatgcatcatcagagattcagaaacaatatttccttcgcctaattaataattagtcgtactctatataacttataagctgtactttttaatgaaaagatatcttgaatccatgcatgcataatgaagcatgttcaatttactaatccttacgattttacaatccaatcatcatgctgtcgaattcccaagaatcagcgatatagcgtatctcgtgaaagtgatatcgggggctccatttcttcgccttgttttgtccatttcttcctcctctgctgctggcatgcacgcttctcctttattttttttccatgcatatgatctcatgaacagggccatcttgtttgattcttccctttaaaactacaaaatgctttctccttttcatctttttgagttgacatattgtctaacctatagctacttttaataaacaaacaaattaacaccttctagaatgatgagttttttaactttaaagacagaaattaatcatgttctacacatatatagtactatatatatcacctgcttaattagtaactgatttaatcctgagtatatatacatgtggcagctgaggaaaagaagtaattaaataaattagcaacgaacctagctagtcggctagctctaggtaggtatatagggcgtatttttggatattttcttggcatgagccggctaggtttgctgctgtgtttgaatgaagaaaataggtctcgtcgaaatcagagtagggcccacccgtcggtactgcctccaaaaggccaagcaaaacttcaaacacgtcgtcatgcatgcatggagattaattatttgcaaggattaattttattaactcgatcgactgcagtatattgcatcatttcaaatgcataactaaaataatactccctccattttttaaatattttattgagaaacacaggacaaacataaatacataatcactcataagtcataacgcgcgcatacttataccctcattctttttatatgatgttggtttgttcaatagtactctctccgtttcaggttaattataagacgttttaattttaattaaagtcaaactatttcaagtttgactaagtttataaataaatatagtaatatttataatattaaattagtttcatcaaatcaataattaaatatattttcataataaatttgtaatgggttaaaaatgttactatttttttttataaatttggtcaatcataaaacagtttaattttaaccaaagtcaaaacatcttataacatgaaacggatgtagtataaaaaaacagattatatgatcgattgttttagactatgtgattagctgcaaaataattaatccacatcgactcgcgcaaatcaaacgcatgcatgggtcgatgaatgcagcaatgcagcatagtgctaagtgctaactacagttcgatcgatccagtcacgatgctgtgatggatatatgattgaaattattagttttcgatcgatgatcgatgcagcgagagccgtacggcctaactgatcgtgctgctcatgaatgaaaatgcattatgcagatgggagtcatggagagaggtatgggctccaaggaggatctgtcgagaggtcgatcgatcgccggcatgcagcttgattgatctgcaaaacattttctatctacccttggattcatgcatgcgtgatactatgatttaattcattacctcagctcaatatgatgcataaatataaccgttgttatactatggttgagttaaatttcagcaaaatagagagaaaaattcgaccaacttgtaataagtcattaggtggaacaattgttatacattatttttttttcttgtttttaagtagttttcttgctttgtaattaatccatgattttataattcatagctatccgtcatacaaactctgcagtaattagatatagcttctttaaagtaaatatcgaaatgaattcgatgatcttaaaaaaataaacagagtggtgactaattaatgtattaggccggtaataataattcaaacaaattgtttatactagagatttaaaacaatctaacctttatatgtctaagcatgtagctggccaattttaaacaaattggtaaaactaaatttctgacatttagaaatcatcatatggttaaacaagggagcacacatatagatatatacagaacgcaaaccacatggacatgacaaagattttaattggatatattattcgttacttcgaatggaattttatctgaaagttcagcatcggatagaattaagcccaataacatttgggctcttaatgctggtgaatcctgcagcagatgtagaacagccagatgtgtgtcaagcctagttggtgggccagaattgcaatcaccgaggcccataaccacatacatataggccggtacttgtctcaggcccagcccaatctgtgaggctgcaatcattccattttggaaaaagtacaccggaggtccttcaacttgtcatcgagttacaaaatcgtcccccaaccgcaaaaccggatatatgaccacccttaactcacgaaaccgttcactttaggtccttgggtggttttgaccccgggtttgtccgacgtggcagctgaatcagcgtgggacccatgtgggtcccacatgtcaggaggccacatcatcagtcatcaccctctctcctctttctttcccctcatctcgcccttcatcggttcctcctctttctcactcttctcagcggcggcgccggctgcgaggtaggaggaaggaggacgtcgacgtcggcggcggcaagacgcgggagaaggggagggcgtcgacgccgcgcgagtgaggtcgaggatggagaccacggcggcgaggtgagcgacctcacggcatcgtgcaagcacggcagtggcccggtggagttccgcggctgccaaagatgggcccgacgggtgtgcag

SEQ ID NO: 6440 - DNA, 7441 bp, Oryza sativa
aagcacctgttccgtgtagtaattgtgttctacttgcccaagtgctacaatcaatatcatattttggttgctggctttgatcatttgatccatcgtattagaggaatcccaagaactattaggattatattctatcctttccacaatacttgaaatttgattgattaatctggaaagttatttggcaaaaatatcaagcaggctataactagcactcttcgaggattgatggtgtcacatttttgttaactaccctgtgttatcttccaaaccttttcctaatggaacaaaaaactacaataattattttctgttcgtgaagtaggattctgaacaacatggttatctgtgtgcaactgcaataacactttgataaatccaatacacctttgtgatggtttctgatgccatgtcaggttgctgttgcgttggagaaggcagcattgtcagatgattattttgtcaagaggaagctgtatccaaatgtggatttttactctggcttaatatataggtacatcagtgggaaagctgtttttctcttttctctccttttgtcattgagtagctaattgtgattgtgttgattcagggcaatgggattccctacagagttcttccctgttctgtttgcaattcctcgcatggctggttggttagcacattggaaagagtcacttgatgatccagacactaagattatgaggcctcagcaggtcagtgataggcaaacaaatttgccatgtactattatgttcccttagtatgaactccaggtcaatcatgaattatgattactcctttttgagcaacttaacatttagattttcttgtcaatcaatattgagccagattggagccattgttattctgcacagtgactgcggtgatgggaaataaatagttatatgctcttttccttttgaatatcatttggtttggctagctcttctctgggctgcaaacaaggagcgtaggattttcttatgaccacggcatagttatatctttcactaacaaagtccagcagtattcttgatatattgactccttttatacattcatcacttgatactgtgctctctatctagacctttttgggtgtattctgaatgctggccaattaattcctatgtattatatatttgattcatgcgatacataattacagatatggtgttaatcagttagttgactagatatcttgatgatggcttcttctttcttcaggtatacactggtgtttggctgaggcattacacacctgtcagagaacgagtcccagcaagccagggcgaacagcttggtcagattgctacctctaacgcaacaaggcgtcggcgtgcaggttctgccctgtaagatagcttcaaggtacagcatccagcgtacaaaataaaagcaaagcttcatccctgtgctaacaagtctacatatctgcatgaatctgggagctgtaagtcttaagttgtcaagttcacgtatatatgggtaataaactaataatgccacaccagagagcactgaggcgtgcgttgtaatcgtgctcacccaatgtacattttctctttaacttgaattctcccaagcatggagaatgaaaggatatctctgggcagaaactatgaaaatgcaaaatttgaagaagattttccagttcagtcgatcatatcaatatgccatcaagtttattggttgcattacaggaggcaaacttgcatggtcaatttcttgctcgttcttgagaaatcagaaactgccggttgtttcagtggatggtgaatcttaactgttactgtctactataattgccgtttttgtcatgactcattaaccacatggttttaaattcttatctaatcacctcttttctctttcctttgttttaattcttgatttttgtgtagagatatttcttgtatgagaaatagtttcatctttttacctcttttctcattaactttcttgctatattagatttttgcttatgtgatagtggatttaatgttatgaacactagctgagattgagggttggggccttaagcccaagcacaaaatgcattgcatcattttcagttcaccattcgtcactaaactaatccttgtcaggttgtggcatgtcactgtctgcattggcctagatatttcacacgtaggaactatacacatgcgttgttctattgctagtcatgatggcattttttggtcagattattacttgtcttcattcatgtggaccttatcatcaagcttaggtagggcccttcactgcactgcctacctaagtgtctccatccttccattccttgctgcatgttgatcagaacggtttaaactgcaatcatgtgctcatgtgctggtgggtcatctcatttacatctccttttggagttcttcctctttgttaattgtggttggttcttgcatttacggctggtaagtttccatgttcatagcggtggaacatgacctggaattttccaaggaagcatcttaaaaaaaagcattgccactaatgccctatcgcctaatctcatgcctatgcacgttttataggacttatttagtggtcagctaattacttaacattatctgaaaaataaacttgtcaagttggactactcctaagcaaaatcgaccaaaacaacttccatttgcggatttacatattactcaaaattagactttagtagactactagaagatcgatcttagcatgcgtcagaaagtccttgataattatgaatcggcctgctacctgctaacaaccaagatcatttaccatcaacatcaaccattcatagttgcttcctcagtggtgtgcgatgacttaatagcttgcatcctgtactataccactgctaatccatgcagatgaccaggtcagcagcaaacagaccagccaaagaaagtcagagtcagagagcacaacttgtcattgacaaaccatccatgccatgccagagtggactgttgtgttcttgacaacagcctctaatttatgtccaacaacagatttgaagttgatctttgttgaccagttgcaagatgtatagataatctactagtaatggtggatttgacacatcataagttgatccaaatcacctgctttcactggctagtactagtagagagtttgcaactattggttggtcatcatgcatggcatgagctcacatcattcctaagcaaagtggttttcagtccaatttcaccatcagggaagaagaaattaagatcaccttccaaccatatgcatgctaccagtagcatcaattgctgatctttaggaaaggtttggatcctcttttttcatcttttggaactaggaaagagaagtggcacttggctagcagtggcgtttggttctttgcacaaagagagttcctgtggactgaaatgtcaaacatcaaactaggtatccactttaattagtccaagtagatgaaggggaatggcatgtttttagccaagccagtagtagaatcacatgcttgggttgactggtgccacagctgatcaatacagtttttggctccattacatgcactgtatgtctgtatctggcagaatgaagtggatggtaatctaccacaggttgagagaggttacacggaagatgcacaagcatgcatactactaggtgagatcggacggtggacagtagcgatgactgataggtaattaactggaagcatagggatttttttgcaaaaattacactcctaatctccaatgtgcgggggctaatttgcaaaaggaaccgctgaagtggcatcctaattcttcaaggatcccacgcggtttaaagaagctaatgaaaaatgttttgagccgaagctctattttctatggaccaagcaatgcagtcagatacgtacatgtgctcaaaaccgttggaaggcgtgcaaggttaactagcaggggttggctatcggggtcacgtgggataggttaaactctgtttttaagatgtgacggcctcgtacattcgtttggcacgaggaatgaaatgatcctaatgatcctacttttaaaaagatatcttatatatcagccagataaaaaaatggtttggaatagtccatcaatttaatccgaatcttgagggaatattctcctgagatcatccttcagagatgatagagagaatagtgggttagatttatccgtcagttctaataatattttctatgagataccatcccatcccacttatccttaagccaaatactcgaaaaaatagattctaacctaacccaacctatctcatcccttaaaccaatactttagatctatcaaaatgtgtgactcctactacctccatcccttagtataagggatattcactattttcttgtaacgtttgactactcatcttattcgaaaaaatttgtgcaaatataaaaactaaaaagttgtgctcaaaatactttggataataaagtaagtcacaaataaaataaataataattctaattttctttaaataagacgaatgatcaaacagtgcaaataaaatattaaaatcctttatattagaaaacggatggagtatattttatcaagcctaaaaaaatcaaaggttgtactctaagattggatcgtcgacaaaaggaagatggagtctagcctcgatgtggtttgggaaaccttcggagatatcatctctttggtttttttgtcttttctaaattatttattctatgttttcaaaacatgtgctatcataacactttttactgtaatacgtacgaccatttgtttggattatttattaaaattttaaaaatatttaatttatctctccagtctgtctaataatcaaaatcaaaccagaccagaccgtacttaacggtatcaatatgtaaactagtactatatccgtcctaaaatacttgtcgttttgagtttttctttctaatatttgatcatttgtcttattcaaaaaattatagaattattatttattttgtttgtgatttgctttattattaaaatattttaagtatgacttattttttttataattatactaattttttaaataagatgaatgattaaatattaaaataaaaaaaatcaaaatgtctaataatttgggacggagacactagtattctcgttgttaataaataaaaagaaagacaagttgaccggacgtagaaactgtacagtagaaagaaattccgtactactcctacttcttatccgcgaacaaaaaaaaaaaaacacacgatcagcagcagtgtcagcgcgcattaagcgttaatcccccagctggtcaaaaacccgagcctgctgcgatatggcctaccgccgctgcgccgcacaaccacaacccatacgcaactccacccaaaaaccagcgtcgcatcgcacgcgcaagcgcagcacgagcacagtgaggaggagcttagcttagcctagctagcttagctctaccaaaagctctctgtagcttgcttgctgcccagtattgggaggggccgaagggcaatggtgggaggcagccgtctgttcctcctcctcctcctacctttgctgctgctgctgctgggcgccggctgcagagatggccgccggtgcgccgccgcggccgcgcagactcagaggctgccgcagcaagaaggtgagttgcgtacggcggcggcggcagctagctagctttcctctcagattttgctcttcttcttgttttgttttttggttgttgttgctaatttctttgttaattagaattaattactgtagtaagcatgcgcctaagtgtgttttcgcttagctaagcttgagctttgtcttgagattcttgtggatttttttgctgctcccaatctgtcattgcaaccgcaactacaaatcgatcgatggcctccacacgctggtagttgatttttattttactacttcgtatttacaactagcagcctctaccaatccccggaaacaagaataataaaaaaatgtttgtttattttgatctggagataaactgccaaagatttcccttttctttaccgctgattttggcgtctcaagatcatctgcaaaattcacccagatcgcccggaagggcactcaggcatttcttctgctctgccgcatcagatccatcagtgctgctcacttggggggcaatgcctcaagaactcgtacagtcgtacaccgtgcaaaatggcgaaatgccatttttcttcttttcttattgcgcctgtgatcctcgggtgaactgtgttcaggacgcatggagttcgtgccgaattgttgcttctctcaggacgtttctaaaaaattctctcatccagcttaagtgcaaatatatagcattccctgaatcattcagggttgaaatgcaaattggtattcctttaggggcataagagcaaatagcatcgccatttttcgccttttcggttattcccccaccaaaattgtttcctccaagggcccccaagataagggcaagctgtgcgatcttgtcgatggcgaatctgagcaggaagttgttttggcttttgagttttgacttggccgctctcttcgtcttgaagatcccatcttgcgccagagctgcgggttaggcatatgcagtggtgaacagattgatctagtccaatgggtgctgcacgccaactgtttgatgaaattgctgagtacccagggtgcacgccgggcaacttcctaggagtgccaaagttggctcggtgcgctggcaggagacgttggctgctttggcttggctttatgtgcaatacaaaccatggtgacaatgtgttgtatgcatctcatgacattacgacaatatgttgcctggtgattgtattgagttggtaacagcgatggtttcgcaaagccttcctcttgcaaggaatgatgaaccggagaatggcagtgcacaatgctccgcgcttgcaatttttcggaggtttagttgctagagcgcaatgagtcatgggcttgagctgatgggtgagttgtgcaaagccatggcctactgtgcatatatgcgctacaagaaattgggcacttgagggaaagaaatggcatgtttgatagctcaatgactcaaagttaatgtcatggccatggcctatgctggtagctatgtgtggagagaaataatttatgaatgtctcacttcacttgctaacgaggataaatatggagttctgggaggctgctaccatcaaacatgaggcttttgtgccaacattttagtttttttactctctaagcaaatgagaattgcaataccaaacttccttttatccactgcttgataggttctctagctcactcattatgcattgttccgtggctttgtactgtttaagtcacaaattttgacaatttgaccctttctgaaaactaattttacaaatgaaccgcggccaaaacttatttcagaaatgacccttttgttcggcgccaaa

SEQ ID NO: 6441 - DNA, 14775 bp, Oryza sativa
ggtctgagtgcattgcagaattacgtcaacagaacactccaactcggcgaaatcaaatgaatatttcagatccctgtcaaccagtttatccagtttattttcttccttgacttctctaacctgcagagaattaagattaggtggtaagaaagtatacaaggatatgggcatcaaatgacagtagttaggtaattagataaagattgaactaaaaggagatacccaatctagaatcattcccttctgagattgcgcgtgcccattgctcaaggttttaggcccagtgatcagttccaacaagagaataccaaacccataaacatcggtcttttctgaagactgtcctgttgataaatactctggagcaatatgtccaatagtgcccctaactgcagtagtaacatgtgattcttgtcggtcaagaagttttgccaatccaaaatccccaacaattgcttcaaaactttcatcaagcaaaatgttagctgctttaacatccctgtgaatgattttaggattgcattgttcgtgaagatacagcagtcccctggctgccccaacagcaatccgcatacgcttgctccaatcaagagatggttttccatgatggtaatctacaaattaactttgtgttagtaagagagtgaaatggaaaagaaatgataggagaatgatgcaaaatcaaccaacacaggatcacaacacacatctttgtaaggaagctatcatagttttacataatcatcattttagcttttggatcaacaacagtctaccttcaataagaactacaactggaaactggcccagctatattaaaacataaaatcaaaatttgttttggacgattgtaattacctctcaagcgatcagcaacactgccatttggcatatatggatatacaagcaacctttcttttgaggtcatgcagaatccatataaccgcaaaaggttcctgtgcacagctagaccaatcaactccacttctgtctgaaattgaacttcaccagtaatatcaggatcttttagtctctttacagccaccaaagctccatttctcagacagcctttataaacaacaccaaagccaccttgacctaatatgttctttgagttgaaattgtcagttgcactctgaagctcgtgaaatgagaagtgctttagatggcccaattcaatttcaagatcttggtctagaagtaacaaaagaaaagaatgtttatcagatgctatatattctgaactctgcaataagagagtagatgcttaaccctttgaaaattaccagcagaagcaaaaggcaagcgccatctgcaatattttagccaacaaatgacaaacagaacaaatactgtggcacagatgatgcttaatgaaattgccagagctagttgatgatggctgtttgtttttttcgacgggctagaaattgttgattctgcaaaggaaggcaaattaggtccaacagataaatatgcaagtatatgacatcaggtaaacaattaccattagttaatactgtgagatctttgcaaccatgcataattgatgaattgcaaaggaacctgtttcctgcaatactggaaatcagaggaaagtgatcatcaggagggtattaaaactgatgagaaggaattatgtgcatatgctttgggaaggaattatgtgcctacgcttagtttagcataagaacacagaaaatatgcaggtgccaaacactttggttaagcaaatggaaggaaataagcagagcttatcgtacgcactctcaccaacttacctgtagtcatgtgcatagatttttggaaccgggccgctcaaattattggatgataaatcactgaaacaattttcccatgttgggtaaaaatcaataattacgtttatacacaacatttataacagaagagagaatataaagtggtgaaaagagacatacaggaatgtgagacctggaagctttgcgacatcttcagggatctgtccagacaagttgttcttatctaggcgcctgaaggattcacaaacagaagtcatattttgggacaagcaaaatatgtggcacaaaatttgaagcaatattttggcatctgctcacagatagtttaattcagtcagccgccctagagaacttgggatttcaccaacaaactggttaccagaaagatcaagagctttcagattggtcaacttcccaatctctggaggaatgccacctgatatcatgttattctgtagtaacctgaatgaagacaataaaaatgttgagtaatcaagtaatggtattttgtttcattttatgaggacagacagatgtcaagcaaacaagttcatgggaatcagtatgaatacacgatcaacttaagtatatgacactgcaagatgtaatatgctcatgtccttacaaataggatgaagacaatcaaatgttggacaaaccatactcataaacatttcaatgttatattcaaatatgaatcaaatgaatattctatagtggtcacatagtaatagccttcaatccacatatgcagcacagttgatcattctgatttgtagggttagccaaaagaaacatgaatctctctacagattaagatacatttctactaaagcagtcagttaaggtgacaatatacttccagactatttatatactaaaaataataattgctatagaatctgcatataattttcacgtttgggtctgtagacaaactttggttatgaattctagtgctgcaaggttcagaaaaatgtttatagaacagaaaatgcactaattagtgagtcatgattatctcaactctttatatggatctatttcaatgatacttagaccaaacaaggtgagccgcacattcattattaccaggccttgaatcctgagaatgtcatttattataactaataggaagtgtgacttgctcacatgaaaatggtgttccaatgctagcattggaaatgcttcagttgtacgaaaagtgtcatttgcccacatgaaggtctataaaaaatattaaaaatggagatgccatggcatggcatctgtcccccactcttttcagatgaagaaaatgaaattttattcagaggtgccatgctatgtcagctgtcatctctcaagtgatgtattttacacatctgtcttggcctggctctggagagtaaatgttcagtgttcacggaccctacatggagttctcctaagttcaactacaagagacatagcccatagggtaatgccctcactttccagctctttaactatggagatatcaatcgatcaatcaccaatcggatggtaccaaatccaaaacaacagttggggaaaactgatcctaccaacccagctcaactaattttgcagtgctacgactatgagacaatccgtgctcactaataaatgcattaatggaacaagaacaaaacctttgcatttgataaggttcgaatgaattcgttcaagaaccccttacattgtctgcaggtggctgaggttcccgatgctcggcgacagcgtcccggccaatccgttgttcgccatctgcctgcagcagcacagcaatccaaccaaaaccgccataatcaacaccaccaccacgagcagtagcagcagcaataacaaaatcccacgaacgaatcaggagaggggaatcctcacagcgagacgacgaatccgtcgggggagcaggcgaccatggaccaggtgcacgggtcgacggagttgatgtcccaccctcccatcacccccttctcgtcccgcatcctgctcttcaccgccatcagcgccgccactgcaaaaaccccccacatcatatcaaaaccctaacccacctagggttcccgttccccaaccaaaacccacgctacccaacccacgcaccttcgtagttgagccccttgggcgacagcggcgggtccccggcggcggcgacggcccacgcggcgaccaccaccgccgccgccacggcgagggcgcggggccccgccatgagaggagtccgacggcgacgccggggagggcgaggaggaggccgcgcgggcgcagcgcagcagcggcggcggaggcggaggcggtggcttgaggtgggctacgctgcagcaggagctcgggcttggcggccatgggcgcctgcgcgagtataatactgccactgtatcgagctaagcgacgggggtgcttagcttaggcggggggtgtgattagattagagttaagattaaattagcgcaatttggttgggaattgggcatcttaattacgaaagagatcgctaattgggccttaattacgtttatcgcgagtggaggcgggtggctctctccctgcctcgggaatcgcgctcccaaaaaaggctcccgatttttatttattttcattttcgttttttttgggattcttttttgttatttgggtcggtgagaaatgtgaaattgtaaataggtcctcgaaattataagtagctagggaattggcgcttccggtctgccttgagccctcctgttgttttgctgcttgtttttttactgctcctgattgagctagctctgacacaacacaattgtttgttctctttgggaacactaaacatttgtttccttgtgacagtttctagacaatttaacattactgtatgtgtggacaagagggccattaaaacacagtttttttttttttgtagggaaggagggaagaaacaaacaaatgatggcactggtcctagacaacagtattggtagttgagaaaattgagcatgcagagaaatgccagattggtatcgagtcccatagtgcaatttggtttggatattgaagctacagagggtgataaggttaattgtgttttcattttctcgatattttatagctcaatgttctagtacattttttcattaaatctatgacttgccccgagcttaatgtatatccatatattatactcgttacgaggctggcctatattattataggtgggcgaggcatcaatagatgtaagcagcatatcgcgcatatcaaataaatttaataccataattagtcaatttttaattgtatctagattcgtgaaaaatcttagctattattctgtacacaacggacttagatatcttatatattgggcgataaacaatctgggtagcaacagctaaccactcctacggtcctatcatagcttcgatgtcaacaaagatggagccatagaggaccatctcatgtgattgcaactagatttaggtgctatccacaaggagactaacaacacctgtatttagatccaaatacatttcgtcatcactcatcagtacgatggagttaatcacaaaatcttttcctctgcatttcattgtcccctgaaattttctgtaaggcactttatcttgaaaaaacacgaacatgtaaatggagaaaatgtgtccttggaatcaaaagtttataaggaaaaagcatattttacatctttaaaaagttcactttcatccttcacctgttataaacagatgtgatttgtgccatgtcagccaccacacatcaccacaagcaccttgccatccttattgcttactttaccgtttgttctccgcagttagaacaagtgcaataagatttggctgcttcttctaaaagtaccgattaggttgtggtggagaagggaactgataaggcagagaggataagctgtttcttatgcaaatacaacatctattaatctttaaaaaagtgaaaaacaaagtgctaaagagatttatcattttccgtgtgcatgtttcccaaaatgctaaatgttactttttttgcaaacaacattctatacgaaagttgtttgaaaaaaataatattaattcattttttaagttgaaaataattaatacttaattaatcatgtgttaatggctcatctcgttttgtgtgtatcttctcactcttctcttttcccctcctctcaaatacagccagtgtgagagcaaacaaaataaataaaattataccataatattatggtttatgaattagagatgatatgttaaacgtgttgtgacatcccggcccagggcttaataggattaatagaatactcatatcaacaagttgcaacttcttttccggaagccgatctccaaagaactcctgggtgtgcacgagtgaggacaaagtgtgccaacttgtgttagtctgtgaggacagtttatgacctataaaagctatcatatgtaagcgggccgacctgggagaggataaaaaatgtgagtttttcaactttaactaatatttagattataatttatagaactacatattatcagaatctaggtgagaatatagattgcttaggggagttaaagactggattataatttatagaactacatattatcagaatctaggtgagaatatagattgcttaggagagttaaagacttgagaggctcctctcaaacatggtcatttcttctagaatctagagctcttcaaacagtctagacttttgttcagattgtgaaaatatgtagttgtagaatatagtaaatgaattagaaggaaaaaaattagcattttcagattctcaccagttagcttctcaaaacactcaagctcttcaaacagagctaaatatgggagtgggagtaatgtcttggttagtgggattaatgtatggtatgttaatagattaatttagatgcaatgtagcctgggatgcgcattagtccaagcatactaatctccggtaaatgttgcccaagacgaagacgagagcacaagcacaaactgcttttgcatgtgtatggtctatcctgcctgatggtagtacctactgccaagccaaaccagggaaaccatgaaccatcgtcagtactttcatttcggcttgtatatgtccacaattgtagtgcaaaaaccatattgatgcattgttaagaagccgattcctgcgactgtgagaccagctcaatcaacggccttcagaaaattcagattaggccctacaaaatctgactccacctgctcaccttagaaatttgcagcactgttttgttctaattccaacttgtcagttgtcagaatcgtgattattgaccaaagaactttgaaatcatgcaggtagacaatgaaatctggggacggtgtgaaatgaagaagtcatcaaagcagcaaaaataaaacaacactgtatgtatatgctttgtttacagacttctataagtttgtagccttcccatagtcaacagcaactggaaaaaaaatagctataaaagattaatagagcaggtgtgtcagcatgatgataataaagcaaataaatagtgttctgctcaaccacactaaacagacagcatctctattgatgaaaggaccagccgacacaaccaattggttctcaactgttgcttttattctctcaatataggattggtgcagacacctgccttaaatccttacacaactcacaaatgcagacctcaaatatattactcatttatcaacaattttatcctagtattccagtgacaatgataatcacaacattcatctttgcagccaacagatgaggaaagttctctgaaccatatggtagaggaaaccagtagggggggggggggtaaacaagtttgggcatggggtatcataacaagagatttttccattaggaacatttacacaattacatcgacaatagggcatgagaaacacttacaggggcactacaacattaatcgtgggagaaagtagtacagtacttgggatctgatccctttcaatagcttaacaatacaccatccccattccctccagctatccccacagtacttggctaatcctgaccaccatggcctcctaataatggaggagaagcattaaattaacatgggttggctgtgcctagcacacccacctcatataacacattggcgccagctcatgttcagcttcccaataatggtcagattctacaccttaaatgtgagaacatgcaagttgccctttggcacaaacaagcatcggcttcgcaaagtaaaaataccatccagctgtcctatggtccggcagcaggcaagaaattgaacccacaatgtcaccgagcatgctctggtatcaacctgttgatgagctctggcgataaattcgctagctgcaaatgaacaagcaggcacataagtcggtcttttcatcttaacttagtatttttgttcatgaaaggtatatctgcctagaaattacttacttcttgcttaaagttgaacagtggggggaatggacgtccatttggcaaccttgcgtggggttctcgcaattcatcaaagaatgaatgtgcacatgcttcgagctgtaaattgtaatggtgattaatcagcatattgcatgaagttacactggtatgaattcgaaaacactgatcatataaattcaagggcagagaatggcagcattataggaatgaaaagtaagatagattgttgtggactccatattcacaagaacatagtgaacatgagaaatccataaacctcttgttcaaaaaactgaaatcaataaactggtagaaactagaaagataaacgaatatattgattattttttttctgttcctcctcgaaaacatccacgcacatccaaaataaagggttaaacataatctttccttttgcaagaatatccgattaaatgctgtacacctttaggagagaattaacaatgacatactggtgttatccaacccaaatccaatgattgacactagttttatacccacaaaataaaggatgcgtgaacaaataaaatatattgattattgatagaagatgttaacagacgaaaactgaaagtgatgggcggaacatgaccaatcaagttgaacgaaacaactaatgccataataatttggagcaatcattaataggtagatggcttcaacagttgacttgaatcagtcaaacaaaatgagatggaaaactcacggcagtgcatcgtagatttggtgcatactggagaagacgtgatgcaaggtcaattgcttctggaggcatccgcttgtggaaaatctgcagcataggatttgcaggttgtaatatgcactagtatcataacatcaattaaaaaaatggaatgctaaagtaaacaaaacaattctaataccttgtgccatgggtgagctttaatctgaggaaatctgaattctgtgtagttgggattcatgcagcggatttcctcacgtgttggagtaccaagaacctaccaacaaagaaaattcattcagtttatgaaaatagaaaaacattaagaaattttctttagaccgcatgtactgtagagcagtgcctaacatactacctttataatctcgacaagctgatccactgcactttcaccaggaaagagaggctggaaaaatggacaaaaaagatgtttagttcaaagtttgctatagtcaacctgataaaaaaaaacagtcaaagaagccacaaacaggaaataacctggccaaggagcaactcagcaagaacacacccagctgaccatatatcaattgatgtcgtgtattcggttgccccaaatatcagttctggagcacggtaataacgtgaacatatatacgatatgtttgcttcacctttaacctgcccagcgattgaatggaaaagcagatcaaaatgaggacagtagagttgcattacagcaatataaaagaaaaaagaaatacagcaatgtgaggttgatccagaaatgcactgtttttccccagtttctaatttgtccacatgaaaacagcaagaagatattcttgcaacaaaacgaacaaaagatctaatccagtaatttaaattatgtaaatcaaactgctaaatataccctcttgaaaaccagaaagaattgtgctatacaaaaataaaataaaataaaataaaataaaatgagctacttcagtatttaaatcatgcgaattaaactgctaaactaaaccctctccaaatcataaagaaccactccaatataaatatctgtaatcaacactaaaatgtgcattaactcaccaacatttttgcgctcccaaaatcacatattttgacttggtgagtaagaggatcgacctattaaaaccaatataaagtaagaatcagcttatattcagatactgttaaccacaggttattaaaatatcaagcgtgaaatgaacataccaaaagattctgaggcttcacatccctgtggcaaactccaggtacagtatgaatgtaagccaaaccacggaatatctatacagaacagacaagcaatatcaatatcatgaatacaactatggaaactaacaaaaagtagtaagcaactgtattgtcaataacatcttacctggtaaacatacaatttgacatatataagtggcatcctttggttcatgttgctataatgcttcaacacacgatacagtgactcaggaacaaattccatgaccaggttaaggaaaagttcatctctgcttgttgtagagaagaagcaatgcttcaaagaaacaacattgcaatgatccattgatcgcataatctgcaactccctgttcttgtaacgcttgtcctgtaaaaccttcttaatggcgacagtctcaccagtctccaaacattttgcctgaatgataaaagaaataccaaataagagacaaataaactttaaaggaggacaatgttacactgcagaagtttacctgaaagacgattccaaatgatccagttcccacaactcgttctgccatgtagctaatcgtctacagagcacaaaaatcaacccaagttagataaccttacacataagattgaataacatattgtggcttccatttatgttataatttacccttttaggttctccattcttccctccaatcgttgtggagattatgtggccggtgacaggatcactcccttccataagagaagcaccgtgctgtcatgtagcaacaaccagtgaggcaaggcagaacatcaacaatcaacaaagaaagaaaaaccactaaaacaaacaggttcatgacatctactgcctcaattatctaaagcggcagcacatcactaatgattccatcccatagcactagaactataaatccaagcgatacatactatcgacaatctcctggattgcttcatttcaaggagcttggaccaaacaggtgacacaaatgtgctgacttggcacggctgattactgcaagactaactgcataccggcatttaccctacgaattcataacaataagctagcaagagtcccaacaagactaatcagatgacttacaaaccttgctaatcgccccaacaccaaacatcgcatcgcgcgctcattcaagggctcaactcaactgaatgctcaccaccaaggcgctaaccaactaattgccccctcactagaacaaattaaaccataaacaaccataaataagtactaggaaactagtatcatcaagccgtccaagtttggacgcagctggtgatgggatggagaagcgcttgcatggcgcacacgcaaaggacaaccccggaggagggcagcgcatcccctcccctcccctcccctccccgccaagcaaacgcgccatgctgcgtcaacccccaccgcccaattcagctcgcctccgacctccgagcacgagccggcgcgcaaaccagggaagcggaacacccacagatctacgacgcggaccaaaccaaccgcggagaccaaaaccacctaacgcgccgcggaagacgaagacgaagacgaagagacggcagcagcaagcaaaaccgcagatctggaacccccccccccccagagcaaaccaaccgcaagtttctccgctcaccttttcaccggcgggggcgaccgctgcggcggccgcggcggagcgcggctggtcgacctgcatcgggtccgccgcggcgccgcctccggtggggtggggcccgcccggcagcgtggccatgggggggggggcaaatggagcggcctcctctctctctctctcctcctcctcggcttctctctcctctcgtctcctctcctctcttctctctcctcggcgaggaggttggcttggcttggcttggctaggcgaccatgagatgagaccttccttttttttcctctttgtttttttattcccttcttccaccacccactacaggaagacggcgttttttcatacaagggcttggagtttcgggaaatagcaggcggggtcggcttgtccgaagcgaggtcttacatttcagcccctatagggagctatttgtgaattttgaatgttttaagggttttgtgtaagtttgtgagggggggacaaggtcaatctgtcagtctggcgcttggaatctcccatgcggggattgagaattccgtcatcttttcctttttttctggtttacccctttaggaatttggaaattggatattatgccctgaagattatttgtagctttccgttactctaggcataggtttagttcgaacgtactttgttcgtactaactcatttcctcccgtgcgaaaaacgagttatcgcacaattaagtacgtaatccctcaatccaaaaaaaggtaacctacgaaaggatgtacccgtctagtatgtgcagattcattatattagaagttttttttccggagggagtacttgttaaaatgcttgataaatataaagtaaattgcatcatcagtacacgaatttgtcagtaggtgcaatctagtgcacgaacttgtaaaatgcttgttttggtgcataaacttgtctggtgcgtgcggaggaaggcgaaaaggacgctacatgactaatcttattgatttagaggttgattaaacatatatctgagaaggttgcaattagacatgcacatcttcaataaaaaaaatagaatatgatatagtgatagtagaaaaagatgaagaaaaaccaagcaatgccaacgatattttggtcctcgtttgcacgaactagacaagttcatgtactgaaacggatatttcacaagtttatatactaaattacacacatctaacaagtttgcgtaccaccaatgcaattgactctaatattattattatgatttttgaaacaatattttatagaattttttttaaaaaaataatattgcttggtattttgggaagtagtgcgcgaaaaatgagagagtaaaagataagaaagaggagtagcgaatacatcttagaagtttcgaaagccgtgttaaaaaggatcctccttgtctgaaaggcgaaaacagtgtaggaaggtgtcatggttacggataaggtaccttatattaattctacgatttatgaaatatacagatacgtcacaccttcatatgcgtgatagatttccgtatacgataagaaaatcgacaagagattatagaaataatcctcacggatagaaaagggttaggattatactatatcatgtaaggtctgaggtttccgagttctacttggagactaaggggattcacggtataaatacatacccgctaagggtccagggtatcaaataatagcaccagccaacccgccaccatagaagcaatccagagtacttgaagcctactcgccagtagatcacgtcgagactctcttgataaggatctcgctggtagcctcagaatcagttgttttctattgtactatgtggatttttatatcaatctcatataaactagattagggctattatcttacgaggggcctgaaccagtataattcttgtctttttgtttgctcgatgtagaatcgtatagatcatcgtagcaacgtaccccaatacccatactattcggtctacgggtatccccgccgacaggaagaaaaaatgaacatgaatatggacaactatgtgaataaaagtaaggaccctttcctctggaggaaaaaacatagaaattttcaaggattttaattttcaaggattttttttatgaaagcctttgaaatagagggttgaatcctaccctatcctttgaaatacgtatggaatggacaatcttataaagatcttacagaaaacttagcaagagctccaaccttttagaaaattttctttgagtctatctctcttatctgattcttgtgttcttcttacggtccaatcaaacgggttttctacatttttcctgtagtttgcaatcatttgttttgcacttgcattttctgtcagaatcctatattttttttattcttatgttttttcattcttataattcaaaaaggtccttttgcaggtattttatcgggctaaattttactactattctaattagaatctccctaccattttacattagccggatatttctatctgcttaatgaaatattcgtggtctttaagaaaattcttcccactgttatctactccgtactcctgtattttttttcgaatataaagaagtcgcgcacgttttgcgtggtctaaggatcggtcgatttcaatacaagtacagtgaattgcgtggtcctgtttgggaagaaaacagctgcatggtctacgatttgcatttgaattattttaaaagagataaattcatgtgagaacaatatcctacgaaatctactttactactcttaaatatctacaattactttactaattcatgtgagtaggagtagtctagtactcggtgtattgcatgtcaacgtctcataggtaacgtagacaagtttttacacaaatactactgtacttcaaagtcagcaattgattggacagctgatattattgattgattcccaccagactttgttttcagtatgt

SEQ ID NO: 6442 - DNA, 36045 bp, Oryza sativa
ttaactttatagataggtgattatatagatgaagtaaatattacatattataaactaacaatttaatagtaagatatatcaaatatttaagcaatgattcatgaatgcccacgcgaatgtgcgggctcccttcctaattggatcctaacaggaggacgaggggctcacaagagacacattgggcctgtttggtagagctccaactcctaaatgtagctccagagttgggtttggagtagagttgtggagtagccctgtcggaggatgaactcctcgagcgggggaccgtgaggcacctcctttgttggttcggccgggggctactgtcgatgatatgggcccggggatatcgtgcttaaaggggagaggtcgccctcgacgtccacgtggcacttcccccgaggggttgggcccatggatgagcggtagccgcccctctccgcccctaccccttgggacggtcaccacgcggccatcatgcaagggtagtgcagacggagcggacgtgccacgcctcatttaatgtggcgtgctgcacgcttgaccgaatcgtgaccggtgcatgaccggttgagtgacagacgagatggcggcaagccacgcgcgccctggccgtgtgtcagacagcgtgcggtgcggtaggtatgccttatcccgtcaaaatgatgaggggcacagtgacttgcaaccattcagagccggcttgaccgacctggacacacccgggacggcgttcctggcacattcgcacccaaaatcctccccgtgtcagcctgcatcgaccggcatgatttgatgggccccgcacgacagccgatactcagaggacttccacgttgtggcgcaagacacacatttaatatagggaatatttactcccttcactgggcggcacacccggtgcatgtgagttcccctgggagtataaaaggaggttcatatccaatgaagagggggatcgaagaacaaagagttggatcgtttagccctagtttgtacaccagagattcagagacttggaaagctcagaaaaaccatcatacacatgagtagggtattacgcttgttagtggcccgaacctgtataattatctttgtctcatcctctttgagggacccgacccccttgatagcttccaatcttcctagctgcttagctttcactcgctgcccccagccgaaacaacaaaggaggggcctcacggtcccctactcgaggagttcatcctccaacagctggcgcgctaggtagggggcgcgttcgtgttcacctgaggagcactcatcttcgtgcgccccaagttttgtccggtacatccatggcgggagtcatggacggcaagctggtggtgtgtggctgatgaggaggatcttgaccctcgtcaccaagcacgacctacttcgactccccctcgccgcaatcctaggcgaggggagggccgggataagtctggggactcggccatctcactgctggcaggcaagggaggacgctgagaaagagtgcgctgccgcctcacgacgacggtggcacgcctcagggcgcacttctgcgccaccccttgtcgatccagagccagagacctcggtccggtgctggctggacgatgtggccaacctggtcaccaccgcacagcggcagcttgccgctggcggccggacaacggcggctggtatatcacgtagtacgattgccctctctttgtcgtcaagatggagagcacaccgggtggcggcagcttcccgccactcgtcctcacacccctcgtcgatgcccgcagggagctgtgggcgccatgagtgtatctacggagaaccggacgctcggcttgacatcgagcgctggctggatgtgcattgagccgcccgtgcgccgagagtaaagagggtggcaatgcgccgagagtagttgtattgatcgatagattgatagattacaatgacccagggtgtatatatttatacccatagggagatactagtccttgtcggacaggaaagaaactaaagataaaaggaaaagataaagtccttatcagacactaaacacccttttctaaagataaaaggaaactaacaaactattcctaattagtagataaactgtcatgccgcatccttcttgaactcggactcttctggataaattccctttagttgatccgactccatcgagaacacggttggtggtgatttgacgactcccatcggctgattccataactctgaagccgatactgactctaagccgatgatgactttgggcttaccaaattttgtcgttaacacatgccccccagttttggagtgtgaggacccatgctccaaaattctcttctgtctgatcttgttaactccaaaattgatcttcccttgcttcttgcaatcggctttcataagccgatactgtctgcattaaatgagctagactgtcaaactcgtggcagaagaatctctctctgataggtgctgacaatccttggaatgcaagatctgcgagctgctcatcacttagattcaaactataacatcgaccgcggacattacaaaatctctgaatatattccatagccgattctccttcttgctgctcaaccgatattaaatctgaaagcttcaactctttgattccaacaaagaaatagtcatgaaattgcttctcaagatcggcccatccttggataaaatctgatggtagcgatgaaaaccatgtgaaagctgatccagtcaaagacaatggaaaaaaatctaactttcagagcttcttcagccgatgcctccccacattgtgctaagaattgactgatgtgttccattgtagatgtatcatcttgccctaaaaactgggagaaatctggaactttgtatcggtgtggcaatggcaccctattaaaccactcaggatatggcagccgatacacagaagtatgttccttaggtttgattccaaacttctcctctattatctttgcaattctatcgggcaaatcattgtcatattgatattcttcatcatgcccatattgacgaagttcttctggccgatattgatatgcttgcccctcgagctgattcttttgaacaattatttcaggaactatcttcttgaccacatcttgtagtctactcatcaaaactccaaactgatcaaacaatgtgcgatgaactgcttcatcaactatatcttgaagtatttcaactatcggcttggggaatcgagtcttctgagttggctcttctggtgtcatgatgaaacattgaagacaacgcgtttgaaaatcagctacaaactgctccatctgttgcctttgttcctccgttaaatcctccactatgaccatgatcttggcattgacttcttcttcaaacatgtggatataaaatcatggtcccaccgggcgtgccaaaagcgtgttgatgcgaaaaacacgaggcctgggagatctgcttaactccagtgcaggtccaaaaatcttgatgagatgcgggtgtgccagtcagtttgaccctgcaactgacaagatatataaacagtagatcaaacggctgatcggctgacaagccgatggagtagttccagccgatgccgataccagccgatagccgatgccagccgataacgatagggttctaagctatcggctttatgtccaatgtagagtctgacacttgacttaaataatgatataaaggcaatcgactgatgataatatagtataacaataatataatacagtataaaccaatcggctagcaatgagatgatagaataaacactgatccgaaggttaaagcatacatcggctggaggtccaatgttataaaatccacaatattagataaacagtaaaacctttgttgtgatcggctaagtccaacttatatgtatatgcagtccttgtaagcccatgcaacgtccagataactcatcggctgaaaccccgatgaaacccttattggcaatcaagaagcaggctagagattatggttctaaacatgacttagtagatcaaactcaactgatgcagtactaagtatgaaaagaaacataatatctagacaatcaagccgttgactgatttttagggtggtaaatgtctaagctaatctaatctagcaacacgatttagccgataccggcagaaaccctaaagcgagaagcggccgatagaggtaaactgatatgctaagactagattaacagagacatatgataaataggtagacaaatatatcatccaaaccggagcaatccaagaggtcgaatgtactgatgcagccttgaacaacgctgatgtagatgagacaattgcctgggccgacggaacgtaggacttaccccttcgctgaagatcgaaagccgatgcagccccgcgtcaggtgccaagttccatcgaatgataagtaaaaacctcggtaaagagggtggcgatgcgccgagagtagttgtattgatcgatagattgatagattacaatgacccagggtgtacatatttatacccatagggagatactagtccttgtcggacaggaaagaaactaaagataaaaggaaaagataaaatccttatcggacactaaacacactttctaaagataaaaggaaactaacaaactattcataattaatagataaactgccatgccgcatccttcttgaactcggactcttctggataaattccctttagttgatccaactccatcgagaacacggttgctggtgatttgacgactcccatcggctgattccataactctgaagccgatactgactctaagccgatgatgactttgggcttaccaaatttcgtcgttaacagcgtgcggtacaacggaaggacgatgagtccctccactcatacatctagcagttctgtcaggtccgcaacaccatcgatcccatgcatccctcctcacgcggtcatctacgcatttaggggggcgtgtggcataaccgcgtgctgaagaaggtcgcctccaaggagcacaaaacatacgcggagctttttcagctcgcggatcacgtggcccgcaaagaggaggcgtgggcttggaactcctccagctctggcgcggcggctgcggctgcccctgagtcctcctcctgctccaagcggcgagagaagaggaagaagaagagatcggtccgatccggcgacaaggaccacgtcctcaccgccgaaggcaccttgcggcccccgcacaaagaaaaggccgcgagcatcaaacagaaggacaccgccgccccttgtgagagccgctcactagataagtggtgcatcatccacaatacctccacccacagccttgctgactgtcgcacgatcaagtccttggccaagcgcgtcaagaagtcgcatcaggagaagcggcagggtcaccgggagggtaaagccccggagacctcggccgacaagcggcgagaggaggccaagaagaaggcccccgtcgacaatggtgatgaggacctggagttctaggagcttgacaccactatcgccaccgtcgactgtggagcatgcgcccacgcatccgaccgtagctttaaggccatgaagcgcgagcttctggccgctgtccctacccatgaggcgacacggcgagcacgctggtcggaggtgaagctcaccttcgaccaaaccgaccacccgccagtggtttcccggggagggcagttggcgctggtggtatcgcaaaccatctgcaacgttaagatgaagcgcgtcctaatcaacggcggggtcgcactaaacatcatctcccccgcggccttcgacgccatcaaggccccagggatgaagcttaagacgtcgctacccatcataggagtgaccccgggacacacgtggccgtccggtcatattgtgctcctggtcacctttggtgatcctaccaacttccgcaccgaacggctcgactttgatgtggcggatctcaatctgccctacaacgcggtccttggcaggcccgcattggtgaagttcatggcggtcacccattacgcctacctccagatgaagatgctgagccccggcggccccatcaccattagtggcgatgtcaagatcgccctgacttgcacgaagcaacgtgcaatcaacctcgcagccggagaacggcggcggggggcctgagacttccacctctcgtctcttgaagaagcggatgacttctggtgacgaggtgtccgtcaagaagattatccttggcaatgatccgtccaagaccgaagattggtggtaacttggacgacaaataggaagacgcgctcgtctccttcctgcgggcaaacgccgacgtctttgcctgaaagccgttggacatgcctggggtccacagggaggtgattgttgacgaaaaaatcgaacacaccggcctgggagatctgcttaactccagtgcaggtccaaagattggtgagatgcgagcgtgccagtcagtttgatcctgcaactgacaagatatacaaatagtagatcaaaacagccgatcggctgacaagccgatggagtagttccagccgatagcgataatagccgatgccgataccagccgatagcgatagggtttaagcaatcggttatatgtccaatgtaaataataatataaatgcaatcggctgatgatgatgtaataaaataacaatataatccagtataaaccaatcggctagcaatgatatgataaataagcatggatccgaaggttaaagcacacatcggctggaggtccgatgtcatgaaatccacaagattagattaaacagtgaaacctttgttgtcatcggctaaatccaacttatatgtatgtgcaatccttatgaaccgatgcaacgtccagataactcatcggctgaaaccccgatgaaacccttattgacaatcaagaagcaggctagagattatggttctaagcatgacttagtagatcaaacttaactgatgcagcactaagtatgaaaagaaacataatatctagacaatcaagccattgactgagtttttagggtggtagatgtctaagctaatctaatctaacaacacgatttagccgataccggcagaaaccctaaagcgagaagccgatagaggtaaattgatatgctaagactagattaacagagacatatgataaataggtaggcaaatatatcatccaaaccagagcaatccaagaggtcgaatgtgctgatgcagccttgaacgacgccgatgtagatgagacaattgcctgggccgacggaacattggacttaccccttagctgatgatcgaacaccgatgcagccccgcgtcaagcgccatgtcccgccggacaataaaataaagtagaaaaggtaaaagatggcgatgcgccgaattgtattgatcgtagagatagattacatagaccccgggtgtacatatttatacccatgggttgatacaagtccttgtcggacaagaaagaaactttcctaaagataaaagtaaaagataaagtccttataggacactaaacacactttcctatagataaaaggaaactaacaaactattcctaattaatagataacttgtcatgccgcattctctttgaactcggtctcttctggataagcttcctttagtagatcaatttccttaaccgaatatagcaagaatccgacaactgacgacttgacaactctcatcggctaatctcaggacttcgaagccgatgactactccgggcttaccaaatttcactgttaacagtgatcgagcaccatctagccgtgcggccggacgcgagacccgtccgacagaaggtgcggcggtaggccccggagcgacaagcttttatccgcgaggaggtggcgcatctcctagaggccgagttcatccgagaggtcatccatttggagtggttggcaaacctggtgttcatccccaaggcgaacggcaagctctggatgtgcatcgactacaccgaccttaacaaggcatgccctaaggatcccttccctttgccacgcatagatcagatagttgactccaccgtggggtgcgactttttgtgtttcctagatgcttattcaggttaccattaaatctgcatggctaggaaggatgaggaaaaaactgctttcattactcctgtaggcacattttgttatacaactatgccttttggtttaaagaatgtgttggtatttcttaacgacattactagaaatataattcccagcaatgatttacaaagtctgtcagggttatggataccacatacctaatagtagttgactaaatctcggcaggacccaccacataccatgtcttatacggaaataaccttcggatatggatagagttccggataaggaaagacaaccagagttacacaccagggatggtgttcctggtgcattcgcacacccaaaatccacttccattaaatggtgaatgagggggatccttcccgtgtcggcctgcgtcagccgacatgatttgatgggccccgcacaacagccgatactaagaggacttccacgttgtggtgcaagacacatatttaatatagggaatatttactcccttcactgggcggcacacccccgcgcatgtgagagaaccccttggagtataaaaggaggttcatgtccagtgaagagggggggtcgaagaacaaagagttggatcgcttagccctagtttgtacaccagaggttcagagatttggaaagctcagaaaaatcatcatacacaggagtagggtattacactttttagcggcctgaaccggtataattccctttgtctcatcctttttgaggggcccgatccccttgacagcttccaatcttcccagctccttagctttcactcgctgccctcggccgaaccaacaaaggaggggcctcacggtcccccgctcgaggagttcgtcctccgacaagcccaaacccagctccacatctctagtttattttatgatagtgctctagtcagctctgtacccattttaagtggagctgaaattatttggctgagctctggagctgtgtcaaacggacctatcatcttcgtacgtggagaagaatctccatcgtgacgtacctaacaccacctcactgtaccgtgaatagcctaaggctgggttcggaggaggggttggacccggcacgcaaaacgatgttcgcattaacgtgtgattaattaagtattagttaattttttttcaaaaatcgatcaatatgatttttttcaagcaactttcgtatagaaactttttgcaaaaaaaaaaacacatcgtttagtagtttgaaaagcgtgcgcatggaaaacgaatgtgggggagttgggaactcccggcaaagaacgcagcctacatgaggttacaagtctccatttttcaaaaacatgtgctataggacacaccctcgttggtgttggcgcacgtgatcttggtgtgcacgcttgagtgcatctgtgcatccaaattgtactcgggataaaaaaaaagatttgtctattcgatgaactaggagtatttgattttctagcacacattattggagaaatatatgctgaagaaaaggcacagattcttactatacatcaagctgcagactgaaccatcatcagctatctgaaaccaatccagcatcccttgtgctcacaaccagaggagggatgctctgctcactccagaacagctgatcaggatccacctcacccttcaccattgccagcctcctgaagtttcccctgaagtacttctccccccacaccctggcctcctcatagcttgtgtttccctccacattctgccccaaatccaggtccctgtagttgatgtatgcagccctggggttcttgctcacatagggtgtcatcagctcatgcaaccccctcacccagctcagatgatcatcctcataggacacattcttgtcacctccccacttgacaaagtattgcaggttgtagaggtatccgctccggtgagcgtacggcgtgccggattccggtatccggctcatctcgccgccttgtgggtcaatgtcgatggagccgtcttcgtcttcgacgatcttggtgagcaattcgatcaggccgggtgtcggaattggtgaggttaggtagtcgagcttgatcttgtagtagtccttgggttgcagtgtcctgtcaagaagcacctctgctggttggccattggtgtagccgtaggagtacagcatggattgcagccagttcatctccctgcaatcggttggtttgatgccgagttcgggcaaatggtggtcgatttgggtgatcatgtcgctgcaatttccaagaaacaatgatttgaacgtcaccaatggatgacgagttgagtcgtcgccgtcgttgatggtcttggcctccatggacattttgacgaacaggttgtcggggagagcgtgcgccacggcttgccatttggtgaggaggcggaggagagattgctcgtcgtggccacctcgccggagtaggaggcggtggacggtgaaggcggagacgacggccgggacggggacgaggttgacggtccaggagacgacgatgccgacgctgccgccgccgccgcccctgatcgcccagaagaggccctcccccatggccgccctgtccaggagcctcccctcggcgtccaccacctccgcgtccaccacgttgtcggcggcgaggccgtacttgcgcatcatcgggccgaacccgccgccgctgaggtgcccgccgacgcagaccgtcgggcagattccggcggggaacccgagccgcccgccgctcccctcgccaccgcgtagtagagctccccgagcgtggcccccgcctcggcgcgcgccacgcccctcgccgcgtccacccgcaccgcccggagcgccgcgacgtcgacgacggcgaacctcggggaccggccgagcgagcggtacgagaggccctcgtagtcgtgcccgccgctgcgcgcgcggacggtgaggccgtgggcgcggcagcagacgacgcaggcgcgcacctcgtcggcggtcacgggcgtgagcaccagcgccgggcggggcgtccgcggcgaggcgaagcggaggttctggatggtggagtcgagcagcgacgggtaggaggcgtcgcccggcgcgtgcacgagccgcgacgggtcggcggcggtcgccggcgaccgccgcgcgacgcaccggaggaagctctcgcgcagatcgccaacgccgcagccgtctcgccaccgcgcggaacacggcgaggcgagcagcgagaagtggaggaggaggaggaggaggagagggaggcgcgggcggcttggctccatcgtcgtcttgctcgaggtcgcggccggagctttgctcagctccgctcccactgcgtcgaacgggtcacctacctgctcgatctttgggtttggtggctacacgtaatgaggcatccataaccagaaagaacctcaattattgtgatttatttttaaggaacctccgattttaagataaaatatttcaaaaagccttatacttttcaaaaaaaacctcatattttactattatactcccttcatttcttaacaaattacgccgttgatttttagcataacgtttgactaattgtcttactgaaaaattatataaatgtcattttttttgttgcaacatattttataattaaaaaactttaagtatgacttataatttatcatatttacattatttttttaatctaataagatgatgggttaattggatcgatgccactgcaactttaccaaattaaaaaaagccactactattcatcatatcggctgggtgccactgtaattttagaaaattggatccatgccactcccgtcactttttccatctcatctctcacaccgtctcatcctcatcccctccacaccgcgcgacggccggcacgagcggaagacaagctggcgcggtcacggccggccctggtggggtctctccggcgcggtctccggtgccgagctccctcgccaccgccaccgagctccttcgccaccgccgagctccttcgccgccacccaggtcggccttgccgttgacgacgctgacaacgaaagccacctcacgggtcgactcggcgaccatcgtgctgtcggggcatgtggtgaggaagccgaggcatccaaggagaaggcggcagagtgggccgcggctgcgccaccgtctccggccagcagcgtcagcgtccctggccaaggacgcgcacgacgaggtccttttcgcagcgaacgaccggcgaggcgacgaggagcagccgcatcgctccctgcggtgtcctcaaccgccgtcatggcatgggggctgctccgcacgggattccggccttcactcgcgcctgcgccaccacgagaaccctaagccgccgccgccgccgccgccgcttgcgcctgcgtcggtgtcgtcgccgaagccggagtcagtggtggtgtcctctggctcagtcctcggacggggaaagacggcgtcaacgggagtggatggaaaacgcgacggagtggtatggatccaatttcccaaaattgcagtggcgcccagccgatacgatgaatagtagtagtatttttttaatttggcaaagttgcggtggcatggatcgaattagcccgatgatgaatggtcaaacattattctaaagttaaccgtgtcatctattaaaaaatagaggtactatatgattattttttacataaattcatactagttgactcaaaatatgcatccctctcgtgtattttatcttcttttcctcaattctgcactgtggtattaaaaaacttaacgtaattcatgacatgagaataagctaaatatacacataaattatcaaaccatcgatgatcaacgctagttgcaaagcaactgacatttatattatatactccctccgtttcacaatgtaagactttctagcattgctcatattcattaatatctatatgtatatgggcaatgctagaaagtcttacattatgaaacggaggaagacaaaatatctcatacaattgtttacagttttaaaagaaaaatattagccaaagtggatgatttaggcttggacctaaaggttataagaaatattttgccctaaaacgtaagattgcatgaagcaaattataaaacttgggattttgagttaagaatgcccccaaaaccagaacatgatgtggtattttttttaaaaaaaaatactcctaattattcagctagtaggtgatggtaattgatgaaagataactagccaaattttcctgttaagcccacagctaaatttcaaggctttttttaaaaaaaacattatagagtttttttttttagtctcagggcagacccaaccaaacgttttcagtcccagtggaaagaaagtggagctggttgtgatgatcaaaaaatgaataaagaggtgaagtggggtttgggccaatccataacttgaaattagatttatgagtttgagagccctactaaataggtccttggtctctcaaagtttaaattttgtgaacataattagatttaattttagggttttttttaagtctgtttttttatcgttggcttttaaaccgtaataacacaaatatttatgttttatttgtgaattattactttttttgctttgttcatttttcttaaatgatcagagcatatgttttaaaactagtgaggatcaccttaaaatcatttttcatcgcttggaccacgagcatttattttataaaccgcatgggaagaagaggaaaaggggcccgattcattcttgagacacagctcgatgtctctgtcggatgcatcaagcatttcgactgaccaactggaagcaggagacaaaagcggtatatcagaaaacgccaatctcttgcagccggtgaccggccagaaaacaactccgtctcgccaccgcgcagaacacaagcttttgagctgtgctactccgcttgaaattaaaacataaaattaacagagagcgatgtaaaaccattggattatcataaaaaaaaagaaaaaaagaggcagctcgacgtctctgtcggacggcatcaagctttcaacgataactcaggtcacgaatgatttcgacaggccagctagagcagtagggaaaaagaatggtagtatttgaaaaaaaaaacgccaatctcttgaaaatatctaatctagaagggactaccttcctgaacttgcaattgtaagtaggtgatcagattcagaggtagctacatgtttccatgcaaaagcacaagtgtgacattggacaagatgatgtaagatcagatcatgctcttagctttcaggtaattgacaaaaacatctggccggaaaattcatcaagtaacataaaacttggaaggtgaacttctgcccaacaagggaaaagcttttctaacagctgagcctacaggtgaaaatgttttaagaggtattcgcctgggccttgttgaggatgactccttcatacttgacctggaaccacttcatggcatcctccttggtcacccggtgctggatcccaacgcgagacttgcacctccgacgacgggcaacacggtagccagcacgctcaagcacaacatagaagtccattccatagatacctgttgaggggtcgtacctgcagcacacaagagacggtttagccgtattttttcgaaggatagtaaaaccatgtgatgtgtgcagaaaattataaattaaaaacaaaaacacacttatttcaatgtgcttttggcgaataccaaacatcgtattggtgcattctctccatcatcagctatgcacagctcaagagcaatgcaaactacacatacgaaactattatggtgcatatgtggacaaacttcgtggacggtcaagatcaaagatggtgagcgtgtagatcatttctaaattggattgtgaagaagttccaaagggttgctcagatcatttgttagtatgaaacttgctaatttggtaggcatttctatgattcaaataaccaagcatttccagtcactaaacagttgttaatacgtccatgatggatagaggtaattgggtccgtaaaaagacagtactaacaagtatccaaaggtgaaacaagggataaattgacaattcaattagatagtttttttctgcaagtataaaaaacaatcatcatgagtaaacatgctctgatgctgaatgccaagtgaactgctcaattagtaaacaaaatagacaaatgacaaaattgcactgatggtgagaagagcttcccagaggttctagagttctaactcacagtacatttactaatagggtgatgtttctaccatagaaatacgaagtttgtactgtttcgtggttccagaccttctagatttttgacaatgtggctcttttacaaaacttattttataaatagacccccaactgtgaaacaaagtgtggttttgattcattgtgatgggaaaatggagagtgtcaaaagtgaagaaaatgtgtgtgttgactaacataggtcaggatgtgatatttgtgcccgaaaaacggtagttttgttacgtgtgtgcatgtgatcgaattcaatcttggtcaatggcaaggaccagaactatgctcagggaggagcagtccggtgaggtcaagaggccatgtgataaggtgggattgacgtcaggatccttagaggtcaaccggggtcaacgacggatcgagactaaactcagggaggagttgaggtcagaacgatcagggatgccggttgacaagcttgaatacaatgcggtgcacgatgaacggacacaatgttgggaggacttcgcaacgggcttcacaaggtcaagtgtgcaggtgtcgggattcgcgaagagtaatgtatgatgcaaatgcaagaatgctccccctatgtgcctaactccccttttcaccaagatctaaagcaaaattttaaattctcaatgagtgcattttgctgaatatttctccccctttggcaatgatgacatgcaaaaatgcaaaaaatgagacattgcaaactttaatttgagtgaactttggaggttaccagctagacatatacaaaagaagtatgaaacatgacaagagcaacaaggttatatcactagcaagctttcatgctatttctagaagaagcttaagagtaagcaatccaacgcataaatatgcaagattaacattatcaaaaacaaaaatgaacccatgataccatgctaatgcccagttcaagagagtatcaagatggtaataaaacatagaacatgggcttttagctctatcacatttgcattttattccttttcggatttttgaagaaaactatagcacaatcgcgatggtacgcctaatcttatcagtcagcgagtgatgagggcgccaaacagtgtcatcaaatctcaaacaagttttccagttagagctcctgttacaggtagtctcagtgctatcttcagcactacttatgcgtaaacacactcagtagcctgggacaaaagcagtggtaaaacacataaagcatagaaagaacataattgatgcacccatgaacaatcaagcgtgagcattcaaaaggatgtgccgaaagctattgctaagatgataaaaacatggcatatctatgagaaggatattgcatcaaaagcaaacttctagagcaagttgtgcacattaattaagttcaagtgtagattcaatttaagcaagtatcaatgcgcatgaagagcatagcatgaacatacaagctacttaagcacgtgtaacctagacaaaagatctagcttgcataaaagtaagagatgagtatcaaaaagatgtccagtaaattgttaacaaagctctttaatgaaaagatgtataatacaatgcaagaaagtaaacatgatgcaaatgttacaaatgcatgcaaaagaaaagaactccctctcaacgcaatccacaggggtggatcacccctaactcactttgcaagaactcacatcatgctcaatagagaggttttgtaaaaatatcagcatgtcgtttctcggatttaacaaactctagcacaatgtgttgacgaaaaatccacgcccagctaatggtgccaaatctgtgttgatgcgaactatgtcgacaaacacaatgccgggagatctgcttagctgccgggagatctgcttagcttcagtgcaggtccaaaaatttggattcgaatgcgggcgtgccagtcagtttgatattgcgactgacaggatagataaattgatgatcacatagtcgatcgaccaataaggcgatatggcgataccagacgatgttgataggattttgaacacatcggctatatgtccgatatagattctgacacttagataaataatgatataaagacaatcgactgatgataatataatgaaataaatatccaataaaccaattagccaacaatgatatgatagaataaatattaatctgatggttaaagcatacatcggctgggaatctgatgtcattagaatttaaatccaaaagattaggcaatcaataaaaccttgctgcaattggctaaaaccaacttgtatataatccttataagccgatgcaacatttaaataacttatcgactgaaaccccaatgaaacattgattcatgtttactaacttaaataaatctaacttacaaccacaaccctacagggcgaacacaactggatgtagcataaggttgataattacctgatagatttaagcaagccaatatgacaccaatcaaagtgatcatgtattaaatttgactaagacagtaaaatcatcaaagagaaatttaacacatcaaataaaccccccgatgaaacattagcacgaacctatcggcttaacaagactttgattattaataacaattgaggtcggacctaaccgatgcagcacgagattgcgtttaataatctgatctcaatgagtcgataaaactttctaatgcgatggatataacaaatctatttaaaatagcattgtgattgtagagatatgtcggctaagacaagatcagacctaaccaagatagtcctaactaaattgatgcgtctctaaacacaatgcaattaaaaatacaattcaaatatcaggtaggtaaaatataccaaccgaaccagagcaatccaagaggtcaaagcgatggagccttgaacaacaccaatataaccaatacaactaccagggccggcagaacttaggggttaccccttcaccgaagatcaaagacatgcagccccgcgttaggtgccaagttctgcaggtaacaaaaacctcggaaaagagggtgttatgcgccaatattgatccagagataaatggcaatgaccccaagtgtacatatttataccctcgggctgatacgagtcctaatcggacacgttacaagtttcctaaagataaaaagaaagatagaagtcttgatcagacactagacaaaacttaaggaaaattactaaaaactacctaattattagatagaattaaactgttatgccatggtcttcacgattccttcctaaactcgatctcttctagataaaattacatcggctgcttgacttctttccttaaccaaatccactaaagaatcttaccaaattttggtaaattttggcgttaacacaatggtacatttctaaacatattttcggagaaagtggtaccgtatctcaatgtgcttggtccttgaatgttgaaccggattcttaacaatgttaattgcactgttgtcacaaaaaaaacactcaaagacaagcaaccatacaccttcacttgtggttttgaatttaaacttcaaaagcccaaaaggacatctctcataaagaggtacacacccatgggcaaatgggccggcaaagtgactctaagggactactccaaagggctccaaagggagcctactcaccctaacatccacctctctatttatagcccaagatggatgaaatccccctaagataatgtcaaaattgcccttggggcaaaacccatagctcagatgaaatctaggccatccgttgttccttctcctcaaaggaaatatctcagatgtccaaacgagccgaagcttctcatgcgcacgcactccagggtgaacccgtgattcgcgcgaacgcctcctcggccaatcaccgcacgcacttgcttgcatttgcatccttatctgtcacttggtcttgatttttcaatctcttcaaataaccaagtttgacttgcaatattatttgctttgtggagcaaaatcaaattttcaaaattttgcttgaagttgccaatgtttccatcaagggggagattgtgaaacaaattgtggttttgatttattgtgatggaaaattggcgagtgtcggaagtgcaagaaatgtgtgctgactaacacgagtaaggttgtgatatctatgcccgaacaacgggcgttttgtttacgtgtgtgtgcaggtgatcgaagtcaaccttggtcaatggcgaggaccgggactatgctcagggaggaacggaggtccgacgcagtcaagaggccatgtgacaaggtgggactgacgtcaggatccttggaggtctctctaggtcaacggcagatcgggactaaactcatggaagagttgaggtccagaagagtaaaggatgccagttgacacggttgagtacaaggcggtgcccgatgaacgaacaccgtgtcagtagtacttcgcaacgagattcacaaggtcaagtgtgcaagtgtctgagattcgcgaagagtaatgtacaatgctagacgatacatgcacttggacagcgtatgtgtactgtactcatgcaagcaagtgattgggttgcgcatatgtgcacgtggcccaatgccatgcacttgtgcatgagtctgatcgacttggcttggaggaggtcaagccaattaggctcttgcttgttgacccaagacggaggcggtaaggcgtccggctagcagccttgttggcagggaggccgaaccatgctggtccaggtgatggtccaagacgatagttgcagatgaggcctggctagatgcaagacgcagcgagggcatggaggcgaaagccgtacggaacatgcggttgtctcatactcgccgcacaagcgcataaggtcgcataggtggagcgcgcctcccagagacgcgtggtgaacgggtattcggcgagcggcaaagacgtggatcaacgacgaccaagtacgtgtggtgattggccaaggagcatacgcgcggatagcaggccccaccgtagattgctcgtgccggagaagcttcagccttcagctcatctcactggtaggtgggcctagctagcaaggtgcgcgggaggagtggttcgatgcatattttatgtggaaaatgggatctggagcgggcaacaacatggaggacatccgagttatttcctttgagaaggaacaacggatggcctagatttcatctgagctagggtttcacccagagggcaatttgaacattttcgtagtgggatttccgtcatcttcgactataaatagaggggtggatgttagggaaagtagtgtccctttagagccccttggagtagtcccttaaaatctctttagtgtcccttctgcccatggatgtgtacttctttatgagagatagccttcagggcttttaagagtttaaattcaaaacaagtgaaggtgtatgattgcttgtctctttagtgttttctttttaacacctttcgtatcaaagatattctggagttggatttaatttcagtttttgcgctacggtctaagggaattcttcgctaaagattttttatgggtattcaatgaaaatttcaatacactatatacgacgactttgtccaaaaatgccatcgccgttatcgtcgttagggttccgtccattccgcgacattaagtgctataagatgaacaatgtacttaactccgcgacattaagtgctataggatgaacagtgtacttaacagtgcaaaatagacagaaccctaacggcgatggcattttgggacaaaatcgtttgtacgatggtatttcttggaactcacacttgctaatggcattttttggatttggacgcttgtcaatagcatttcttggattatctcaaagatgatggcgccaagaccttgtcacacgttgtaagcaatccacgtcactagatggtcagctccaggaaccatccacgtcactagatggtcagctccaggaaccttggcattgatggaataagccttgtgctcttagtagccttgttggtttttggtctttgtcgttctgttttgcttttagcatcttaggacagcatcctttcagttttacttttagcatcttaggacaacatcctttcggttttgctctttagcatcttaggacagcatcccttttatgctttatgttttcctttcacctttagactagcccgcagctagcaagctatggctataaatatgtatccaacctcccccggatagtatgacttggtactagagccactctatcctgtagtctagacatctcttgctcatccccttcacgagctcccctctgtcctcaaccggcagctggaacatcggctattcctgctcatccctcttcccctgcactgacgagcagcagctcgtcagaggcaaactcttcccccacactgcaggcccccaatagcatgccatgcccgcaggacagtcttagcgctcggtcgcctcgagcgcgcggctccggcaggaggccgagctcgccgcggccgaggaacgccagcaagcggcagcagagactgctgcgatggcagcgagggcgtcaaggctgcctgcggcggaattggtggcggcaagggtggaagtggaagcagcggcggatgcagcgcaagcggcggcggcagagctcaaggctctgcgcgacaatagctccagcagctctgtctccgcctacgacatccctgctgatgagctgacgagggaggcagctcgtgagcgggtggagcaacgggcagccgcgcaaccccacacgcgccgtagcagcagcccagccgggcgtggatgcgtcggcggcgttcctggcaggagcgcgcgcggcagcggtagcccagacgggcttggacgcattggcggaccccttggcaggggtgcgcatgacggcggtgctcccggcggcaacggcttggtcgacggagatcgcggccgttgcaggcggctcgtctctccctccccggaccggtaccgtggacaccacgggattcaggccgtcatcagggaagtcagccccggcggtggttggcctgccttcaccaagaccaactacatcgagtgagctgcggtcatgagggtgaggctccaggtgcggcacatgtgggaggcagttcggtacggcgacgtcgactacgacgaggatcgacgggcactgaaaggatgatgtcctaagatgctaaaagcaaaactgaaagaatgttgtcctaggatcgctaggatgctgtcctaagatgctaaaagcaaaactgaaaggatgttgtcctaagatgctaaaaacaaaacagaacaacaaaaggcttattccatcaggcattgggcttatatacttcttaaaatattaacacaccattagaacaattatacatgtgtggtgtggtgatgagatgcctgctcttgcctcctagcaagcttagttcgaacattgggtgggaatcttttttgttttcctttttttaagtggcatgcacaccttgaatggaccagcaaaagaagactagacaggaaaaaacacccatcatgaagatttgatcacatgatttccaggaacgtaagagttcatttaaccactttaagcactcgtcaacttattatagatgatagcccattaaattcttaatctcatatgagctcatcgccaacaaaatattttagatacaatttttgtgcatcaatattgtgccatgttgtgttacgcattcctggtaatgcatatgtgagctcatatgacagttgataatgagctatattctataataagttgattaatataccaattgtttaatgacatcactaaaaaaattgcactggccaaggatcgaactcaactaggtggcaagtttagacatcttaccactacaccattcatgtaccattatgtggatgggtgtgttaatatgttagaaacatatgagcccagaaccaaagttattggcgcggaccatctagtaatgtggattttgtgccacttgtgccatggtatcaatgctaggatctttggtgacaagatattgaggatgtttgaatcccaagcaaggaaaagcatagcctagcctagcaaggagagttgcttagtattagcaaaagaaaaaaaaagtattgcttagtaaggccaactaactaccgagaaaagctcacccaagacaaaaagccaaatcggttagcatccgatggcaatttgtcgggctaaacatccaagcattgtacttttgcttttttatgccatagctttcatgggctagcttgagcttgctaggccaagcaaaggtaattgcacaatctaaatagaccatgaatattggtgctaatgatcttggagccgagattcaggtccaattattttataagttttgtcaaggtctatttataaagtaagttttcaaatggaccagattataaaagatctagtccatggtctgcttcaaaatcgagctcaatgctctttagaaatcacaacaccacttaaacaaaagcatcaatgtttatgcctcaatcaaataaacatctatagcattagcagtatgctaacaattcctaggtaccaaatgaattgtcaatgacccgagaacacttaaaaaaaccatcttcaggtttagcaacttacaactaataaaattctatcacttgtaaacatcaatccaaaacaaatctattgaatgaggcaatttcaagcaaatattggaagcgctatcctaggtcacaaaagggaatggagacaatgaatgctttaaaatcttctaggcacaggactaacataaacaggcagatacgaaaagcgaaatgtttcatccgagaaagagtaacggggcctttacttgatgccaagatcaatgtgctcctggataccgaagccgaagcatccggtgtcactgaagttcctcctgagcagctcgtactccttgaccttgagcccgctctccagcagctgcatcgccttctcccctctcaccgtcacgtagcacgcgatcttctcgttacgcctgattccgaacgaccgcacggtgtacctcgctgcaaagaaagcgccccccgcaaactctcgtcatcaccacaacgaagctaagagtaaactagagtagagagacggcaatggcggagagcttaacctacccttggagaacaccggggtctgcccgctgagctgctccagcacctgcaagaaaccggagagagaggggggttgaaatggaggttggcgaaaggagggttgggagaattttggggggaggggggttggtgaccttggaggcgcgggttaggcggtcgccgctctcgccgacggagatgttgaggacgagcttctgcaccttgatctcccgcatcgggttcgactgctttttttccgacgcctgcaccacaactcaccacacgcacgcggaagaggggtgttaggttgaggagatgaacagcgatgagtcgggaaggagggagggaggaggcgaccatggcggagatggccgggagttcgtcggcggcgaggagggaggagggaaggtggcgtggcggcgctgggataaaagagagagcgcaaccctaggcggtggctgcgaccaagaggtttctggatgggcccaattgtggtaagtggccttttgaacgacagcgaaaagaatggcccaatgcttcgatgcaaccacaaaatgggccaaaagcccaaattctaccacgtacaaatgtgcccgcttgatgagttttggattatttttgggattttaaatgttctaatggtaagaacattttattcggtatttttgagtaaatttcaaaaaactacatatactttgacaaactattataaaactatagatttaaaaaggtgtatcacaaaactacagatttaggaccgaattcatcaaagaactacatatttaaggtggaagatcaccaaactataaatttagtaataaaattatcacaacagttcatgttttgcatcatgttaagtacaaaactacacatttatcactctaacatagcagtagtggtaggaatttaagctgtaaaatatgtagttttgtgatactctagtattaaatctatagttttgtgataaattttgtgttaaatatgtagttttataatacgacgccttaaatctgtacttttataatacttcgatcaaagtactgtagttttataaaatttactcgtaattttatttgtatgagcaatcataaaaagagatatgaccaacaaagaataatctcaaaatcaaaatcaaattatattattatagattttgattgcaatccaaatatttgagggacctaagagttgtatctcaaaatacaactcaactttttgaaatcttgctctacgaaaaaattacacgaaaatatccgctagttgtaattattgtagctcgagtacatttcaatcatattagcttaactagtcgcaagataaattttagattttctcgcattgccgccgctagttataacggcatttcattctagaaaccagactagaaaatcattacaatggagaaaaaccttagatgtggtgcatgacttcactcacaaggtctaaattctgatgttcataattatgcatgtgtggatacttaactgagattgtggatgtatcaacaggctttcatctctccagttgtatgttaaaaggatgtactcgtaggtatgtgcatgtgcagtgatgcatgtacgtgcatatatattccatataattgagatcacctcgatgctttcatgtgcatatgcatacttttggacaggggcagacccaggccacgggtcaatgcctaggatttggattgaaatctcactacgtagtacaaaattccatcatgtaagttcaatcttaacccaaagtgcaatgggctagcctaggccttgaccaaggctgggtcagcccctgcctttaaatcataatgtagagcctaaatattctttctcttacacggttcccacatagaaaaaaaaaacatgagcaagtaggagtgaatcgctgggcaaatctcctttggcagatagggatgggatcaaatggaagcatcagccatatccatatccaatccatccctctgccaatggagtagttgccctgcaatgcacatccacaggctcgatctcaaccattttcctcatcagaatgcctcagatagtagtagcaagtagtattacatattgtacatattgtgattgctcgagatcgtgttggtgtgatgatgagcgaaggggcgacggcggtggcagcatttatttgctgccggaaacggcatatccggcagcacaatgctttgctgcttctccagctgaattcgagagccctttcccctttcgtcgtattgatatttgacggccgatgcggcgatgccatattgccatggaagaaaaaaaagggaaaagaaaagagagggtgaaatgccaagaatccgagttagctttattccgattttggagatagatctcgcgtctttcctggacagcctacgtggaccctgtgttacgcgacgagaggccgctgctgcatgcgatgcccagcgtttgttctcttcttgtctgattttttctttgtaaaaatattttgcagtccagacagcacatagatagagagagaaaggcaggctgccatttgtgctgtgaacagttttgcagaatgcgatgccattgttctttcgcaccaaagaggaattgccacttgcgatctcaggatgcgatgctgcctatatatctgtcgaaacatgaattcggcaataataaaacggggtagcgcacgagacctaaaagtggatggatgtggagacaaaggatttagacaggttcaggccctctcaatgagaggtaataccctactcctgtttggggatttgaatccgccgagtatgtattgatctgacgatcaggttgtctcatcatgcccctagaggggctccctgccctccttatataggttggggggcagggttacaagatagaaaccttaaccaatacggtatcggtttcctaaatctactttacaatcttatcaaaccaggactttaggccgttccataatatacagggaaacgtaatacccaagtcatgatctgttacatattccatagatataagttatcccctatagccagtcggataactatgccatgtaggtatggggtacccataatctccacagtagcccctgagaccttcacagtcgaaaagataatcttctctcgaactagattactccaaagctgagtgcttcaatcatcttcgccatggtctccgaagtacttttaccaaatacgaagactgtggagggctgaaaaataaagtcaggtgtatcgactagatgcacctaataggtgtagcccccgactatgtggttaattgaacaaaccaagcatatagtcaaggaataaataatccaaccaaccgagtggttttaataattatagtcaaccaagcgacctgatattaatatgtagcatatgcggtgtgaatccctgaataacatgatccgagtgatataccgactgctttgtaaaatatgatgagtgtaacctaaagttggttacatcattgaaaattcacatagcaaaacagctataaagaagcttatatattgtgaataaagaaatttccaaagtattgggcatacgccatgcgcacactgctttaacagatgtgcttaagtccctaaaagacacatggtttcaccacacccggaaatatatgacatatgtggtataaaatccaagtaaataaactcataaaggatttaccaaccgcctgaaaaatgaccacaatatataatcagcctaagccataatattggtcaataaaaatgcacacttacgtggcgaaaagcaatgatattgtatctaatcaattgcttaaaaacccaaacaacaccttgacttatatataaaaaagtcagcgggccagctatataaagctttactgtttgacaccttttaagatgcattgtaccaactcctaaaaagttgagtaactgcggtataaaaggattttaaggtattgggcacttgatcacgcgcactttggcctaagcaaaaagtgcctaagtccctaaaagaacgtgacaggccacacctgaaaatatgggctgcagacatattaggcctaggccaaaaaatatgccttcgacaccctttaaaggatgacgcatgtaacatgctcccaagtaataaatcttccgggtaatatagaccaagtgtagctcatatgaatagcttctgatctgaatgattatcccttatgggatactccaaaataaatataataattgaatcccgactggcgcaagtattcggttgatagcccttacggggaataataattggtccagtctttgagcatagaaaatagactcatgactatgaatccatgtggaatgtatccggaacaagtccaaattggagatataatcctcacgcttgagttgatgagcccctgagcatatagcttgtccttctgtcatagtcaaaattgtctattggcaataactgacgcagtcggcatggagatgaaatgaccaacatgaagacgaaattgctcatcagaagtaacggaagatgtcagtggtagtaaagatgccaccaatcaaatgtaatgaagttgcataaccatggaggtgaagaaaccagtcggcaacagtcaggtcagctagcagtgaagatgtaggcgcccaacaacaacgaaagaacagtcggtggtgacaaaagcaaaccgacgatgaagacgtagacgcgcatcaacggtgatggcgaaatccaccaatcatgaagatgaagaaaataatcggcggcgacaaacgcatccgacggtaatgatgattggcggcaacagagatagccgactatgatgacgaagtttcccatcaacggcagcagagttggctatgttgatgaggcttgacaagatgttgatgaagatgacgatgtcggtgatccagtcaatagcgatgtagcagccgatgataacgatgagatcctctatcggcagttgcgtagtaggccaaccgtgaagacaaataattggaggagagttgatgttgttgcccaactcgtctaaaccgaaatatttgaagttgttgaagtagaatgtctgttccgaagcaaagatgaagataatgactcctggagttgactcattggctgattaattgatttcttcagcttgacataaaatttgtcaaattttgagccttatatttgtgtagcccccgactctttggttagttgagaaacaactgaacatagagtcgagaattatagcttcttgtcgtcgagtagtcattgcttgattgaagatatgtgttgaaggtgtccaagtagaaatcctgaatattggagagtcacttgttgtagtaaaatatcatggcattgcatgccgagatgtcgaggttcacaaagacgtcgtggttggtgaagtagtaaaacttgcgaagtagcagcaatagagtttgccggtgccgaagataataaagatgaagtcgctccaccatgatgacaaagttgtattgccgtaatgaagtgaacacaagtcggcggcaacagaagcaaaccggtagtgaagacgcgtagttgtgaagataaaagcaccaatcggcggcagcataatcagtcggcgacggaagatgaagatgtagaggtaagggcactagtcagcagcagacgagacgaccggcgatgaagatgtagatgcccaacaacagcggcataataggccaatcaacactggcagaatcatgcagccatggaagtgaagaaaccagtcggcagccatggcaaacgtaggcagcttgtgttgaagatactgatgcctattagtagtgacagcgatgtagccagccgtgaagaagatagcatcagttggcgttataacaggccagccgtgctagcggtgacatcagtcagtggcggatgcggcggccggccggtgaagacgtagacgcccaacaacggcagcataataggccagccgtgcaggcggaaacaccagtcggcggcggtcgaggtggccggtcggtgacgacgtagacgcccaacaacggcggcataaaggccagccgtgcaggcggaaacaccagtcggcggcggagaaggcaagccggtcggtgaagacgtagacgcccaacaatggcggcataaaggccagccgtgcaggcggaaacaccagtcggcagcggcaaaggcaagccagtcggtgaagacgtagacgcccaacaacggcggcataaaggccagccgtgcaggcggaaacaccagtcggcggtggcgaaggcaagccggtcggtgaagacgtagacgcccaacaacggcggcataataggccagccgtgcaggcggaagcaccagtcggcggcggacgaggcggccggtcggtgaagacgtagacgcccaacaacggcggcataaaggccagccgtgcaggcggaaacaccagtcggcggcggcgaaggcaagccggtcggtgatgttctgactgatccattcctggagcgtaagagataagcttaaagccatgaatcccttttatgcatatctggatctggatcttgcagaacaaacatataggatgagtagtatctgatataaatataatactcgagaaaaaatcaagtattttaaaatatttataaatatgtatttctcctcttgtcaattttgatttccccgagcagatgactctgtacgtttaaacactctgtccgactagtcatgaccatcaagcaccgggagtcggcctaggcacttcccaaacatgcatatgagtgacatgagttcgtcattaatggaacaaagtttcacggatcagaatttactactcgggtacttttgcaattattaagagcagaaaataaatttatctcatctctatgcttttgatttattccgaataatacttagcaccttgcgttactcggtccatccaacgagcccccgggtgctaggaatcggcccaaaggcaaccatccattggcaaaccaaacggaaagcataggaagatagaactccataactcgataggtacttttgtactcagattatgtcgcaagcaatcaagataaatattatgaaaaatatgatataacatctgtagcccccgactcactactcaatggaagaccaattggtgtagtgaggcagaggaaaaggaaaaatatcatataaagaataaaataaatgatgacttagctttgtaatattccccttggtgatggcagaagtggccaatgtgggaacaaagtcgtccatcaataacaatgaagacaccagtcggcggcgacgaaggcggtcgacggtgaaagcgaagatgcccactaatggcggcataataggtcagccgtgtaagcggaaacaccagtcgatggcaacgaaggtgagccaacggtgaggacgtagacatccaacaacggcggcataataggccagccgtgtaggcggaggcaccagtccgcggcgacggaggcaggccggcgatgaagtcgtagacgcccatgaacggtggtgtgaccaaccaaccgtataggcgaggacaccagtcggcggcgacggaggcaggccggcggtgaagtcgtagacgcccaacagcggcggcataataggccagccgtgtaggcggaggcaccaatcggcggcgacggaggcaggccggcggtgaagtcgtagacgcccaacagcagtggcataataggccagccgtgtaggcagaagcatcagtcggcggcgacggaggcaggccggcggtgaagtcgtagacgcccatgaacggtggtgtgaccaaccaaccgtataggcggggacaccagtcggcggcgacggaggcaggccggtggtgaagtcgttgttgctatcagcaatggcggtggcgaggacaagccggcggagtggactcgcggccgatcgaccggaaagctgagacgcctcgagtccatgaccagcatcaatcgcctcaatagtgccgcgtagttatatgcgaacaacaacaaaaaatagcaagaaattaatctgagattagaaatcaatctaatatatattgataacaaattgaaacgaaaaactcaagtcgagcagtgaggctggatcatgagtgatagccggcgacgtgccatgcaacatgtataagccccggcaactaacagctaactcgatgttctttcggcatgatgccatcatcggaggtagccggcggagcccatcaaccatcatacatgcaaacaggaatcgaatcctggcggcctgtgccactcctgcaacacgtccatctgcaaggaaaggaagagaggagcactcggacacggcaagggcacccaagtaggcgacgatgatggtcgtgtttcgatctcatccagtatatgaaattcgtcaaaatatcaggaaatcaaacaatgattaaaaattaatctaatagagattaaattggaacggtagacccgattgaagatttgagccatcgaaattgatgagattgatctcggggtttcttctgaagttgattccatcgcacttttcgacaggtaattcgacgcaccccctacctggcgcgccaactgtcgaaacatgaattcggcaataataaaacggggtagcgcacgagacctaaaagtggatggatgtggagacaaaggatttagacaggttcaggccctctcaatgagaggtaataccctactcctgtttggggatttgaatccgccgagtatgtattgatctgacgatcaggttgtctcatcatgcccctagaggggctccctgccctccttatataggttggggggcagggttacaagatagaaaccttaaccaatacggtatcggtttcctaaatctactttacaatcttatcaaaccaggactttaggccgttccataatatacagggaaacgtaatacccaagtcatgatctgttacatattccatagatataagttatcccctatagccagtcggataactatgccatgtaggtatggggtacccataatctccacaatatctttgttatatttaactagaaaggtagcccgcgcattcgcgcgggcatgtatcgtaagctgcatttgagatactcgtaagtaataggctgattgtgttaaaatgtcgtatttgttgtatagtaaactataggcatatggatcttatatcgttggtttgattataaacagagcaatagttagattagaaatcagacgtgaaacttataattatagattatttatattttagttaaataggaacgtaagaggaatgaaaagtttagagcttgagccagagaggggaaggagcggctgtgtagtgatgggcgcgtgtggaggggattttttttttaatttttctaagtgattaagtgaaagccaattattagatgtaattttcctaagatttgcaagatttttttaaaatatgtgacatgccacttattaagatatatttttctaaaagtagattagatagttgaaaataatgttaataggtcatcgatctaggtgaaaaccgttagctagatgttttattttttttcttttaatatataagattttactaatttttaaaatgtgacacttggtaatttagcatgtatctaaaaggtcatacatggtgactttgtatttttctattttttattatgtagaatgattaagatgacataatacatattgtcaaattttcaatgtttcagtgttgtttgcttgttggtgtatgttcaaattacgtattttaaattttacatagtaaaatatgagtaacataaataaacagttcaaataaattaaaaataggatgttatttgggttgtcaggtaaagaataggtggcagttcaaataacatattttattttttatagtgaaatattggtaatattgattttaaattatttagctgtctagttatgaaacaaccgttcaaacaaactaaataaaaacagatatactacatccgttttatattataagtcattttgacttttttaagtcaatttttaagtttgaccaagtttatagaaaatatagtaaaattttcaaaaaaaacatattatggatatatatggaacgttatatctaacaaaacaattttgtgtgatagatgttgttaattttttttatatatttggtcaaatctaaagaaatttaattaagaaaaaagttaaaatggcttataatatgatatagagggagtaactttttaaaattatgattattttgctatgtaactattatcttttttctaaattgttagttaaaaatagatttgttatttataaaagcatgcatcaaatcattaatcatttatatatttaggcatgggacatgcaatcaagagtccacatccattctcgttagatagaagtgaagaaattaattattaagtaataaaacaaaaatcttaactaccatacagaaaaaaggaaagagatgaggagaagggattgaggggaaggagatgagaacgtactgtagtagttgaggaagaattttttttatgagataaatccaattggcccaccagttcaagttatatatttttttctaatttattagagtgccacgtgatggcttatgagtgtttataggagtctcacgtggcaacttaagagggtttataggaagtttaatggacttttagtatataataatagatagatagatagatatataatatatgttgttaataagtatttaatttatttagatggcatgcaaacttgcaaaatgcacagtctataccacaataacatattgcttatatatagcaaaacattggatgtaaaattgtcaatttaattataaatagagcaacgttttaatagaatataaattagctatgtacatttaaattattttaaatggtcaacttaactcgtttttaatttgataacataaaagaattaggaagagaaagagatggagatataaaagaataggaagaggaagagacagggagagcgtactaagttcttatgttttttctttttccggcccacggttatacgaagccacacgtacgtacgtatgtttttttttctttttctggcccacagcagaggaagggattactttattgggtccaccaatttaactaaaaatcgacggtgagattatacagtggtatgtggcggtttaggagtgtttgtaggagtgacacgtggcagattgaaagcgtatgtaggaagtttaagccacacgtacgtacgtacgttttttttccttttttttggcccacagcagaggaagggattactttcttaaataatagatctaatccaatggtctaaaatatcgggtccaccaatttaagtgaaaatcgacggtgagattatatagtgccatgtggcggtctagaagtgtttgtaggagtgacacgtgccgaattgagagcgtttgtagaaagtttaatggacttttagtatataatagaagatagatagatagatagatagatagatgtgttgctgttcgttagcaacaaactaactttgatttgtcatcgtgttctttttattaaaataaacggttgtgcaattatctctaaataatatatgttgtactgagaagataaatatatattgtattgatgatcatgagtgctagtgagttgatgtgtgtatcttaaatttttgggacaaattgcttaaaattgtgttcattgattgtatttcttggaataggatgtttgtcaatggttatattttctctttcaattactgaaatcaattgtttaagtataggtgcatagccagaaagagttgcttatcaatgcccatgatagctgttagctagagagagacatggctgtgtaaaaacagttgaaagggccaactaa

SEQ ID NO: 6443 - DNA, 22685 bp, Oryza sativa
ctctcccgattcgtagccgccaccgcgtcgccgggccccggatctcctctcccgcctcgcagccgttgccgccgccgcctcgtcgcccggcgccgcgtcgcccaccgccggatctcctttcccacctaggcacggcgacctcctcccctcccaccggccaccgtgcagagagaagcaaagtgacagagagaggggatgaagggagaggagggaaagagatggtgatgatgtggcatattgacatgtgggacctatgtgggtcccacgctgactcagccgccacgtcggacaaacctgggtccaaaaccaccgaaggacctaaagtaaacggtttcgtgagttaagggatatcctatatccggttttgtggttgggggatgattttgtaactcgatgataagttgagggacctctggtgtactttttccttccatttttacctcattgctgtcaaactgctatcaatgctaatcaacatagtacaagattgcaatatttcattttttttttcacctacaagcaagcattaactcaagggactgtccaccagttgatagaaaccctttagaaatcatgtaaattttaaaccattcgattactttaagattcatacaaatcaatcaaaccctaaaacccatttgttcctctctctctccgccccccttctcccaactcccccacacgctgccaatgctatcacaggcgtctaatcgcgatctgcaccatctccaccaccttcgccccagcgtgccaaggtctggctggccgaaatgtgtcaatgactctggcaaggcctcccaatcttgccttctttcactccctctcctctcttttttctcaagccagcggggtgagttgcccccgctcagctagatccaccaccactgaccgtcgcttctaaccattccttctgctttgtctcctgcagccaacactagcccgtcgcatgcttatgatcccgtggcttcggcggcgccgcggctgcctcgctgctcaccacgggttaccctcccatgtccgttcctctaaagccgacgacatccccccttccccctccctccaccccaatgaccctaatccgtaggtccctagtgaggcttggggttggaaaagatgaggaggttgtttgagctgaaggagaagggtggtaacaggaatcacaaaagcacatccgatgatacaaaatctacaacatttggaagtccattttctatcaatgaaggttagcagtttcgttaattcaagttatcgacaaacagggtgcacgattgcaaacaagaaccgtcagccataatctcaaaggaacaaagcggctattaattacactgaattgaacacatgaaacgccacattcatcgatcgaaaatgcaaatacgtacaagatgacacactccatttaattaacacaaactaacagtttgaacttgaacaaacactgatcctaaattatcgacagcaacgacactgcttgaacaaccctgaattaagcaagttaattcgagcaatcattaatcctaaatgaaattacaatcctacagtagatattacgcgcttgatagtttatcaaagtgtcaaaccaagccggccatggccatcgcggcagccgacacgacgggagcgaagaacgacgccgcggcgaacgcggatcccgccgccgctccggtgtcgtagtccgtcgacggcgccggcgctgctgccggcggcacggcggcgaggacgttgatcatgagcctctggccctcgttgcagcggccgaggtcggggctggcgaagtaggcgaagccggggacctagaggtagaacaccctggcgccgtcgcccggcacgggggcgtcgccggcgtcgacgccggccgtctcgttgcagtggtagtaccccgccttgctcaccttgatcaccgagtcgttcctgtactcgaactctgccaccacacgccatggatgcgaatgcgaatgcaaaattaaagaagaggagatcgatgacgagttgacgacgatgagatgaaactgccgttgattcgttaccgatggagtcgccgacgtagaaggcgatggacgacgcccaccgggagtagtacaactcctcctcctccggcggcggggcgatccacccgtcggggccaccgacgcggtactgctcccctgccgccgccgccgccgcgccggcggcgaggacagccacgggaggagacggagacgagacgaagccgcgacagccgccatgcctgactgactgatgaaagcgccgatcgatggagcgattgccggagatcgaagaagaaagaagcggaaactgctcgtacgtgtgattgatggtgtgccgcggcgatcgacagaagtggcaagaatttataggcggaggcgcgcgatcgatcgatcgagccgttgagagggggagcgtcggcggcggttgcgtcaaaaagcctcgtcggcgccgcgcgcgcgggagggagtggagaacgtggccgtttgaactcggtcgtctccgcgcgctctgcagttgcatatgcgatgcgaacttgttcgtgtctgcaccgtgaagacgaggtttggaattcagcccatttgtttttcgtcaacaatttcggtccataggggtgtatgggcttgaattacggcccatacatgtggaccggtgggccggccctttaacgataatgggcctggagttgtctgttcattattaagctttggaataagttcactttaggtccctctatttcttcgtcagttcgattttcatcccttaaccgcaaaaccgggtataacccgtcccccaacttacgaaaaccgggcaaacgaggtcccctagcagtatggagcgtagttttaattgactgacgtggcacttgcatggctcctttgactgatattcgtcccacgtggcattgacatggcgtttacatggcaattttatccccacaaaataataaaaatcgtgggacccatatgtcagctacacacaaaataattcctctctctctcgcagccagagcaagcgatgggtggggccgagaggggcgggccgggccgcaaccggagtaggccggcaaagcggcggcgaccggagcaggcgaggggcaaggcggcgctccacgcactccctcttcttcatcatcgcgccgcggcgccgcctcacagccggcggagcggcggcggagcggagggccaggcggagtggcggggcggcggcatgccgcggccacgagacgagcttgtagatgacacggctccccgtacccatcgccacgaccgccgcggtggcgattgccatgtccatcctggcgctcctcccaaccccagcagcgctccccaccaccttccccgccgtcgcgcacctcgccggcgcatactccctagggtcacccttctcgttcccaaccacaccgccacctcgatgcaccgcacgtgcgccacctgcatcacctccctctgcctcatggtagggaggagctccatcgccgccgccgccggcggtccgttcgtcagggatgcaggtatgggttgctccgctcccgccggtcgccgtcgcgtgcccctttggccaccgccacgacttctcccccgccggccggccgctccgcccctctgctccgcccacgacgcaccgctcctcctcttcttccccgccgccgctccggccgtcgaccggccgctgaccaccccacttcgcccattggctccacccctctgctctaccaccgctccgcccaacggcttcgccacgctgctccggccacccctctactccgcccaatggctttgccttgccgtcggccgcccgcctcgctgctccggccgccaactggccgcttcgcgccatgacacggcgccgctctgaccgccgaccatccctatgctccaccccaccgtcgcccgctccggccgccacccaccacgctccgccggcttgagagagaggagggagagagaggatagagggagaggagatagagagaagaggtagtgatgatgacgtgtgggtccacatgggcccatcattttttattatttgtgtgtgaaactgacatgtgggtcccacaagttttattattttatcggatctaattaccacgtaagcgtcacgtcaacaacacgttagacaaaaacctagtcaaaatgagtcacataggtgctacctcagccaaaaccagatataatactgttgaggggcccatttaaactgttccgtaagttgggggacccgtcgtatccggttttgtgactaaacgaaaatcggacaggggcgacaaatggagggccccaaagtgaacttattccttaagctttttaatggacctctgttaagacccacaagtttatgtgggcctggtaattatctggcggcccatccagaattccagacaaggctagtcaactcggcaagggtttcctcgccgttgccgtcgccgtcgccgtcgccgctgccgcttccgcttgcgtgccctcgtcgccgtcgaatcgctcgcccgtcggtcgggtccggtgacctcgctgcctccgagatcctcctctcctcgcctgcgcgctcttcccgtcggctagaagggctgcttcttccgtcccggctccgtcgccatccccccgccggcggcgacttgggcggcctcggctacttcgcccttgttttccggccaagttgaaggttccggttccgtttccgatcctcaggtaaaagagcacatacttctccaatcatttgaatagctaacagcaatccattgtgcatttgtgcttcatgcggctacggatgtatccatcaattagttgagagataggatcgattcactgtgtgttctactgatgtgtaaatgccgctatgttctgcatcatctgtgctgtgggatttgctatttctgttactttgatgcggccgcggtaatgtataggagtaggaaggatttattggcatttcaccaatcgtccttagttaggtagctgatgcgacgctgaagttggctgcactgcctcaacagtataactgagggcctttccttgaatcattcgtgtgacttctttcacattcctctgttgtttggaggaataccaagggggatgggctcatctgtagagtattttttaaaatatagacagtagcatgtgttctggatcataaactatgcgaaattgcgagccaaaattttgatgcaaggttgctttgttacaaatatgatctgtatttccttgatttaaaattaagttgttgtgtaatttgttcaactacaaagaatgtaaaatcttgggactcggattgttggcctgtatttcacgcataaaactacaaatattgttatgcttttgtttaactcctcaggggttttgcagccagcactcgaattttcatcattgttttaggcatttgatattcttatcagttcatcattctaaaattaatctactcggattctaatagattttgagaaaatggatcctgaagatcttactgactctgaggaagatgaagatgatgacatgatgttttttatcttgcctacactatatcttgtttctactggaagcgaagagccatgtcatacatcgaagttcagtggtgcagagtggatttgtgaagtgcttgaagatgaccgtggtgaaggctatgccaaatttcgaatggagcctcaaattcttcagaaattttcagaccttcttaggtcaaagaatcttttgcggaatacaagaggcgtttctgtggaagagcaaattggcatgtttatttatatgctctctcgaaatgccagctttcagaaaatgagtgatagatttgagcacagtagggagactatccatagacatatcaaggcatgctttgatgcaatcacctcattgacagatgagtttgtcaagcatccttcaactgagactcattggaaaatatcatctgatccgcaatatgggccttattttaaggtaggtttaacctgtctctttgcattgtatgaagttctacacttctctgctacatctgaatcagtagtgtgtttccttgcagaactgtataggggcaatcgatggagttcatgtacctatcacaatatcagactatgaagcagctccatatcgaaatatagaagattccctttctcaaaatgtgatgctggcttgtgactttgatttgaattttgtccatgtgtgcagtggccacgaagggtctgcatccgacgcggcagtcctatatgctgctgtggagtctggatttgaagtcccaagtaacaagtattatttggttgataggggttatgcaaacacaccatcttttcttgctccttatagagaagctgcataccatattgaagaggaggagcagagcaattgtcagccaagtgactacaaggagttgttcaaccttcgtcactcaaagctgcgcaacaacataaagcgtgccacagcgctattgaagatgaggttcccaattttaaatgtcgcaacattctatcagatagaaactcaagcgaaaatcccagcagcagcagtggtgctgcacaatataatgcagggccaaaaagatgatgatgatgatgatgggtgggcatttaaccaggcaatgccagtttcatcccgtagaactgtagttttacccagtggggatgatgcttatggcaatgatgtcgaagaactgaacaaccaatgtagcatgggtgatgcttgagagattatattgcgaagaagatgtggacagattatgaaaggaacaggaggtaggtttccctattctgaggccaaacaacatataggtgaaaggaaagagctgctcatgtgtgatttgtatcttgaattctgatgtttatggttaaagatggaactaggcaatgccctgtagaagctgtactcagttgacacccaccagtaagatatggcattttcatgtcctccatttggctatcaatctgtgtggatgttgtggttgccaagatagtgccttgctagcaaacatggcgtggcatttaactaccgccacgccagtataaatggcgtaacaaaagaggaattgcctatgcatccgtcgggtgatttttgagaaaaattatctccctttagatttgcatcttacggactaaaaaaataccaactagaaatttcaattgtcaacaatcaacaaatactataaaatttccaactaataaaatgcttaacacgctcaggcacagcttccagattacacccgaatttaccgtacgtaacctaatttaccccaaaatcacacgaatttaccctcggggactcaaaggtggagctgaagtctagctaaacagtttcagctctatttaaaatgagtgtggagctgcttggagtgtgttctcacaaaatgaattagagaaaatgaactacagaggtggagctgggtttaggctgctctacaactccactctaaacccaattcctaaagttaaatttatgagttggagctctaccaaatatgtctatctttcctaagtaagatagaatatgcgatactatttttatatttttctttattcctgtgacgtgaaggctttactagtagtagtactttgaaaacagatcaagctgcatcccggcaacaaatcattgaactatacaagaatttttattacatgataggaattgctgcttgaaatgcatcagtaaataacagtgtgcaaatgtatcgtgttgtagcagcaaaaacatctgtagcttactgctgtagtgatcaagaaacttcggaagataaattcggcagtgctgcagacaccaatttattacctaacgttcatgcttcattcctcagtgttccacttctattgacaccattttattacctaacgtcaaatgctcgtggcgaaaaatgcttcctttattgacattacctcactatatacatcatgtatcaatggccgatcttttggcgactcttcagagcattccaggccaagtttaaggagttgtagagcacagatatccattatacctgtcttgtgttcatgcaattgcagggtatgattagaaggttgttctgtcatttcaggaataagcctggggtcaagtatgtctttgatctgtgaaagtgatgcattgacatacatgcggagtgtgaagccatcagtaaatatttcattggtagggtgtcttcctgttagcatttccagaagaataatgccataactatagacatcaccctcagttgagatttgactgcccatgccatactctgcaatgttttgaaaccaaaaagctcagatcaccagtaaaatgaaccatattgttaatcataaaatactgaagtcctttttattaaatgatactctgctttgtttgaaaacaaaagattcagataaccagcaaaatataggagtaccatattataatcataagagatttttttagataatgggaatttttaaaccccgcttctacagcaacgggggtgtataatcataagagatataatcgtaatttcgttatattaaataaatgattttctgcagtgtgctctgaaaagtgaaaaccaactcaccaggagcaatgtacccaatagacccccttggcccagccatgcttcttgatatgctttgagttccggatgaatattcacgaattgaccttgccagaccaaagtcacagacgcaggcaacatagtcatggttgaaaagtacattgcttggcttcaaatcgcagtgaacaacaggtggaatgcattggttgtgaaggtattctagagcagaagcaatatcaaatgctatgctaatcctttctcccaaactcaaatcaccacatggatcaaaccttgtgtgtagtcggctttctaggctaccattagccatatattcaaatactagagccttgaactcactgcccatcggatcataagttgagcatgcagttatcaccttgacaagatttcggtgacggatgttcttcaatgctttgcactctgccataaagctatccaatgcaccacactgatcgagcttgaacaccttaacagcgaccatagtgtcttctgtatccagtatacctctatagactgtcccaaaatgcccagagccgactatgttggctgcagaaaaattatttgttgctttgctaacatcactgtatgttaactttttcagctccatgtaggagtgatctatgtgctcattggatttccccttccttttcaggaaaacatttacgatcaacaaatataatccgaggattgaagaaagtaagacaatagatgaaaaaactgccaacattggaataacgagcttatgctttcttttggatgctgaagcagagcagacagtcaactcgtccattggaacattggtgcaaaggtgtggatttccttggacaaacaccttatctctgtcagaaaatattccaccaactggaattggcccctcaaagttgttgtatgacatatttagatactgtaatgaggtgaaagtcccaaagaaatccggtattgcaccagataaattgttcgcggagaaatccagcactttggtgcctctgaggtttgctaatgattgtggaatacttccctctaggaggttgcctgctacacgaagtgattccaatcggacgcaagaaccaagtgtagatgggatcctgcctgtgagtctgttgtgggaaatgttcaaagaagcaagatttatcaggctaccaaattttagtggtatggagcttatgaattggttgtgtgataaatcaagtagccaactcaattgatttagcttgacaaacatgtctccgcttatgcttccagtaagggcattacttgaaaggttcaatgccaacaattgttggcacctcgctaaagttgtaggtattcttccactcagttgattttctgataaataaagttcagccaattgattcaagttaccaatggattgtggtatttctcctgaaaatttgttttgtgaaaggctaaggacaacaagattgtttagttggccaagagtatgaggtatgctccctgtcaatagattgttatcaagatagagtagggacatgctagataggttcccaatctccaagggaatggtgccagatatatagtttgacgggagagcgagtgaagttaatgttttcggcaggtcggctacagagctgggcatgtccccacgtaggttattttcaccaaagtgcagtttcagcagattggagcaatttttcaaggatgataggaatgcccagtctccagcttctaactggtttgagtacagcatgacaacctgcaaatctgtcatcaaactaaaagaaggaatcacccctctcaaagagttgttggccaggtacagaaactgcatgttggaagcattagctagagatttagggatttctccaacaaaatggttgttagacatcatgagaacttggatgttaggaagtgtgtttcctatgtcaggaggcatcatcccctcaagattgttgttggccaaaccgagaaaactgatggacgacatgttgtaaatggagggatttacagccccagaaagattgttgtaagagaggtcaagatattgtagcgccgacagcttactaaaatccggtatacttccctgcaactggttttgtgcagctaaaaatgctgtaagcgatgagagattcgctagagatggtggtatgcctcctgacaggctatttgttgtaagatcaaggttggtgatccgtgaagtgaacatcgttacgggtggaattgcaccagaaagattgtttttcctaaggtatatctccctgatggttgagctgttgaaaagtgctgcagggatgctcccgtagaggctattgttcttcagtgaaagatagcggagtgacgacgcattagccaagaacaatgggatctctccggtcaggtagttgtccgcgaggccgacagactccaacgccgatgagctcccaagcaatggtgggattctgccatggaggttgttgctggttaggtccagggatgagaggttaggaagcgtaccgaggcctcgtgggatctcaccactgatcgcgttgaagctgaggttgaggtactggagcctggccacatcggctgtgaatgtgaggccacctgagaggccattgttggggaggtggattctcgcgagggacgagaggttggagatgcagggtgggatctctccggtgaggcctcctgcctccatgtccagggccacaaccacacgaggtcgttcttggagcttgatggagcaagtgacgccgcgccaggtgcagaaatcgggtgagatggtgttgctccatgtggagaaggcggacccgtttgggcttgaaagatgtgatttcaggcaaagcagtgcttcccgttcatcagctaatgctgtcagggtggagaagaagaggattgcagcgactgcaaccagagctgcacatgccatcttgcttaatttgctggtgtgtattttggacagtatgctggtggtaagttatgagatgcttgtgattcttaattatagtggactaggatgcgtcaagatcttctacccattaaaaccatatattggccacatctttgacccatgttgattgttggatggtgccatattcttagtcaaatagtgaatgcattaattcctgttgaacatgattaggttgcgtgcatggacttaattacggagatcttgttgaattaagctttgactagattgttttattatgcaaactttcagaccttatttttcagcaaaataagtaatggtaccttattagttagttataccaactgacaatttgcctgcctacgtacattttccaacatccgtctgacggtattttgcgacgcggtgtagaccagttctgaacttctgatggttcatttgaaaagcatgatctttttccaatttcacctaacaatccacaaagtaaactgtgctatcaaacctcttacatattttgtgcattagacaaacacttttgtcctatggtgccctgttgtcaggaaaaaggaatatcaatgctttataaaactaattggaggaacatgatggatattaattttaaacgtatttgttattttctttggcagatcactaatctatatttgtagagcttatatcgttattactttggattatgtcatcgaacatgtcaatcatgggaaaattgtcactgtccacaggtatgaaatagttgaaacttcaagaatagaaaagtaagaacaaatttacgtggtaatttcctcgacaatggaagtccattccattacattagtcaacacatgatctgcctcaaagtcgtatgaaattgataagtctggaaatttcaccttatcctttcgataccaatgatgtatctttgacatttgtgactggtttaggcccagtcactgctcattggtcgttgataagaaaacatcatataaaaacttctaaaatttataaataattagttataagttcaaatgcagtggctctacattcgttagactcataattttatgatcttaattactctgaattaaatgtagaacatatagtactactccctcagtcccattttaagtgcagttatgggtttctgttttcaacgtttgattgttcgtcttatttgaaaaatttatgagaaagttaaaaaaagtcgcagataaagtattattcatgttttatcatctaataacaataagattgctaatcataaaaaaattcaaataagacagacggccaaatattggacacagaaaccaaaaaaatacacttaaaatgagacggatggagtagagttaaaacttctaaaatatagtatagctagtaaatactacaattggtcacataacttgtaaaattcatactagctctaaaaatggaaaactcaacggggttgaatttcatagaacacactctttattgctgtaacccaaatctttatagaacttagatataaactatacttagaattatttaacttaaataaagtataactaacatagagcttggtaaattcataactcacaaatgctaagtgataaaatagaattattgcttaggttagaattgttgcttaggtttgagtgatgtgggaatagttgatcttcaggatggttctactaggggcctacccctagtcggtttgctgtgtgctaaggtagataggcttttcactgaacctttatctagttgtttctaagaccatgtttggaaccagggactagagtttagtccctgtcatatcgaatgtttggacactaattagaagtattaaacgtacactgaactacattggacatatagccgattgctcaaaaccctagcgacatcggctggaattaccccattagcttgtcagccgattggctctttgatctgctatttatatatcttgtcagttacaagatcgtactgactggcacgctagcatatcatctattttaggacctgtattggagttaagcggatctcccaggccttcgtgtttttgtcgacttagttcgcgttaacgcagatttggcactatcgaccgagcgcggatttttttatcaacactaccttgtcatatttggtgattaaagaatggaacggctttgattcaagttactcctgacaagtaatttgttttttttctttttgctgataaggaacgtaactttaatttttttccttaattgattctctcggatcgctcaatgtgtacgacttctcaccatgacattgattgtacatttttctaattctacttgtcataaggcttatgtggagctcatggtagaaaataagaatggcgtacttgtataacatacattgtaaagtcaaaaatcggattcaagaagatagctagttataaaactatgatcaagatatgcatgtgtgtggaaatgtgaaagtgaaatgataacccctttgtatgatcctcctccttgcacttatttagtgaacatggctatttttctcccttttttttttctttttttcatgctcgagaatattttgtctctttttctttgtgagcatttctctttttctcatcaacatttttttttggctcatgtctcattttgtatgaatagttagaggtaggattgtaagcgtatgaagtctttatttggtggatggatgactgatgctgattttcagtgtagaagtatcacatatggtagatgcatgcatgacatatttttgctaacctctagtgtagagggtgagaaaatatagtgggtatcagtgttaaggataaaacactgaatatagtaggtatcttctatagttgggtttgtactatacggaagtaccatatacctaattatacatgggaatgtatcttttgattaagagaatacgataaatccaaaaagaaattgtcttctcgggatagaaagtgtcaggaacccaaccgagaatgctcatgttacattctcaccccaaacgtggagcgttggggaccgcatctagatttgagagatattttgcagtgcgccacctcccaaaggcatagcggtggcgcctacttggcgcgtgtgtgcctccagcgcgcgtttcggacgagaaggtatagttagctaatcaattagttttagataattacaatttgaaataatgacggtagtagttaagattttttttcatgagatttttctaactaacaaattgaaaagaaatctatacctgaagtcaaattttcaaaattttaaatctagatttgaaatttttaactcgaaatttaaattttttaagtcaaattttgaaaactttcaacttttcatcttaaatttgaaaacctttcaactcaacttcgaaaactttcaacccagatttgaaaactttcaaatctagatttgaaaaaattcaagtcaagtcaagatttgaaaactttcaagtcagatttagaaacttttaactacagatttgaaactttcaactcagatttaaaaactttcatctgaaaattcaaaacatttaacttaaatttaaaaactttcatctcaaagttcaaaaattcaactcaaatcttaaaaattttcaactcaaatttgaaactttcaactaaaattgaagatgaaagattcaacttctaaaataaaaaaatcacaaaaaaaatgcaaaaagaaacgaaaaaacacagacggtagcttttccaggaaaaaagttacggacgtagacgctacgcgtgagccttatgggcctaaaaacgcgcgcgcccgaattagctctcgtggcggaagttctgcatcgcggtatttgaacggcggcctgaagccgcgtcctcatgcttcgccgggattgcgtcgcctggtggtattcttgattttctcaagtttggccgtgctatatgtgatgtcaggaaggatgccatcaagctcttgctgttgctcgctgtgttaatttgattctttgggcaagctgagagcctgagaatggacttcaacggttgttcggtggaaaggcatgtgtcaaaacccaaaaccgaatcagggagcttgtcaatagggtggtggacggttccgtggagatatttgaggaattgctcgtgcaggtagagctgcagtgcaatatgcatgcatagctgcacatgacttttttttctttttcttccgcggggaagctgcacatgacacatctggctggtgtgtattttagacaatatggttgtggacgcagtgtgacgtcagcgttcgatttacgtgcaaaactattttaaactgatttttcttctaaattacttatccaaatcctgatctaattgcaccattaatttcattacaattaaacttcaaaacaagaccacacgtggatatattccgacgaaaaaaatagcttattattgaattatttttaaatattgcacgatgttccaccaggtatatcggaattgtttcagtaagtagatcgaaaatgtttcactcgtttaaatcagatgttgtttcaccttatataaaaacaatgtttcagaaaatagcgaaagaatgttttagttcactgcaacattaaatctatacatagtgaaacattgtgagtacactatgtgaaacatttttcggtggaataaaaaataaatcaaattcccttaatagggggtttccaaaatacgtggtttttttttttttgttgcaatggaatgtttcgttcactacaacattagatttatacatagtgaaacattatgagtactctaggtgaaacatttttttgtggaacaaaaaataaaccaaattcccttaataaagagttttcaaaatatgtgggttttttttgcaaaagaatattttaattcactgtagatctataaatagtgaaacattgtaagtatactagttgaaacatcttttgtggaaaaaaaggggagggagaagtaggtgggtccagcagatacgcatgtagggggaggggagcgcccgatccggctccccccgcgccggtcgctcagagtagagcattatcgtatggttgtaagttgagacaatcgtttatttgacaatatttcaaaacctaactagtaatctagactttttttttttttgcttatttgaccctgcttttcacaatgaacacctgtctgactctgctttcattgcaccgttaaagtttcattaaaaaaagaaaaaatatataattacttttcataatgaccaaaataccctcgaaaaacccaatccacatataaccatgtcccttcagatcccctctctctctcttgtatcccgtctctctctcggcgagtggtggtggcgacacactgaggggataaagcggcggtgttggctcgtcgagggagggagcggcgggctatggagggaggggatccgcaccagcaccggctcgcgaagggagggcggcgcggagaagcggcgctggctcgtggaggcaggtagcagcagcgtcggggcgcggagggagagagcgccgccgtagagggaggtgcacgacgcacggaggggataagcggtgatgtgcctgcatgtggagggagggcacgactgtggcgccggtccgtggagtgaggagcggcgatggtgccggcgcggggagggaggcgcgggtggtggtgcgcttgcgtgtggagggaggagggggcagtggcgcgtggagggaggtgcgggcggcggtgtgccggcgcgtggagggaggaggcagcagagcgccatcacgcggagggaggcgctggcagcgttggtgccagtgcacgggggagtggcaactgttgcgtgtggcatcggcgactactgttatggcacttgccgtgaatttgttgtttggttatcatctctgttggatttgactataatttgtgtttctacatcattgtatgcaatttgcacggctgcacaaccaatctttaccactggttggcaaccatctgttgtcccagttatacaaccggaacggtgaattcggaataaatatcgctatctttagtcccggttcaatcgatctttagtcccggttggtgtgatgtggtcccggctagagggttttttccttcttttttttcttctctctctttttcactgttcttttgctatttgcccaaatcatctcagatcaaacattcatcattcacggtaatatagttcatcccaaatcattcacaacaacacatattgaatcacacggtaaggacaaaagaaaaaaaaatccaaaagcagcgccggcctccaccgcctaccgctgcactagccttcgcaccggccgcctcccccttcggatccggcggtggccggctgcctcccctcccagatgcgcagccgcccggccgccgcggtgcgaggccgccgccgccgctgccgcctaggggaggaagagaatgaggagaggaggaggaagaggaagagatggggtgaagaggaggaagagataaggtgagggtggaggagatagaacttattaactgatccgtctcctcctcctcgatctcacgcatgcctcagcctctccgccgcgcatgccaatctttttttccggttggtgtaactaaccgggactagaaatatatctttagtcccggttggtaacaccaaccaggactaaagataatagagaggtctgacattgcatgttgttcttttaaccaggactaaaaatgatctttagtcccggttggtataaaaaagtagctctaatctttcgaaccgagactaaagataatctttaatcccgatttttattgcaactgggactattgtggtttttgctcgaccgagtaaagatggtttctccagtagtgttgggatccacaaaataagacaatatgctgtcaaaattttgttaaaaattctgccaaattttatttgccttattttgtcaaaaatccgtcaaatttaagtcaaatttgttaaattgattcaaaattttcaaatttataaattgaagccaaatctgtcaaacttatctctaatctggtagatatacagaattcgttacaaatatgtcaaaagatccaaatatatgcacgttttgatgtaacagggtcaaataagtagagcaaaaggggccatttgccctttagttaacaccgttaactcgctttaacggaattgggtaagcattcatcttcaattttgaaaagcatggttaaataagcgaactaaaaaaagtatagtcatattaataagttaagcttcgaaataggataaaatgagcaattgccccttttaagttttgagatgcttttgattcttatagtggactaggacatttcataggcttttagtcaatatgattttaagatggcgtagctgcagatgacattttctacccatgctgattgtttgatggtgccagattcttaggtcttgtttagttgggaaaaaattttagggttagttgtcacatcgaatatacggacacacatttgaagtattaaacttagtctaataacaaaataaattatagattccgccagaaaactacgagacgaatttattaagcctaattaatctatcattagcaaatatttactgtaacaccacattgtcaaatcatggcgcaggcttaaaagattcgtctcgcaatttacacgcatactgtataattggtttttttttcatatttaatactttatacatgtgttaaaatattcgatgtgatgggtgaaaagtttttgttcgggaaactaaacagccccttagtcgaatagtcaatgtattcctgttgaacatgactagattccgtgtatggacttaattacggagatcgtgttgaattaagctggaataggttgactattgtttcgataatgcaaactacattaagaccttatttttccgcaaaatgataagtccttgttagtaaaatcaatggagagaacttccggcggtctgactggacctgtacgggcagtctaaccgggcttagaaaccatgacgtggagcaggaaaccaccgagttgtgcgaatggaagtccattgcattagttaacactctcttaataaattaaatattatgaaaataataatttagaaaaagtggtataaacaatgaaatcaaagaaacatttttgagaaaacatttatttttaaagatatccacaacaataattcgatatataactagctgaatggaaggtgtgctgagcggctcaatagtcaattctcagttgtaccggaacgctttaaactttcgaagaaacttcgtatgtattttaacttgtccacagggcgttgaacagattgggaagatcgcgaagaaaaaacatcacatcatacatggaaggtcgatggcttttgaaaaatttgttcggtgatgacttgacgttttcttagttcgcaccctttatattgaacggaaactagcaggatatgtagaacaacgaagaaagaagattaaggctctgtgtttagctatcggtgaaagcggagagatattcatttctgcccctatttgatcatggcttttagataccgcctgtttcttatattcgtgacggtggagatcgttgtgcttattgtccgaagcacagcatcagattttcggtcaggttcatcaggtgagtacaatatgagtcgcccttcacaccttatatatatactatatattagacggttctgtaaaatcgtcacagtttttttttttttactctgcgctctccagggatagccggatagaactatctgagatgaaatcatctcggacgggttttgttcaaggatattaaacttttgagtaagtactctgcagtgttttcttaataatcgtgtaaaaacaaaaaccatcttgagtactctctatctctctctctctctctgtcgtaaaacaacttactttagagttaaactttgtgttaatagattgatttttatcttcttacctacatccggtgcataaatatctttttttttatctcttcactatctccgtattctagcttgtattttgctttaaatttagaaccgggtattgatggtgccggataacgtattacacataatgtatcctatctaatattatttacttaatttatatctctaatacatactaatattaaatatagagagacaattatagtgttaaaaaatagatacattaatgaaaaaattatacaatattgtatctaaggtcgtaatataatgattaaccaatcttttatcaaatatggatgtacaatatattttcatatatgtttcataatatgagacatacggccagatacaagtttttcggtatccaaactatatttttttatgcgtctagatttgaaattggatagtatcggttatcctgttttctctcctatattcttaccgcaagcctcaagtcgagtgggtggtcaggaaatacctgttccattatcactcataatttagagggaacacatatatttgtaggcttatatggcatgatgccttccgcgttttgatagggaattctaatcgattaatcgtacgtaattttttttaaaaaaagtaaagataaaatgattcttatttaatctcttagcactattactatttgtaagtacttaatcccattccaagcatgctatatattacagatcagtgggaggttggcagagggagttcctgttttcaataatgtatatttttcactgttttcaaacaaacatcagaagttatataaaattagaaagacatatagaatagaagcaccgaagaactgtactgacctttcaaaataagacttcatgtaattttaggtcatttcctttagttcttttccttttttttttcttcaaatgggaggattttattttcagttatagttttttggcaaggattttaagttatttttattttattttggcagtcatgtttagacgcattatcttaaatctgtggtaatgtcttttctctttatactagtgaattaagtcgcaccttggtgcgactatgaccattctaatatgaatggtatgtgaaaagaatattaatgatattatacattagatttgaaatcactgtttattgtcccaactcatagatacttatttcacttctaaagatatttcttttccgtatttatgtttgattttaattgttgtcatataatatttttgtctaataggaatcataagctcaggtggtgtttcagctgaacctagagcttgctttcgtgcaactataatcttcctacctattaagtgttgttaaactagattaataccctgccgtgttgctgcggaaaattaagttgcataatatgtacaaataagatgtaatttgattatcaaaactaaaacaatttgatacaattttgagcctaaaaataattaagattgtatgtttttaagagagaagaaagaagaaacaatttggaccatagatctacaatccaaatgttataaataatttgggtgatatggcttaaagagagaagagagaaatatcattaactatacttagtggggattaactatataagtatatatataagtatatataggataacaattaacaataaatacccatctttcggctaaaacaaaatggtgagcgcatcgtataggcttaggatttatattcatcttctccatgccgtttcctccttccgattccccagacccttagcacctttattgttgccacttgagccgccgccttgccaccctattctctatctcaatgacatgtaggtccacatgtgtctatgacatatgggtccagtggcaaaaagttaattgccacatctaaatgtggcaaatggttaaatattcccttctttgttgcacaaccccttatcttcctattattttctacttatcctcctgcttttcacaaatataattttgttttacatacttaaattaatgttcagagaaagtattggcaaagaagtctaggtgcaacacaaatattttatcttgatctgtaataaacgtgtattgtcataaaaataaataatttactatgattatgctaagcttgtgatattatcgtaagaaccaaaattatagaatttcactattcccttggttcttgggtctatatttaagtaaaattgcacaacatggttgtaattataatcttgtaggctgtgtttgagaagttacttttgttctatatattgttttgaatattgctaactaatttaaacttttatatgtaaaataactttatcccctcaatgaacattatttgatggaataagttcatccaaggtcccttaacttgtcgacgaatccgattttcatccttcaaccagaaaaccagatacaacggatccctcaactgtcaaaaccggtgcaatataggtctcatggcgttttggacggcggttttaccttacgtggcgcctacgtggctaaattgacccggtcttcatctgacgtggcataaatgtggca

SEQ ID NO: 6444 - DNA, 24817 bp, Oryza sativa
gcaaaaactcaaaatcccttatattgtgggacggagggagtactttattatccaaagtactttaagcacaacttttcgttttttatatttgcataaatttttttaataagatgagtagtcaaacagtacaagtaaaaagtcaaaatcccttatattataggacggagagagtacaataaatacagttataaagacatactatatacattgtagagatattttttatgatattaattgctaacgtagttcttagctatatgggttgcccatctctatatcttctattataaaatttgaaaatgttttcaccaaaattttgatatatcatccgtgtttgaattggttttaatttgatgtttctgttaaattctttctttttttttttcttacgccagagtgtccctctaatccgagaagcgcgataattaattgggcccacaccttttcacatgtcccttgcgcgctgcctcaattgggcccacaacgccctcactcgcgcgattttccgcatgcctgattaggcccacgacgccctcgcacgcgcggtttgcccttgccacatgtccaatcgcgtctcccttgtccacgatttaaaaattaaaaattgaagacgacaaatcgagcttatgcttattcctaaaggcaaattttaaattttagaacttaattttaaattcaactttttggttttttttatcgtaccttattttatatcatttgcttttgagtcgcttagaacatgtttagtcgtcaacacatatatataaaagatttgcatataaatagtcttttatttggtaataagtgtctcggataagcacatgaataaacaaaacaatacgcgatgattatttatccactgacacatatgtacaatttaaattggctcctcccgttgcaaagcacatgcatcttttctagtaagaaaataaaatataatgacttttgagttaattgtgtacaaatgaatatataaaatataaaacggttggtgtgctagggatccgttgaagtagccgttgtctactgggtgctggctctccatgcggcctgttattagctcttgattttatcaggaactggatttatccaacaaaaaaatcatagaccttctaaatcaagactctccaaaccatgtataaatgcctagccacaatctcctccccaaccattccccaataaattttcccaatctcagtttacccaacttcaacccacattttttacacaatttctatccatttggttccccagtcaactatacaccatatggtcattctccttcaagctttcaagctactccatatcaatgaaattgggcacaatctaatctagccagcttacaaggttttcatttgcaagaaaatatggtgcactcaccaaatcaggccacattttgtttagaccactctctttgttgggggttatatggcccagttctttttctcaacttcaaacttcaactttctcatttttcgttaacatgttctaaaactgttaaatgatatgtttttggcaaaaatagtttatgtagaagttgtttacaaaatcaaataaatccaattttatttttagatagttaatagttaattaatcatgtgctaataagttttcttgtttcgcatgctctaaaagtatgagagaaagaacagagcgtaagttagtttatgagtctaaaatatctaaacctaaacaaatagtagtaagtagcttttccatttgacttttttaaatccataagccactcttgttgtattaagtaaaagttatgtttaacttttttaaatccataagttatccttaccgtattaagccaaaagttagttaggtttgagattttttttttgcttatttaaggtaaaggtatagctttacacttaaatttagagcttaaaattcaccgacttataaattatattagctaaaaagctatctttaaattctaaactaagctttgaaaaggccaaagcttcaatttttctcctgaggtggaggagacgagaaagaggaggcactcatgcagtgcagcgaggcaatccatacacactctaagataaaggagatagaaaaaaaatggtaaatcaaacaaaataatattattagtgttagtacatcatatattgtacatgttattttttttgataagtagcatatggataagattaatgatggcaatcatcataaaactaaaattcgctctaagagaaagctgacctggtctatatagatagctagaagtgcttatatatttcataatagagagagtatcattgtatttaaattgcactagttctaagaaattggcacatcagtatgtttgatataatagttttaagagtaaagtgcatggtcggtcccaaaacttgtgcagttgtgttatttagatttctaaactctcaaaatacaatttttttataacttgtcaaattgtgtcattttggtcctaaattgccacagctcatccaagctagatcctatgcgacgttgatgtggcatatcacataggcgttgacatagcatatcacctgtcaatttgttgtaccgtctgtgtaatttactctaaaaagaaaaaaggaggacttttttagtgggcttcaatgggtcggtccgtgtaaaattggtgaatatgccacatcagcgtctatgtggcatgccacgtcagcactatataggatctcagagggaccgtggtaattggagatcagaaaatacactttgacaagttttagaacctgaatatatattttgaaagtttagagacttatatgcataaccgtacaagttcaaggatcgaatgtgtactttactctagttttaaaattgagcatgcccatctgataattcggcaggatgtattaaagtatgacaacttaagtatgtcgatgcgacgacgtagatatgcaaaagtgctttcccggtcaaagaagaaggaggtgccatgcgtgactttttttttaaaaaaaaaaaacgcatcatcagggcacattgataaaggaatcacctcagccgcttggaactttcatgcaattttgttgcaaaattatgtgaatttgatattttcctcttttttaaaatataaaaataggaatgtggaccatttatttgcaagaggtatacatttactatttaacaaagacatacatggaatgaaagattttaaaaaaatactaaaagtttcaaaacacttacatttatgaaaaggaaaatgagaccaaaagaacacgcatttggaatgagtcgagaggatgcaaggattattttggatgggcacaagaatttaaaaagggaatgaaaataagagaaagaagatagaatgcaccatatgccaccatctatcttcaatttgcaccaacccaacaccactcttcctccctggttttctccagtcattttcctcggcaaaagtagtgccacactgcatgctttgttatgcaaatcaacaatcaggcaaaaagtatagcagtagcaatttgagttgagaaaagctagagatgagcctccatatatatataattcaactttcagcacgttgggacactagaggattttctgaatggcagggcaattctcctttggcacggcagtgcgtctcttttttaggcctctcatgccatgccagaggagaatcgcactgtgattctcaccctcatcagtcatcacacagtcactaacacaggcagagcgccagagcatgcatgtatcactttctgcaactaattgtgttcatgctctttgacgccattgttgcattggctgctagctgcttctttctttctttctttctttctttctttctttctttctttctttcatcttcgccttgagttggtactagcttggggagaactctgaaattccagctacctatatatatcctggcatggcaaggaaatcagagaggatgatcaagaaggccaggtttctggatatgccatgatatatgctaccaccaatcaggatcattcttggcctcttgggaagctcctctctctctctctctctctctctctctctctgagcttgcaattgcacaagcatggaaagcaggaaaggtcatgcaaaaaggggacggtgctttccaatattcttcgtttctttcctccaaaaacttttgttgaattgcaactgttagaagttagtagatcttaataagcttggattggaccgttgatcacctgatcggcttacctgaatgtgtgagagggtcttcatcaattaataaattctgctagttgagcctagcaattccatcatgtggtgattcgcatctcatctttgtcgatggaatatggaattggcgacagattgcggcgctgtgccttgtcgctggacattctcaaggatcttcttcttctcctcctgctgctgtgttcagagagctgaatgaattacgggggcgtctgttcatctggtgaagagctactggtactggggcttcgaaaggccgatttaacagcagtgcagccaaataaccttttgagatcatggatgctctcagagtctcagtcgtttttgcttacatgtaattcatgtggtttgttttttctgaaatttagttggccctttcaactgtttttacacagccatgtctctctctagctaacagctatcatgggcattgataagcaactctttctggctatgcacctatacttaaacaattgatttcagtaattgaaagagaaaatataaccattgacaaacatcctattccaagaaatacaatcaatgaacacaattttaagcaatttgtcccagaaatttaagatacacacatcaactcactagcactcatgatcatcaatacaatatatatttatcttctcagtacaacatatattatttagagataattgcacaaccgtttattttaataaaaagaacacgatgacaaatcaaagttagtttgttgctaacgaacagcaacacatctatctatctatctatctatctatcttctattatatactaaaagtccattaaactttctacaaacgctctcaatccgccacgtgtcactcctacaaacactcctagaccgccacatggcactatataatctcaccgtcgattttcacttaaattggtggacccgatattttagaccattggattagatctattatttaagaaagtaatcccttcctctgctgtgggccaaaaaaaaggaaaaaaaacgtacgtacgtacgtgtggcttaaacttcctacatacgctttcaatctgccacgtgtcactcctacaaacactcctaaaccgccacataccactgtataatctcaccgtcgatttttagttaaattggtggacccaataaagtaatcccttcctctgctgtgggccagaaaaagaaaaaaaaacatacgtacgtacgtgtggcttcgtataaccgtgggccggaaaaagaaaaaacataagaacttagtacgctctccctgtctcttcctcttcctattcttttatatctccatctctttctcttcctaattcttttatgttatcaaattaaaaacgagttaagttgaccatttaaaataatttaaatgtacatagctaatttatattctattaaaacgttgctctatttataattaaattgacaattttacatccaatgttttgctatatataagcaatatgttattgtggtatagactgtgcattttgcaagtttgcatgccatctaaataaattaaatacttattaacaacatatattatatatctatctatctatctattattatatactaaaagtccattaaacttcctataaaccctcttaagttgccacgtgagactcctataaacactcataagccatcacgtggcactctaataaattagaaaaaaatatataacttgaactggtgggccaattggatttatctcataaaaaaaattcttcctcaactactacagtacgttctcatctccttcccctcaatcccttctcctcatctctttccttttttctgtatggtagttaagatttttgttttattacttaataattaatttcttcacttctatctaacgagaatggatgtggactcttgattgcatgtcccatgcctaaatatataaatgattaatgatttgatgcatgcttttataaataacaaatctatttttaactaacaatttagaaaaaagataatagttacatagcaaaataatcataattttaaaaagttactccctctatatcatattataagccattttaacttttttcttaattaaatttctttagatttgaccaaatatataaaaaaaattaacaacatctatcacacaaaattgttttgttagatataacgttccatatatatccataatatgttttttttgaaaattttactatattttctataaacttggtcaaacttaaaaattgacttaaaaaagtcaaaatgacttataatataaaacggatgtagtatatctgtttttatttagtttgtttgaacggttgtttcataactagacagctaaataatttaaaatcaatattaccaatatttcactataaaaaataaaatatgttatttgaactgccacctattctttacctgacaacccaaataacatcctatttttaatttatttgaactgtttatttatgttactcatattttactatgtaaaatttaaaatacgtaatttgaacatacaccaacaagcaaacaacactgaaacattgaaaatttgacaatatgtattatgtcatcttaatcattctacataataaaaaatagaaaaatacaaagtcaccatgtatgaccttttagatacatgctaaattaccaagtgtcacattttaaaaattagtaaaatcttatatattaaaagaaaaaaaataaaacatctagctaacggttttcacctagatcgatgacctattaacattattttcaactatctaatctacttttagaaaaatatatcttaataagtggcatgtcacatattttaaaaaaatcttgcaaatcttaggaaaattacatctaataattggctttcacttaatcacttagaaaaattaaaaaaaaaatcccctccacacgcgcccatcactacacagccgctccttcccctctctggctcaagctctaaacttttcattcctcttacgttcctatttaactaaaatataaataatctataattataagtttcacgtctgatttctaatctaactattgctctgtttataatcaaaccaacgatataagatccatatgcctatagtttactatacaacaaatacgacattttaacacaatcagcctattacttacgagtatctcaaatgcagcttacgatacatgcccgcgcgaatgcgcgggctacctttctagttaaatataacaaagatattgtggagattatgggtaccccatacctacatggcatagttatccgactggctataggggataacttatatctatggaatatgtaacagatcatgacttgggtattacgtttccctgtatattatggaacggcctaaagtcctggtttgataagattgtaaagtagatttaggaaaccgataccgtattggttaaggtttctatcttgtaaccctgccccccaacctatataaggagggcagggagcccctctaggggcatgatgagacaacctgatcgtcagatcaatacatactcggcggattcaaatccccaaacaggagtagggtattacctctcattgagagggcctgaacctgtctaaatcctttgtctccacatccatccacttttaggtctcgtgcgctaccccgttttattattgccgaattcatgtttcgacagttggcgcgccaggtagggggtgcgtcgaattacctgtcgaaaagtgcgatggaatcaacttcagaagaaaccccgagatcaatctcatcaatttcgatggctcaaatcttcaatcgggtctaccgttccaatttaatctctattagattaatttttaatcattgtttgatttcctgatattttgacgaatttcatatactggatgagatcgaaacacgaccatcatcgtcgcctacttgggtgcccttgccgtgtccgagtgctcctctcttcctttccttgcagatggacgtgttgcaggagtggcacaggccgccaggattcgattcctgtttgcatgtatgatggttgatgggctccgccggctacctccgatgatggcatcatgccgaaagaacatcgagttagctgttagttgccggggcttatacatgttgcatggcacgtcgccggctatcactcatgatccagcctcactgctcgacttgagtttttcgtttcaatttgttatcaatatatattagattgatttctaatctcagattaatttcttgctattttttgttgttgttcgcatataactacgcggcactattgaggcgattgatgctggtcatggactcgaggcgtctcagctttccggtcgatcggccgcgagtccactccgccggcttgtcctcgccaccgccattgctgatagcaacaacgacttcaccaccggcctgcctccgtcgccgccgactggtgtccccgcctatacggttggttggtcacaccaccgttcatgggcgtctacgacttcaccgccggcctgcctccgtcgccgccgactggtgcttctgcctacacggctggcctattatgccactgctgttgggcgtctacgacttcaccgccggcctgcctccgtcgccgccgactggtgtttctgcctacacagctggcccattatgccaccgctgttgggcgtctacgacttcaccgccggcctgcctccgtcgccgccgactggtgtcctcgcctatacggttggttggtcacaccaccgttcatgggcgtctacgacttcaccgccggcctgcctccatcgccgccgactgatgcctccgcctacacggctggcctattatgccaccgctgttgggcgtctacgacttcaccgccggcctgcctccgtcgccgccgattggtgcctccgcctacacggctggcctattatgccgccgctgttgggcgtctacgacttcaccgccggcctgcctccgtcgccgccgactggtgtcctcgcctatacggttggttggtcacaccaccgttcatgggcgtctacgacttcatcgccggcctgcctccgtcgccgcggactggtgcctccgcctacacggctggcctattatgccgccgttgttggatgtctacgtcctcaccgttggctcaccttcgttgccatcgactggtgtttccgcttacacggctgacctattatgccgccattagtgggcatcttcgctttcaccgtcgaccgccttcgtcgccgccgactggtgtcttcattgttattgatggacgactttgttcccacattggccacttctgccatcaccaaggggaatattacaaagctaagtcatcatttattttattctttatatgatatttttccttttcctctgcctcactacaccaattggtcttccattgagtagtgagtcgggggctacagatgttatatcatatttttcataatatttatcttgattgcttgcgacataatctgagtacaaaagtacctatcgagttatggagttctatcttcctatgctttccgtttggtttgccaatggatggttgcctttgggccgattcctagcacccgggggctcgttggatggaccgagtaacgcaaggtgctaagtattattcggaataaatcaaaagcatagagatgagataaatttattttctgctcttaataattgcaaaagtacccgagtagtaaattctgatccgtgaaactttgttccattaatgacgaactcatgtcactcatatgcatgtttgggaagtgcctaggccgactcccggtgcttgatggtcatgactagtcggacagagtgtttaaacgtacagagtcatctgctcggggaaatcaaaattgacaagaggagaaatacatatttataaatattttaaaatacttgattttttctcgagtattatatttatatcagatactactcatcctatatgtttgttctgcaagatccagatccagatatgcataaaagggattcatggctttaagcttatctcttacgctccaggaatggatcagtcagaacatcaccgaccggcttgccttcgccgccgccgactggtgtttccgcctgcacggctggcctttatgccgccgttgttgggcgtctacgtcttcaccgactggcttgcctttgccgctgccgactggtgtttccgcctgcacggctggcctttatgccgccattgttgggcgtctacgtcttcaccgaccggcttgccttcgccgccgccgactggtgtttccgcctgcacggctggcctttatgccgccgttgttgggcgtctacgtcttcaccgaccggccgcctcgtccgccgccgactggtgcttccgcctgcacggctggcctattatgccgccgttgttgggcgtctacgtcttcaccgaccggcttgccttcgccgccgccgactggtgtttccgcctgcacggctggcctttatgccgccgttgttgggcgtctacgtcttcaccgaccggccgcctcgtccgccgccgactggtgcttccgcctgcacggctggcctattatgccgccgttgttgggcgtctacgtcgtcaccgaccggccacctcgaccgccgccgactggtgtttccgcctgcacggctggcctattatgctgccgttgttgggcgtctacgtcttcaccggccggccgccgcatccgccactgactgatgtcaccgctagcacggctggcctgttataacgccaactgatgctatcttcttcacggctggctacatcgctgtcactactaataggcatcagtatcttcaacacaagctgcctacgtttgccatggctgccgactggtttcttcacttccatggctgcatgattctgccagtgttgattggcctattatgccgctgttgttgggcatctacatcttcatcgccggtcgtctcgtctgctgctgactagtgcccttacctctacatcttcatcttccgtcgccgactgattatgctgccgccgattggtgcttttatcttcacaactacgcgtcttcactaccggtttgcttctgttgccgccgacttgtgttcacttcattacggcaatacaactttgtcatcatggtggagcgacttcatctttattatcttcggcaccggcaaactctattgctgctacttcgcaagttttactacttcaccaaccacgacgtctttgtgaacctcgacatctcggcatgcaatgccatgatattttactacaacaagtgactctccaatattcaggatttctacttggacaccttcaacacatatcttcaatcaagcaatgactactcgacgacaagaagctataattctcgactctatgttcagttgtttctcaactaaccaaagagtcgggggctacacaaatataaggctcaaaatttgacaaattttatgtcaagctgaagaaatcaattaatcagccaatgagtcaactccaggagtcattatcttcatctttgcttcggaacagacattctacttcaacaacttcaaatatttcggtttagacgagttgggcaacaacatcaactctcctccaattatttgtcttcacggttggcctactacgcaactgccgatagaggatctcatcgttatcatcggctgctacatcgctattgactggatcaccgacatcgtcatcttcatcaacatcttgtcaagcctcatcaacatagccaactctgctgccgttgatgggaaacttcgtcatcatagtcggctatctctgttgccgccaatcatcattaccgtcggatgcgtttgtcgccgccgattattttcttcatcttcatgattggtggatttcgccatcaccgttgatgcgcgtctacgtcttcatcgtcggtttgcttttgtcaccaccgactgttctttcgttgttgttgggcgcctacatcttcactgctagctgacctgactgttgccgactggtttcttcacctccatggttatgcaacttcattacatttgattggtggcatctttactaccactgacatcttccgttacttctgatgagcaatttcgtcttcatgttggtcatttcatctccatgccgactgcgtcagttattgccaatagacaattttgactatgacagaaggacaagctatatgctcaggggctcatcaactcaagcgtgaggattatatctccaatttggacttgttccggatacattccacatggattcatagtcatgagtctattttctatgctcaaagactggaccaattattattccccgtaagggctatcaaccgaatacttgcgccagtcgggattcaattattatatttattttggagtatcccataagggataatcattcagatcagaagctattcatatgagctacacttggtctatattacccggaagatttattacttgggagcatgttacatgcgtcatcctttaaagggtgtcgaaggcatattttttggcctaggcctaatatgtctgcagcccatattttcaggtgtggcctgtcacgttcttttagggacttaggcactttttgcttaggccaaagtgcgcgtgatcaagtgcccaataccttaaaatccttttataccgcagttactcaactttttaggagttggtacaatgcatcttaaaaggtgtcaaacagtaaagctttatatagctggcccgctgacttttttatatataagtcaaggtgttgtttgggtttttaagcaattgattagatacaatatcattgcttttcgccacgtaagtgtgcatttttattgaccaatattatggcttaggctgattatatattgtggtcatttttcaggcggttggtaaatcctttatgagtttatttacttggattttataccacatatgtcatatatttccgggtgtggtgaaaccatgtgtcttttagggacttaagcacatctgttaaagcagtgtgcgcatggcgtatgcccaatactttggaaatttctttattcacaatatataagcttctttatagctgttttgctatgtgaattttcaatgatgtaaccaactttaggttacactcatcatattttacaaagcagtcggtatatcactcggatcatgttattcagggattcacaccgcatatgctacatattaatatcaggtcgcttggttgactataattattaaaaccactcggttggttggattatttattccttgactatatgcttggtttgttcaattaaccacatagtcgggggctacacctattaggtgcatctagtcgatacacctgactttatttttcagccctccacagtcttcgtatttggtaaaagtacttcggagaccatggcgaagatgattgaagcactcagctttggagtaatctagttcgagagaagattatcttttcgactgtgaaggtctcaggggctactgtggagattatgggtaccccatacctacatggcatagttatccgactggctataggggataacttatatctatggaatatgtaacagatcatgacttgggtattacgtttccctgtatattatggaacggcctaaagtcctggtttgataagattgtaaagtagatttaggaaaccgataccgtattggttaaggtttctatcttgtaaccctgccccccaacctatataaggagggcagggagcccctctaggggcatgatgagacaacctgatcgtcagatcaatacatactcggcggattcaaatccccaaacaggagtagggtattacctctcattgagagggcctgaacctgtctaaatcctttgtctccacatccatccacttttaggtctcgtgcgctaccccgttttattattgccgaattcatgtttcgacagatatataggcagcatcgcatcctgagatcgcaagtggcaattcctctttggtgcgaaagaacaatggcatcgcattctgcaaaactgttcacagcacaaatggcagcctacctttctctctctatctatgtgctgtctggactgcaaaatatttttacaaagaaaaaatcagacaagaagagaacaaacgctgggcatcgcatgcagcagcggcctctcgtcgcgtaacacagggtccacgtaggctgtccaggaaagacgcgagatctatctccaaaatcggaataaagctaactcggattcttggcatttcaccctctcttttcttttcccttttttttcttccatggcaatatggcatcgccgcatcggccgtcaaatatcaatacgacgaaaggggaaagggctctcgaattcagctggagaagcagcaaagcattgtgctgccggatatgccgtttccggcagcaaataaatgctgccaccgccgtcgccccttcgctcatcatcacaccaacacgatctcgagcaatcacaatatgtacaatatgtaatactacttgctactactatctgaggcattctgatgaggaaaatggttgagatcgagcctgtggatgtgcattgcagggcaactactccattggcagagggatggattggatatggatatggctgatgcttccatttgatcccatccctatctgccaaaggagatttgcccagcgattcactcctacttgctcatgttttttttttctatgtgggaaccgtgtaagagaaagaatatttaggctctacattatgatttaaaggcaggggctgacccagccttggtcaaggcctaggctagcccattgcactttgggttaagattgaacttacatgatggaattttgtactacgtagtgagatttcaatccaaatcctaggcattgacccgtggcctgggtctgcccctgtccaaaagtatgcatatgcacatgaaagcatcgaggtgatctcaattatatggaatatatatgcacgtacatgcatcactgcacatgcacatacctacgagtacatccttttaacatacaactggagagatgaaagcctgttgatacatccacaatctcagttaagtatccacacatgcataattatgaacatcagaatttagaccttgtgagtgaagtcatgcaccacatctaaggtttttctccattgtaatgattttctagtctggtttctagaatgaaatgccgttataactagcggcggcaatgcgagaaaatctaaaatttatcttgcgactagttaagctaatatgattgaaatgtactcgagctacaataattacaactagcggatattttcgtgtaattttttcgtagagcaagatttcaaaaagttgagttgtattttgagatacaactcttaggtccctcaaatatttggattgcaatcaaaatctataataatataatttgattttgattttgagattattctttgttggtcatatctctttttatgattgctcatacaaataaaattacgagtaaattttataaaactacagtactttgatcgaagtattataaaagtacagatttaaggcgtcgtattataaaactacatatttaacacaaaatttatcacaaaactatagatttaatactagagtatcacaaaactacatattttacagcttaaattcctaccactactgctatgttagagtgataaatgtgtagttttgtacttaacatgatgcaaaacatgaactgttgtgataattttattactaaatttatagtttggtgatcttccaccttaaatatgtagttctttgatgaattcggtcctaaatctgtagttttgtgatacacctttttaaatctatagttttataatagtttgtcaaagtatatgtagttttttgaaatttactcaaaaataccgaataaaatgttcttaccattagaacatttaaaatcccaaaaataatccaaaactcatcaagcgggcacatttgtacgtggtagaatttgggcttttggcccattttgtggttgcatcgaagcattgggccattcttttcgctgtcgttcaaaaggccacttaccacaattgggcccatccagaaacctcttggtcgcagccaccgcctagggttgcgctctctcttttatcccagcgccgccacgccaccttccctcctccctcctcgccgccgacgaactcccggccatctccgccatggtcgcctcctccctccctccttcccgactcatcgctgttcatctcctcaacctaacacccctcttccgcgtgcgtgtggtgagttgtggtgcaggcgtcggagaagaagcagtcgaacccgatgcgggagatcaaggtgcagaagctcgtcctcaacatctccgtcggcgagagcggcgaccgcctaacccgcgcctccaaggtcaccaacccccctccccccaaaattctcccaaccctcctctcgccaacctccatttcaacccccctctctctccggtttcttgcaggtgctggagcagctcagcgggcagaccccggtgttctccaagggtaggttaagctctccgccattgccgtctctctactctagtttactcttagcttcgttgtggtgatgacgagagtttgcggggggcgctttctttgcagcgaggtacaccgtgcggtcgttcggaatcaggcgtaacgagaagatcgcgtgctacgtgacggtgagaggggagaaggcgatgcagctgctggagagcgggctcaaggtcaaggagtacgagctgctcaggaggaacttcagtgacaccggatgcttcggcttcggtatccaggagcacattgatcttggcatcaagtaaaggccccgttactctttctcggatgaaacatttcgcttttcgtatctgcctgtttatgttagtcctgtgcctagaagattttaaagcattcattgtctccattcccttttgtgacctaggatagcgcttccaatatttgcttgaaattgcctcattcaatagatttgttttggattgatgtttacaagtgatagaattttattagttgtaagttgctaaacctgaagatggtttttttaagtgttctcgggtcattgacaattcatttggtacctaggaattgttagcatactgctaatgctatagatgtttatttgattgaggcataaacattgatgcttttgtttaagtggtgttgtgatttctaaagagcattgagctcgattttgaagcagaccatggactagatcttttataatctggtccatttgaaaacttactttataaatagaccttgacaaaacttataaaataattggacctgaatctcggctccaagatcattagcaccaatattcatggtctatttagattgtgcaattacctttgcttggcctagcaagctcaagctagcccatgaaagctatggcataaaaaagcaaaagtacaatgcttggatgtttagcccgacaaattgccatcggatgctaaccgatttggctttttgtcttgggtgagcttttctcggtagttagttggccttactaagcaatactttttttttcttttgctaatactaagcaactctccttgctaggctaggctatgcttttccttgcttgggattcaaacatcctcaatatcttgtcaccaaagatcctagcattgataccatggcacaagtggcacaaaatccacattactagatggtccgcgccaataactttggttctgggctcatatgtttctaacatattaacacacccatccacataatggtacatgaatggtgtagtggtaagatgtctaaacttgccacctagttgagttcgatccttggccagtgcaatttttttagtgatgtcattaaacaattggtatattaatcaacttattatagaatatagctcattatcaactgtcatatgagctcacatatgcattaccaggaatgcgtaacacaacatggcacaatattgatgcacaaaaattgtatctaaaatattttgttggcgatgagctcatatgagattaagaatttaatgggctatcatctataataagttgacgagtgcttaaagtggttaaatgaactcttacgttcctggaaatcatgtgatcaaatcttcatgatgggtgttttttcctgtctagtcttcttttgctggtccattcaaggtgtgcatgccacttaaaaaaaggaaaacaaaaaagattcccacccaatgttcgaactaagcttgctaggaggcaagagcaggcatctcatcaccacaccacacatgtataattgttctaatggtgtgttaatattttaagaagtatataagcccaatgcctgatggaataagccttttgttgttctgttttgtttttagcatcttaggacaacatcctttcagttttgcttttagcatcttaggacagcatcctagcgatcctaggacaacattctttcagttttgcttttagcatcttaggacatcatcctttcagtgcccgtcgatcctcgtcgtagtcgacgtcgccgtaccgaactgcctcccacatgtgccgcacctggagcctcaccctcatgaccgcagctcactcgatgtagttggtcttggtgaaggcaggccaaccaccgccggggctgacttccctgatgacggcctgaatcccgtggtgtccacggtaccggtccggggagggagagacgagccgcctgcaacggccgcgatctccgtcgaccaagccgttgccgccgggagcaccgccgtcatgcgcacccctgccaaggggtccgccaatgcgtccaagcccgtctgggctaccgctgccgcgcgcgctcctgccaggaacgccgccgacgcatccacgcccggctgggctgctgctacggcgcgtgtggggttgcgcggctgcccgttgctccacccgctcacgagctgcctccctcgtcagctcatcagcagggatgtcgtaggcggagacagagctgctggagctattgtcgcgcagagccttgagctctgccgccgccgcttgcgctgcatccgccgctgcttccacttccacccttgccgccaccaattccgccgcaggcagccttgacgccctcgctgccatcgcagcagtctctgctgccgcttgctggcgttcctcggccgcggcgagctcggcctcctgccggagccgcgcgctcgaggcgaccgagcgctaagactgtcctgcgggcatggcatgctattgggggcctgcagtgtgggggaagagtttgcctctgacgagctgctgctcgtcagtgcaggggaagagggatgagcaggaatagccgatgttccagctgccggttgaggacagaggggagctcgtgaaggggatgagcaagagatgtctagactacaggatagagtggctctagtaccaagtcatactatccgggggaggttggatacatatttatagccatagcttgctagctgcgggctagtctaaaggtgaaaggaaaacataaagcataaaagggatgctgtcctaagatgctaaagagcaaaaccgaaaggatgttgtcctaagatgctaaaagtaaaactgaaaggatgctgtcctaagatgctaaaagcaaaacagaacgacaaagaccaaaaaccaacaaggctactaagagcacaaggcttattccatcaatgccaaggttcctggagctgaccatctagtgacgtggatggttcctggagctgaccatctagtgacgtggattgcttacaacgtgtgacaaggtcttggcgccatcatctttgagataatccaagaaatgctattgacaagcgtccaaatccaaaaaatgccattagcaagtgtgagttccaagaaataccatcgtacaaacgattttgtcccaaaatgccatcgccgttagggttctgtctattttgcactgttaagtacactgttcatcctatagcacttaatgtcgcggagttaagtacattgttcatcttatagcacttaatgtcgcggaatggacggaaccctaacgacgataacggcgatggcatttttggacaaagtcgtcgtatatagtgtattgaaattcttcattgaatacccataaaaaatctttagcgaagaattcccttagaccgtagcgcaaaaactgaaattaaatccaactccagaatatctttgatacgaaaggtgttaaaaagaaaacactaaagagacaagcaatcatacaccttcacttgttttgaatttaaactcttaaaagccctgaaggctatctctcataaagaagtacacatccatgggcagaagggacactaaagagattttaagggactactccaaggggctctaaagggacactactttccctaacatccacccctctatttatagtcgaagatgacggaaatcccactacgaaaatgttcaaattgccctctgggtgaaaccctagctcagatgaaatctaggccatccgttgttccttctcaaaggaaataactcggatgtcctccatgttgttgcccgctccagatcccattttccacataaaatatgcatcgaaccactcctcccgcgcaccttgctagctaggcccacctaccagtgagatgagctgaaggctgaagcttctccggcacgagcaatctacggtggggcctgctatccgcgcgtatgctccttggccaatcaccacacgtacttggtcgtcgttgatccacgtctttgccgctcgccgaatacccgttcaccacgcgtctctgggaggcgcgctccacctatgcgaccttatgcgcttgtgcggcgagtatgagacaaccgcatgtcccgtacggctttcgcctccatgccctcgctgcgtcttgcatctagccaggcctcatctgcaactatcgtcttggaccatcacctggaccagcatggttcggcctccctgccaacaaggctgctagccggacgccttaccgcctccgtcttgggtcaacaagcaagagcctaattggcttgacctcctccaagccaagtcgatcagactcatgcacaagtgcatggcattgggccacgtgcacatatgcgcaacccaatcacttgcttgcatgagtacagtacacatacgctgtccaagtgcatgtatcgtctagcattgtacattactcttcgcgaatctcagacacttgcacacttgaccttgtgaatctcgttgcgaagtactactgacacggtgttcgttcatcgggcaccgccttgtactcaaccgtgtcaactggcatcctttactcttctggacctcaactcttccatgagtttagtcccgatctgccgttgacctagagagacctccaaggatcctgacgtcagtcccaccttgtcacatggcctcttgactgcgtcggacctccgttcctccctgagcatagtcccggtcctcgccattgaccaaggttgacttcgatcacctgcacacacacgtaaacaaaacgcccgttgttcgggcatagatatcacaaccttactcgtgttagtcagcacacatttcttgcacttccgacactcgccaattttccatcacaataaatcaaaaccacaatttgtttcacaatctcccccttgatggaaacattggcaacttcaagcaaaattttgaaaatttgattttgctccacaaagcaaataatattgcaagtcaaacttggttatttgaagagattgaaaaatcaagaccaagtgacagataaggatgcaaatgcaagcaagtgcgtgcggtgattggccgaggaggcgttcgcgcgaatcacgggttcaccctggagtgcgtgcgcatgagaagcttcggctcgtttggacatctgagatatttcctttgaggagaaggaacaacggatggcctagatttcatctgagctatgggttttgccccaagggcaattttgacattatcttagggggatttcatccatcttgggctataaatagagaggtggatgttagggtgagtaggctccctttggagccctttggagtagtcccttagagtcactttgccggcccatttgcccatgggtgtgtacctctttatgagagatgtccttttgggcttttgaagtttaaattcaaaaccacaagtgaaggtgtatggttgcttgtctttgagtgttttttttgtgacaacagtgcaattaacattgttaagaatccggttcaacattcaaggaccaagcacattgagatacggtaccactttctccgaaaatatgtttagaaatgtaccattgtgttaacgccaaaatttaccaaaatttggtaagattctttagtggatttggttaaggaaagaagtcaagcagccgatgtaattttatctagaagagatcgagtttaggaaggaatcgtgaagaccatggcataacagtttaattctatctaataattaggtagtttttagtaattttccttaagttttgtctagtgtctgatcaagacttctatctttctttttatctttaggaaacttgtaacgtgtccgattaggactcgtatcagcccgagggtataaatatgtacacttggggtcattgccatttatctctggatcaatattggcgcataacaccctcttttccgaggtttttgttacctgcagaacttggcacctaacgcggggctgcatgtctttgatcttcggtgaaggggtaacccctaagttctgccggccctggtagttgtattggttatattggtgttgttcaaggctccatcgctttgacctcttggattgctctggttcggttggtatattttacctacctgatatttgaattgtatttttaattgcattgtgtttagagacgcatcaatttagttaggactatcttggttaggtctgatcttgtcttagccgacatatctctacaatcacaatgctattttaaatagatttgttatatccatcgcattagaaagttttatcgactcattgagatcagattattaaacgcaatctcgtgctgcatcggttaggtccgacctcaattgttattaataatcaaagtcttgttaagccgataggttcgtgctaatgtttcatcggggggtttatttgatgtgttaaatttctctttgatgattttactgtcttagtcaaatttaatacatgatcactttgattggtgtcatattggcttgcttaaatctatcaggtaattatcaaccttatgctacatccagttgtgttcgccctgtagggttgtggttgtaagttagatttatttaagttagtaaacatgaatcaatgtttcattggggtttcagtcgataagttatttaaatgttgcatcggcttataaggattatatacaagttggttttagccaattgcagcaaggttttattgattgcctaatcttttggatttaaattctaatgacatcagattcccagccgatgtatgctttaaccatcagattaatatttattctatcatatcattgttggctaattggtttattggatatttatttcattatattatcatcagtcgattgtctttatatcattatttatctaagtgtcagaatctatatcggacatatagccgatgtgttcaaaatcctatcaacatcgtctggtatcgccatatcgccttattggtcgatcgactatgtgatcatcaatttatctatcctgtcagtcgcaatatcaaactgactggcacgcccgcattcgaatccaaatttttggacctgcactgaagctaagcagatctcccggcagctaagcagatctcccggcattgtgtttgtcgacatagttcgcatcaacacagatttggcaccattagctgggcgtggatttttcgtcaacacattgtgctagagtttgttaaatccgagaaacgacatgctgatatttttacaaaacctctctattgagcatgatgtgagttcttgcaaagtgagttaggggtgatccacccctgtggattgcgttgagagggagttcttttcttttgcatgcatttgtaacatttgcatcatgtttactttcttgcattgtattatacatcttttcattaaagagctttgttaacaatttactggacatctttttgatactcatctcttacttttatgcaagctagatcttttgtctaggttacacgtgcttaagtagcttgtatgttcatgctatgctcttcatgcgcattgatacttgcttaaattgaatctacacttgaacttaattaatgtgcacaacttgctctagaagtttgcttttgatgcaatatccttctcatagatatgccatgtttttatcatcttagcaatagctttcggcacatccttttgaatgctcacgcttgattgttcatgggtgcatcaattatgttctttctatgctttatgtgttttaccactgcttttgtcccaggctactgagtgtgtttacgcataagtagtgctgaagatagcactgagactacctgtaacaggagctctaactggaaaacttgtttgagatttgatgacactgtttggcgccctcatcactcgctgactgataagattaggcgtaccatcgcgattgtgctatagttttcttcaaaaatccgaaaaggaataaaatgcaaatgtgatagagctaaaagcccatgttctatgttttattaccatcttgatactctcttgaactgggcattagcatggtatcatgggttcatttttgtttttgataatgttaatcttgcatatttatgcgttggattgcttactctt

SEQ ID NO: 6445 - DNA, 45423 bp, Oryza sativa
aagatattatttatttatttatttttcatgcttaataagtcaattagacatgttataaaaaacattatggtctaaatcatgtccactgttttgtttaaacaaggttaaaagtatatgttgtgtccatttcctcccatggacctatggtccccacatgtcagttggtaaggtggtgacagaaccaccaccatcgccgttataactatcaatttgctacatggtagaaaaaatagaaacaacaatgatttaagagtgcatataaacaagaaacattttaatttatgaaactcatattctaaaaaaaatgtgtttttaagaaaaaaaaatgaagcgtatattttaaaaaacatgtgttttaagaaaaatcgaagtgtatattttatcctgtttgatgaatgtaattacttttttcacacaagcgtatattatttcctatatttttatgagattttaagggaattgaatttattatttataaaatagttgttcgatttaaatgcactttatataatatgcacaggtacaaaataacgagcgcgtcaacagacgcgcttatattctagttacaggaaaaggattgaacagtaaaagactaataaatctgtttgcgtttattcaacattgatcagatcaagaaagaaactaatcagaagtattccatccatctcaatgtgttgtgcaaagtccatattcattcattgcaaataaaatgtagacctactgtttagaaatgaatgcttcatgttcccaagtacatgtcatttagcatcctatagtgcctgacaaaatctgtttcttgggtgttgattgcaatgtgaaacattaaccaaatatttcactaactgaatgaaggttacatacatacagtcatcataaactggacttcttgaataaagaaattcagcataactaacctcgataagaggatcccgtccgacaatagagaagacctcctctgctagctttcggatgactttagcacggggatcataattcttgtaaacacggtgcccaaaacctgacatctttctcttcctaaagaacaaaacagatctcataaaaacaagtccaaacatatagatttaaaaaggtaaaagcttaaacttcattaaactaaaaaagacctccatgattacatttcagatcagaaaatataaatcaggacaggagttatatattacctgtttttcactccctcgatgaaatctggaatattctccacacttccaatttcatttaacattttaagtaccgcctggcatgttagaaaatggcattagtgcttctgcatcataataattgagtaatgccttaattacttctaaaaataacagatgtagagtcaaggttaaagcgaaacaaaggttttagaactaaattttcaattatataaaaaaatccaagaaaataaaaacctctctatcaaggaggtgacttatttacattgttaacagaacaaatttatagagtacatagactgtatgtctttgttacttgtgagcttgatccttagattctgatgatgaatgtgtatataaactattagcagtccaatgcaagaaacaaaagtgacaactgctcattgctcagcattgtttacctcatttgcaccaccatgcagtggaccatatagagctccaacagcaccagaaagagcagtgaagacatcaacaccactgtaaacacaggataaataatcaggcaaggtcagactcccaattcttagaatgaatggcattatctaccttgaagcaaggtgcctagcagcagctgtagagcagttcatttcatgttcagcatggagaataaaaaggatatctagaaccctagcaagtctaggatttggcttgtattctttgtcacccctgcatcacagtcgaaaaggaaaatgaagtcaatcacaaaattgaattgcttattgatttctaacaaaagaaaaatgaaagagcacatgagagaacagaatacaaataattccaaagtgatgtgacttacaaagagtctagcatatacaagaagttctctgaataagagagactatttgtaggaaggataggaggtcttccagctaatctcaagtacgctgcagctgcaattgttggtgcctatacagaaaatcaagttaatattgcatcaattattagtaaaaccaaacatatataaagctaactgctgggctttgcccggcagtgcttgtttccggaaaaataacattatataaatctaaaagagaaacatcattgtgatatgcatcatgaccttccatagaatatctctggctattttatcacttcactaattcaagaaagagggtgtatcatttaactgggaaattatcctcgattaacttcactagtacaagaataatcggatttcttaagtcataccttcccaagtactcgcacaatctgcttatccctaacctgcttcgacttgtaaagatcttgaccctacacgagtacaatatatgtcattaacaacagcaaactattacacataacagatggtgcatacataattcagatattaaaaaatccaatttttggctgattctatcatgttaagtaaaatcatgtgaagaaacaactagctcaattagtgcatttagagagtgcttactctaagagcagggtttgcatccggatggaagacagaaagcgtgctcattgcactggcaagggcacccatgggatgagcgtcatgaggcattgcttgtatgatatcctgtcaacgttaaaagaacaccaagccattagttattagtacaaattaaacagaaaagctgtccatatatactgcaatgatacacaataagatggcaaaacataccaagagtccctggggaacagcagagtgctgagaaatcgcaaattcccatccagccaattggctctgggtaggcaaacttccgtacactgcaagagcaaacatgttttcaacaacaaaaactacatttgcattaaagaggaaataaaggtgcagaacacttactcaggaggtaggccacctcaacaaatgagctgctttcagccaactcttcaattgggtatcccctgtaacgaagaattccctcatccccatcaatgtagcagatggatgagcgaactggggctgtgttgagataaccaggatcatagatcttaagacccttgtcgtcctttccagtggtaatctgcaacaattaacccaaaaaaaatcctatttaactctgggatgatctcatatagcaaaggcatcataatatgcacagagcttgagctgtccacacattctcttgaaattttagtcctaaaccaaaaggtagtgaagtaacatttgcatagttatctaataattcggtagttgcattctagtttgttcgcaagaagtacctgccaatcaagcagaacaatttactacaactacgaagtcacatgcaagcactagaagatttaggataacttcattgtgaacaaacgggtaagctgcgacctcatcgaagtcaaccaggataacaattagaaatcgccacacctacatccatacagacactataatgaggaactaaactcaataatcatgctagtttcgactttctgacatctccagggagaagatttgtccaaaggggggtggcgattgggcgaaatttacacatcggttttgtcacccaatcactagcagcagacgaaaattgagcacaaccaagatcgcaatcccctaatccaagccgattccacagaaatccagcttgatccaccaaccaaaacccgcatcccgaaatcccgcaacaccccccacataacccggcgcggatcacggcgcaggtcgcggcaacgaagaagccagcagtaagcgtagcgctcctaccttcttgaagtcggtggcgcgcacggtcccctcgtccgacaccttgacctcgtacctcttccccgtcctcccatccaccaccgccagcgcgccgcctcgcgcccccgcagacgccgccgacctctccagcggccccgccgcgtccgcctccccgcaggcggcggcgggggaggcgaggtgggcggagagcacggcgaggcgggcgcgatccatcggcgaggagagcagagcagagcagaggtgggcgcgggtggtggttgcttggacgactcgtctgcgttgggttgcaggttggggtttgtttgggtttggcttccgctttgcgggaattatcgagtcgtggatgctgctgctgttattattgtggggggagatggagaaggtgcaggaccactgggggcctcgtggggggatcagatgatgatgacgatggtgatgacgacgacgacgatgagatttgttttcggtgagtttgcacgtcttacggtttcattttcaacgcgggcttctatttgaactcttattaaaatacatcttccaattacttaaacttattatgaaggttattccaattctaaattgccacgattttcttgtgtcatatatcacgtgggtgctaattctttttctccttttatttttcttttttcaaaaccaccttgagtaataagaacggttttacaaaatttagagggttggatgtccggttttaaagtttaaggcgttaaacggacttctatttaaagtttagaggggtatttggaaattttccattctttttctccttttatttttcctttttctcccctttctcttcttccttcctcttcgtgtgtaagaaataaaaaaagaggggaaaaaaacaaaaacatagagaataataatgaaaaaaatgggataggaatgtgtgtatgacataccatgtcaatgttatgtaagatcgggtaatttgaaatcagaataatacactttaacaagtcatggatctaaaaatctctgctacttagaaaaccgatatttttggtggtgagtcctgaacaatcaaacagctaagttgtttcctaagatcctcccacaagatcaacactccaaaatgcccaatccttgtatcgcgctccaaccacccattcgtgcatccactctcttcgcgctccgtcgcacgcgcgccggctccccttttgccgcccaccttccaaccctgctcccttcgccgccaccaaagtcgtcgtcccattgctcatacgcctctacccatcgcaccgatccacactgccaccgatgacgatttcctccgctcatcccctaaccaccgccccatccctcccaagtcaaggtacacggatgttcgcgcaagggataatttcaggttgacgtggcatattcgccaaggtgtagtttgttagagttttgtgtcgaatatgtgtacgtagtcggttgcaatttaggacttggagttgtaataggtgtttggactagagtaagagtcagattttatcttggttgtaaccgcaagacgacaatagcataggtatggatacgactgaccgacggcctagccgatggagggtcgtgaatacccggatacactgtaatatgctggatcggggaagaccgctcgtaatcagtgctctggggatgtaggttttgactgaacctcgttaacaaatatcatgcctcagtgtcgccttcatgtttagatcttctatggcgtttcttccacgttcggttttcgaggtatatatcgggctggttttataacagtgtgcgcgtgcggctgcgagggagaagggagtggggaggcactcgaatgactgtgcattacataatataatttgatggacataaagaagattaattagatcaccatcctaaagatagagacaacactatccacaattagtgaaaatcctgcaagctacatgtagtcctagttcaaacctaaaaacagactccatgaaattagcgcctgatggttctaccaatgagaacttgcgcacattgcacatcaccgccggcaacattgaaccgaattagaaggtatcatcagagtgtaactgcattgcaaatcaaccactcgtccaagtgtggtcgcaaaatgcgaagaacaaccaatgactgcaatcaatcggccacgagccaatgtggggtcccacccacggcatcaactgcacgaagaaggttctctcaagcggctctcccatagaggatgcgatatgattcaccgctgccgctcatccgaaagtcggagagaggttttcacccatagatattgatgtggtggagaaggagaaaacccatcataacgatgtctataaggaggggagcggtgccacatataatcacaggacattatacatgcatgaatatatgaatatatgttgctgcattactctagctaccaagtcagctcaaagcataaatggattgaagcctcgctcattttggagataagaatttgagcggcagaatatcatgtcgagatgagtgggtgagatactttttttgacgttggtatctcatcattgaagtatataccctcatatgtcccttccttttcctttcgtgaggtatatgtcggatatgcacctttttatatatgtatcttttacagaattgatctatctactgcagaatcttatctattttagccttacatgcaacataaacttactcttctgagaaagtcgatttacaacacgtgcacttatcctttgtatatcatctaaatacaatccattctaaaatatatagctatcttatatatctagtcatagccataaatatatagctatgttttcggagccattgtttcacttattcgcgggataagcaaaacgacatatttgtaaaagaaaaataatttgtgaataaaatttttatatacatgttcctagtgatctaaaagcaaaagctgaaaaataaattttgatgaaaaaaaatctcaaaatcagctccaaatttaaagttgaaaattcaattttggctaataataagcataatcataagtgaaaaaatgaggcccaagagagggagggtgaagtagtcattaaaaattctagaacaaaaataataacatagtgattacaacgttataatgttatatgctaaactatgttttttatgttatatttatccatatataactcactctgtatgtaaaaaaaatagacatagtaataagagaaaataacccctattttctctgtcttaaaatgtaatagtagctatttctatctacagaacatgcacttatccatatccacatccagaaataactacatttcgaggctaagggagtataaaaaaccacttctcattaacatatttaactgggacagattgggagtaaaaagttaaattaaatgcgtcttagtctcttaataattgaatcagatatcttgaatcatatattcgatccttctaaattgtgctatatccatatcaaatagagaatatatctctactattataaaaattgaagatgtttttaccggtactttgatacgtcatacaatccgtgtatgagtcggttttcaaatttgttcatttttagaaataaaaatccatacatatttgagtcggattcttataattccgttcgcttttagaagtacaaaatgagtcgtataagaaatatctttaaaaaaactcgcatattaacttgacatgatattttagaaaaaaatatatatccaaatgaattctcacagtgaatttcacgttgaacaataaaatagccttcacccattgcaacgcacggatattttttctaatgactatataaagataaaaatgatgctccgttcatcccatttaagtgcggttgtagatttctgtgtctaacgtttcattgttcattttatttgaaattcttttatgattaatattttattattattagatgataaaacatgaatagtaatttatagacgcgacttaatttttttttcataaactttttaaataagatggacgatcaaatgttggacatataaacacacaatttcatttaaaatgagacggagggagtatatacgatgttccatgcatgtaccacgtggagcatcgcaccacacgcatgaatgatatatgttttaatttattattatacggacacacatcgatcttacataaaaatacctgtttgtatgtgtctatatatatatacatatatatatatatatatatatatatatatatatatatatatatatatatatatatatatatatatatatgatccatttcgtttactacatcacataattaacctataagtgtatgtataacagtacatatatcgcacaccacatcctctcactatatataaactacaccaagcacaacagggataatattgcagctagctctagctacaaattaaacttaaagcatgcagcatatacatatagatatataagtacatatatatatcatcatatgctacgtttttattcgatcgttgaccacattgatctatataatatagatactgcatgcaaattataaatgcatgtaatatagctaattaagctatagagcttgattaattaggcttggcggcggcgggaggtgtaaggtccggtgaacctccggccgccggagccggcctggcgctggcagttgaagtagacggcggcgacgggcgcgccgaggttgtagcggcgggcgaaggcgcgggtggtgaagttgtggcgcaccgccggcgcgtacaccgtctccctccccagctgccggaacagcaccagcaccatcctgtggatccccgtcgtcgggttcgggctctcgtagcacaccacctccctccctgcatccgtatcgcaaagcaaccgcgcctctcagatcatatatatcgccaattcattaaatattttatatataacgttggtcagtttattttaacctgaccaacagagaaagtatatattatactattcgaatctcgatctcatgtctcatcgatctataaatctagtgttaagtagagattgcatattgtacgtaccatatgtagcatcggttgaagccgggatgtcagtcaccatcctgcaaatacacgcatggacatatatcgataagtagctagttagcacatagatccatatatagagttccatatatgtacatattgatcgatcccgatacatatgatctagctgtactgcatcacggatcgatcgatcgatcgatcgatttatgtatgtattgtgtggttcgagatgaactaacgcacacaccgatcgaccacgtggacacaacgcatgcgtgtacatccatgacatggcgcacatttgtacggtagctgatcgacgtacacgcgtgcagcatgcattgttacaagtgtatatttggtccctagctatctatactatacacaattacccacagttttttctgcatgcaagttgcaagctgcatttgcaccgtttgttgcgcacacaggggggctgtaagtgggtcagccgcgaacccacttataggttaaaataagtggcttattttagcctataagtgggtttagcgggttagccacttataccgcgcatgcgtatgcacgtgcgtgcaaaatgatcggtttaatttattttatggaatgtaaaaaaattgacactaattaaattgattgataattaactgagatcgatgtagctagctatagctactatatagtgctcaccagtggaggtattccctcagagttggattgctagggttaggtgcatcaggatcaaccatcacctacaacatagatgggtattcacacagttagcataaatccacgcatgaactgatgaacatatatattatatgcatatatatgatcaggtggtgccaattcggtaggtaacataattaattaacgcgcaaaagctttatacgccaatgtattaacactaaaattgtataaagatggcacgaaaatagtaccagagtatatgcgacgcgaagatcgtctcccccgacttcgaccaccggtttctccgcgaccgccggtgcgcgaagctccacgccgcttatgaccggcatgccatcatcaccatacatgacggtgagatcgacggtgctgatgaagggatccaggacatctccgatcacacgccctgtagccaatgaatcgttggccatttctgacgatttgcttaattggatcgaattgctagctagctatattgtgctggggattgagctagacagcagtgagaacaaatactgcgagctacaggagcttgcagctggtatatatgctgtatatgttttttgggtgtgtgttgtcgtcggcgatggctagctgtgtagatagaattggtttgtgttgtgttgggacaaaagctacaagggttgcgtgctatttatagggtacaaactgccgaccttgcacatcacacattcgcatgcatcgttctccggccggcgcttcggtgacaaattctcctagattttgacaggtctgacaaatttatttctagcgtgtctttaatttgatttcctaggacggcagatgtatgttcaactacatatttgatgtagagactcgattcaattgtgtttgtttttaagaaaacaaaatatgtatgtcaaaatatatctctactattataaaaattaaagatgtttttgccggtattttgatacgttattcatgtttgagccggtttttaagttcattcgcttttgaaattacatatttgtatttgggtaggtttttaaattcgtttgcttttgaaaatatagaaagagtcgtataagaattctctttaaagaactcgcatgctaacttgagacaatcggactcctaattattgtagctcatgatcttgtaaaaacaatattcaagtaaattcctatagtgaatttcagtttagctaaatcgtataacaataataagattaaggctgtgttcgctccaaccggttcctgacccaaacagtacgcacggaaacagaacggtccattagcacgtgattaattaagtattttcttttttttttcaaaaatggatcaatatgatttttaagcaacttccgtagagattttttttttcaaaaaacgcaccgtttagctatttgaaaagcgcgcggacggaaaacgagagcagggagttgtgaaccagctcttgcgaacagagcctaagccctaagatatatagccttcacccattgcaacgcacgtgtattttttttaagtatatcttcatatatagagactggattcatctcgattctatcattgaaaaagaattgaggcatgcgtacacaggtcgtaagcatttctcttttcctttttaacttgaaaggaatttctttttccttttctaacaattggaatgaaatatggataaagctacatacgcatctctagcgtgtgtgctgtgcgtgtgtctgttaatttgtatgtgacagcacatcctttttgccatgtgtgtgatttcaataggcttatggatcaacttttttttttcaaaaaaaaagaagggaaagcttagaatctttgagacttgagagcgccctggagatcactgctggtacgtattcttggcctttttcgggtcaaatattctctccttcactattggcttattggttttcaccttttttttttttagcttggcccggaatggataggccgacctacagatgtgcacccatttttattaaccaaggttgaagccatacaatattgctgttgagttcactgaatttttaggagtcacactatactaatatcaatatgatctacattttaatttgacaatgattttatttgggcgtccaacatgatccatgcgattggataccctgaagcaccactccactttgtgttctacccttatctgcacctcgttcttaggctgatccatacataccccttgcccttctcccccttcttccttcctctcttcccctgggtttggcaaacgtactctagctaagggcatgttctttttttattatcattgtcagattatcgcgttcatgcatgcttttcaagtttctaaacggtatgattaatgcaaaactttcttcattagtatgtcttattagtgaactcttttaaatcaacttatcatatttctaatatttaattcgttcgcttgtgtcctcgaataattatcataaatttagtttcatccattactatgatggcaatgacttagggaccgtttgaaagtgctaatgggccctaagtcatattgcttatcctacaagctataattattctgcaatttgcctcatgctggtccttgtcaacaatgcaaacccttctctctctctctctctctctctcacacacacacacacacacaccccgatcgaggtacatctcgttgggtgtccgcatttgagttattagctcgagaggacgaggagatcatctgcaagggaggagatgccaccattggagtggggatctagctagatggttaattggggactctgcttgatccatttggtgctaattagagcaaggctaatattatagcctattgccggctacacttcattctatagctaatgctgaagccaactactcatacaataggttgcttgttggctagctacatctcataaataaaataattaattataactagcacatgtcaatgtgtatgatcaagagtgaagtggatcattattgtagccaattttgttttgacattaacatttgtatgctacagaagtaatcacaaaacaccacatagttcacacacttttctaaggaccagtagagctcacgatggcctaaggagctagtgctacctccctcttcgtccggtgagacatggtgttggtggtggggaactatggttttaggcaggaatttctcacgggggcgggagagattattcaaggtggaagaggagcagggctgtggtcgaggtggccagcggaagaaggagatcggaagcggcgaaatattgcgatggggaattttggagcgactggattttttttgtcatatatataggtagtttcgcgagtgcgggagggagaggtggagaagcgcaggagctgcgtcagagagaggggaggagaagcacaggagccggagggggacattgcactgtcggaagagaaatcgtcacggtggtctcgcgcgttgagaatcaatggggcggaggcgatcgagaggaaggggatcgggaggggagggcgatgcagatggggagggcaatgtggaggggtagtatgatccactgtggttgcacaggccccacaatgtgtgtttttaatcgccgggagcagctgcaagcgagcgataccaactaaaaaatctctatcgccgggctacaaattagtcagtcgttttcttctatccctcttctcttctctcccctctacacaggaatatgatgatgtggcatagttttgcaactcattattttacctgctcttaatgacattgatgtatagagcgtagttctagcaggaggaggaattcattagaaggcgccaataggtacttgtatattttttatgattttttttgcgatcattttctttattttgttccatattcgaatgtatggcaaccaaccaattgtttttagagatgttgcacaactttatttttcaattaatgtacaaatttctaacattttaacttaatttattaaattattctaatttcacaaaaatataaattatcctaactaaattgttcttttattgatgtggggattttcaaaggagcctctaattaatagtactagtttgataccccgcgcgttgctgcgagattttatggtgatgataaacaactttgtaaatatgtgcttacaaacataattgaagaattgaaatatcaaaaataaacattctaaaataataaagtgtaaagttggcatttgagtagtagatggttaacggatatagcagtggcttaatatggtggatggatgcaatgtatgaccaggagcacttaagtgggtcatccattgatgtgcctaattacccatggcagtttccttacttaaagcatgcacagttaaacaaacaaagatgcatttgatccgacggctattgattatcgatgatatggcttaacctggatgcttctttatagtgttaatgcttgtagtggataccaactatataggaaaagagaatgcatataaattgtgcatcaccagcatgctgagatcatgtgcaaacctgatgtacttttgaaagggagaggatcatatacctattaattataattttttctcttgttatttgtaaaatttctgatacaatatgatatgatgggacaaatcatcgatgttaactagatagcgtcccgtgtgttgcggtaatagggtattgagatgtgaacatagcattttccaaattacaatacacatagtcttatagagatatgcctaatcaaaagcaaaaataaaataaaatcaatgggccatcaatccaaattagtgaaaggtcacgagtgatacgggtggttttctgtggcagctatttataattaataattaataattaatgtgggtttcaactatatatattgtatactagttgatatcctacactttgctacgggatatgtggaataatgcatgttacgggcccctttgaatcgcagggttgaaaaaatggaggaataggaaaaatacaggattctgataggaattgaagtgtaaaacagagaattgcaaaacacaggaaaaacacaggaatggtcgtttgattggagcgcaggaaaaacgcaggaatcggatgagagagatagactcaaagggaattttccaaaaggttagagctcttgctatatttcctccaaaatccacatacaatgtgccattccataggaatttcataggatttggaaaacttcctataggatttgaatcctatgaaattcctagataaatcttttgattcaaaggggcccgacacattatataaatggtagatgtatatgtttaaataatgtgaaaatgatatggagataatgatttgacattgcttgcatattgagttctaaaaatacaacaaaattgtaaatgatatgtcatgttagcatgatatttaaaatactctagataataattactagtgagtgatgatgtgacacacttgcatgttaagttttagtagttagtgggcatcaactttatagtaaaataggatttgaaataattaactatttgccactcttacgagtggttctagaggatttgccactagacccacatgtaatagatacacgagggcccacatgtcatagatacatgagggcctacatgtcatagatagcgaatggcaaatccttaattgacacatcttaaaagtggcaaataattaaatgtccctttatatacatataaccggatgattttgtgatcactattcgatggtacaacttaattaattaattattgtatagttgaaaattgaattgaaaatatttatttaataaattgatatacctctctagtttttacaaaaatcggacagtttagaggcttagaagcgtgttgcatgcattaatccattcttccattcattcgaaaaagaaaaggcatagattcttagcatgcagtacgtgtatcaattatatgtagaaacctcatgtaagaaaataatagccacaaaatttgtcaaacttgattctgtcttcactggatgattaactgaaattgacataacagaaacagattcaataaagtacagcaaacagaggcgtagaaaattctatcaaatatattggctggctagctctagctagctagctttgctctcttttcacaaatttcctcacgtgcagctagcccttcccagcttgtaatactactggtcccttgcaaatctatccaagctagcgtttgtgatggctatggatgtcacgtcgatcgaccggaccgggtgcccatccgatcgatatcgataaagtccgaccgtccgatcgctttcgtacattttatttacttctttgattgatcctgtttcgtgatcatatgtgggccggccgatagttgtccgtgatgaataccgatcgacggtgtgtaccttggaatgaatcgttggcgcagccggatttttgacattctagctagcgatgtttacgttatctagatcaggaattccatgtctttttagagtttaggcaggaaagaggcggatagtgtgtagtgtctttttcattgcaaaagctactcgagataaagttaattagaagcggtgaaatacttttctggagagatcatgacggatgaaactaaattttattatagtacatttgcgatgtaattaagagccatctactaccttcactacaagagggcgaatccctctgtaggtttgttccaaaaaacctttcagtcctcccacgagtttaagtcctcccacgagataagtatttaattatcccaaattaatataaattggttcttttaggcggttttgatcatattgcaatcaagatcagaagctattactactacagaaaagcaaatagggaacgggcgtataggtgccggaaacacaagaactggcacccatatggcttttcccgctcacgcgcatgcccgtgggagcgctgaaggataaaaaaccggcattaatgagatgttattagtgccgattttattctttgtaataaaaccggccggcactaatgatattgtatcgattcattaataaaaattggcacttatatgtgtttcatcggttcttataaccgacacttatatgtcatatattggtttcgttctttttaaaaccagcacagatggatcgtggtgagacattcgagtgaagcgtggaggccaccgacaaaatagttttttatttcatctgaatcgctcgatcgtttatttaatttcgcctctggatccttctcaacctcatcgtttgccacatttctctctccatcgctcatccctagattcccttgccccttctctctcgcttctcccagcctcctccacctcgacggtgatctcctctccctctccccaaacgacctcctccttctcaacggcggcgtcatgtgctgacagcggggacggctagatccgaagctgggatggcttcatgggcagccaaatctagagttagggcaacagcagggtggctcctcagcaatggtggcgatgcagggcggtgcagcccgttcgactgcagcagctccatccctcttccttggagcagaggcagggacaacggtgctccgagcaagagtagggtcaagtgctatggcctctgcctcacccccaagtaccttatcgtgttcccctttatctttcaccgtcactgccacccatcccttcgaggcttcgacaatgagaagaagtgccaacaacagtagaagttcactgatttgttaagtggttttgataacaatccggcccaggtggggttggccgaggcccaacaaattaaggttgtccgaaccccaacagttcttaggcccacccactcggggaaaggcccaatctccctaaaagactagtccattaggggaatggtggctctcccttttaaggtggcttcctcctcccaagctaagcaaggtgggattattcaaaggctcacacggtcgccgcccgacttttgcgtcttttgccaacgggtaatagtggaggatgtcctcatcaggtttagttctttagcttccaagtcaaatagttagaaattattatcgtcaaatagactatttaatttatctcacattagtaaatgacttagtatttgcggatcgtggaacactaggcgacatagttgtggatctcctcctcaccatcgctagaggggagcgtcggattccggtagtcctcgagaaaggtgagtggtggtagggattgcggcgacaccctctagctagaagttcctaggacatggcgtggcaggaggctgtgacaggtggcactggcgaggcaggggggacagtggcatgcaggaaggcaaggcaagaggatggtggtagcctagtgtggagatgtcaagtgaacgggctgctcttggacccaccaatggatctagccatgccttgtgcggcgacaacaagaggatgacgtgcggtagtggtggacgtggtgacggtgggcttctctattagtgactaaggttccccggccagatttggtggcaatggtgggtgcgggtggctacaatgccatttctagtcgccactgtggaaaagccggttgtcgttagagtcatgacattggagatgccacctatctttccataggtgatgtcgtgatgcccctccctcatttgtaccttagggtaaactctctgaataaaatcattgttctagatattcagaatagtgatgacgatattctagatgtcatgaccttcttataaccgttgcattggaagttccctaatgacacgatgtccttgtggtggtgtacccgccagatcgggttcaataacaatgatggtgaaaaaaaatctagacaaataactgatttatatattatattatatataatgtacatatgtgacttgtaattaatatttatatatattatatatgctacatgagactctcctactttctttcatagtaaaagttactctcctgatgttataatttgctttggttaacatcagtcgccggtggtgatagtagcaacaaaataattaaatcgacaaagaattagctattgatttcgaagattttgagccattgtgacaaataattgttatacatatatactctggctaaccatacaagaaaatcgatctatgtatttaaggtggtatttttaattactccctccgtccaaaaaaaactaattctgggtttgaatctatgtgtggtttgaatctatgtgtctagattctctatgtccagattcaaacccagaattggtatgtccagattcaaactcaggattggatttttttttggacggaggaagtagttttctagtctttagttatttgtcatgtaacctccataataattggttagaatgaattaaattatttaaaaagatctcatattagtcaagaaagatatactccatccttcccataaaaaccaacctaatactgaatgtgatacatcttagtacaacgaatctaaatatacatctgtctagatttattgtcataaattcgtttttttttggatggagggagtacgcatgttgctcagatcgtacatggtaggtgtgatcatgtttgcagatttccagttcgatttctaccagccgcacgccaaaccttcgatccacgcatatgcacctagtaaaacctgaagatagatcgatgtgacttgcattgagaacgacatcgatgcacatatatatttccacatgcatgtcaccagagcaaaacgtgagaaattgccgaacgaacgaattgaaggcatgtgcttattaattgtttagcacgtacgacacatatacacgtacacgtgttcattgaagtcgtcgtagttgcacccccgccgttaagcaacaccgacgcgatcgagtcatatgtctcgaagaccaagaaaacggctgtgctactgtgctcccatgcaattgtacaccgtccagccaaaactgtggtgatcacgacagatcgagatggcctccgtccatataatcaatgatcaagatgcaattaattagctgcggggaagcatagatggtgtggtggtgtgtacgataaattgaacccatcaggatttacacataaatattgcgcagatgcatgcatgttttttatggaaaaatttagtaaaataaaaaagtgttgttggttttagtcccgattatctaaccgagactacgaattcgaaacaagatcgatctctagtcgaactaaagagagaataacagcagttcggatggtcccctttctttttttttattttctcccgaatcaagtggcatgcatatccctaaatctcaaatcaaagtaacatcccaaatccacatcacaaatcttaaagttacttatacacataaatcaaatacatcgcaaatcctaaaaaaattacacacaaatcaaattacatcacaagttctacaaaattcatcgcaaatacatcacaagttcacattgcacacaaatcaaatacatcacaggatcatgcaataaatcacaaattcaaaaaaaaaaccatagaggcgccgcccggccagccgctgccgcctcctctctgcaccggccggccaccgccgcgccgccgcccaccgccaccgcgcaagccgccgccgagccggccgccgcctggccggcccgctctcgcgctcgatctcgctcaatcaaaaaaagaggaaggaagaaagagataaggcaggagttagagaggaagaaagaaagaaagagatagagtttgctgtgtggacgagagaagaggataagtaatagggattttatagtacgtgttgatttttattcccggttagtaacaccaaccgagattaaacttagatctttagtcccgatttataagatcctaggcgcctgacacggaaccaatcgggactaaaaatcatctttagtcttggttggtgtaaagatcatttttagtcccagttggtaacaccaaccaggaataaagatcatctagtcctgttgttcttataaaccgggactaaaaatcgtttctagtcccggtttttaatggaaccgggactattgtggatttgggtcaaccgaccaaagattatttctccaccagtgttattatacgtgtattaggaaatacatattcatagatgtgtgagtgtgtttttgcatgtgtgcacttttaccgtgtactactttgctcatcggattatgagtgtgtacaatttgtgagtgtgtgagtgtggagtaataaaaaaagacatatagttaggtattgttagttactttctctctctttttctttctttctctttctctttctgttttttaaattaaagttaagataagaagattacgtgaaaaattaaataaaagatgattatcatcatttgagatgagagtgaaaaattaataaacaagatttaaattttagaagtaaccacaatacgaggacggagatggtaaaacgtaacgggaaaggtgaaaaaaaaattggcattcacctttgaatatatattcgatctggtgtaatgttgactgaagtgaaattgaacccttactttgcctaccgctttcaataatcctgtaggctttgtgtcgtactactcatcggtccattcgttttgctcatcggattattcaaaaaatgagagagggagcgttgccatcaataactaaaaaaaatctacatcatcatcgcgagtagcagtctgccaggtaatttagcacctgcggaaacatgaccaatagaagaacgcaggttgacttcaaacattctcctgttctccatttcggctctggacggtggcttttttcttgatacttagaaaaccactgctaggtgaaatatatgctagtacacgaaatatagtgactaagaacatttccaacagagtggtcatcccactctccaagttaaaatttgatagctatggactaaaaacgagcttcaatagtattgctaaacggatggccaagccatctggctggccaaactggctctctcagtagccaaacttggccagtccaaattagcttaccaatcgtgggtcccacgtgagatgctctctccctcctctttctcccccccccactctcttccggtggccgatcgaggtcaccgtcgccagcttcccttgcccgtcgtcacctccagcctcgcacacgcggggagccgtcgcctcccgcctcacgcgcgtgtgtactcgaggatggatcgatgggccgatgcgggagaagagaaagaggaggaggaagaaggcaatggaggctgacatgtgggtcctttatcattttggagatgtaaatatagagactgttgaagtgaacacctagtttaactatccaaaccagttaaagagttggctatatcagtatttggagagtctaatttggagatgttgttggagatgctctaatcttcttgggctgtaccgcaggttatttgcctattaatatatatactccatagtactgatcatttataatatttaataacgaaatttggttgtaacctacctatttttttcatattctcaccagctgacttcttaccagctgtttctcaaaattttaaacttatctaaataaggtctatatacccaattataatcgtaaatctgcataaaagataatatgttaccgacaacatgtcatgcatcaatttttcccacctacctattctacccatctccaccttctatccatctctaattctactctagacccattgaataggtaagtattgagctcatgagtagtcaatgctatggctatggatatggcgtagctagccgtctactgctggcctgcggctagtagttggctattagcttaccttccgatttttgctgctgcagctagctagtgcagccgagtaagctcagtagtaactataacctagtcaatacaccatgtttgttatagaattgtttgatttttcaattacctgaaaatacccacaaatttcaatcacctttagatggtatagattatgctacaactcgtatgctacagaaaccttgtcctaatctcttctcccctctcaccttgtccttaagaaataccttttcatagacgacttccctatagaattataggcgaggccttcaggaggaccacctatgataaggccatttcgaggtaacgctagatcgaacgctcgcctccccaatgagcgccactacctcctcgaccactaatgcgtcgccttttataattgttcgcgccaacgagactgctctaactggcttcctcctcctccccttccccaccttcccaagccgggcagcagtgaggacccctgccatcttccttgtctctagcggctcgcgtcattgaagacacccctaacacccccccgcctcttaaccacccaaacttccacgctcctgccgacctctccacccattgcccttcaattctacaactatgaaggaaccactcccgcctcgccacccacctatgtttgccgcccaccgccattttcgtcgccctcggctatccctctaaatccgtgaaagctctccgtccttcctctccccaccctttctcacatcgactcccaccctggaacctaaactctaagttctctgcaagagtttcgatgctttgagcaccgtcgaggagtcacatcctctttcaccgttagttggtgagttaattaccccctactcccttcatccgtccccactcatggaattcagtgttgtattaaagggagttcagtgttaggttaaaggtgattgaagttcatagcatcctcttttttttttagtttgaactatggatcacatgacgtatttaacttgtgacatgtgcgcaacgactttgctaaacatctctgatatttgatgttttcctgggcgtaggatcgtgtgtcaagattagtgcaggaaattacagttctatataactaaaattacattcgtaaattcagttgatatgacatgtaaatgtattgtaattggtaaaaatgttgtgcaagtaaatatgtatttgttattttctttaaaatataaaattacagtgctatataactaaaattacatttgcaaattcagttgatatgaaatgtaagtgcgttgtaattttgataaaaatattgtgtaagtaaatatgtattgttgtgttcttttttagttatttggatgtaaatctaagggtagaaaaaacctgggtgatttttttttttagaaatcacccgacaaatggatagacagttccgtgtcgtaaacgcctttgacccaaacagaaaagtgtagtaaacataacgaggcatccccccacgattcatgattttttttatttttacatttttattaaaatatttacaaaaacatttttttcaaaatttacaattctagtcgcctctcgccctctggaagggcattttttaaaaatcgtccttccagagggctttaggggacctaaatacaaattttttatttgtgttcaaactctttccaccggttttaattgcttaaaaactaataattcttattcgacgctccaaatgattttaaatggaaaagtgataagctacaaagttgtagatatcatccagatctacaacttttatataaagtttatctccatccaatgtcgtttgaaatgtagatatgagattttttaaaaaataggttttgcattttgtaacgaatatttggatatctaaaagatcttaaatgaaaaagttgttaactacaaacttgtatatctcctcgagctctaaaatttttatataaagttttatttcatttgactttatataatataattttaaattgtaaaatcatagagttgacaagttatactggaaaatttacatttaggtcccttaataccctctgtgagggtgatttttcccagcgggcgagaggcatttgtaaattttcgaaacaaaagattattttttaaaatattttaataaaaaaatatataaataaaaaaaattccacgattcatctcattagcccactaagcaaactagtgggcccaatagcccaattccgtggccccagaaccagcgcctccgagcccagtgggcccatcttgtcagtgactgacaccaaggacaccgcgacgcggccccctccgcctcgcaaagcaattttgccattctcccgtttcaaacccgcgctctctctctctctctctctctctccccctccctgccgctgctgccgccaccgccgcggcggcgccccgattcggtgatcccccgctcgcccatctccgccgtgacgtatcggcgacgcggagggagccccccaccccccacctccggatctagggtttcgaggcccaggtggcgttgcgctgcgcccccgctcctccgcctctcctccgccgccgagggttcgcgtgaggtaaccgacgcgcccccgtttggtaatcgcaccggcagatatcgtgggggttcgtttctccgtggcgtgttttggtgatggatccgatctaggtttgttttaggggctattttgacccaaatttcaggtgttttgcggagattgtagtgtttctacctagaaatactgcgattattggtgcgtttggagatgccactggctgtgaaatttcctgtgggaactcgtttccagttcgctggggatttatggaatggttacggttttgcaatattacgggttttgcgaactaaggcttcggtttggtcgctcatgggagcaatatttagtacgattgtcatcgccatttctgcaattccaccagcgattggttgctctgttcgtactcccaatagaaagcttgctccgctgctgatatttaaagtgcttcgttggtggatttcaactgcagatgttgggctctgaaggaaatggtgcaatttcttcgtgcatgatgctcgtatattgtgtctattatgtagtcctgcctgcttcggtggttctagatgctacagctttatctgccattctatttatgctgcattctatgttcagggcatgcgcaaaatattattgaaatgatcatttacttgaagataattggatttatttcattaattgctccgtaagccttgattcataggtagtattatgctttttttactactaagtctgtagaatcccatctctcctgcaatagctcataagaaagtgacatgttgtgcgatgcagaactggttctgaatgcatagtccttagtgcattttgagctaccctttgtcaggactgtagtctctgtaaatagtgggagaattcattggctaaaaagatgacaaaagctagctgcttatcagtattaagtgtcgcaccatttcttttatcatgcgagtagtgcaagtgcctgaagggttatcccatttagctattccaaatggcacatacgaaatatgattatttgttcatttgatccgtgatacttaggtagctatgatctgtctctgctcggtttgtttttctgttcagacatgcagaatacaactgctgtctgtattcagtttatatcttgcaactcataattctatgtttctacctgcaggtttctgcgtattaccagctctgtacttaatttactagtgagaagcaaaatgaagtgcaatgcttgctggcgggagttggaagggcaagctgtatcaacaacctgcggtcatcttttatgtatgcctgcaatcttccttactagttttgcttaaccagtttctcattgtaaactaacattgtctgctgctattgcagtatacataactgatccttgctgatgattatccgttgagcaggtacagaggatgctaagaaaatactgagcaatgatgctgcatgcccgatttgtgatcaagtgctttcaaaaaggtctgttgtttactcttgaagttgtattcattatctcatactacattttctcttctttcctgtaagctatttttgaatgtacatcatgatttgacaattagggatgccaaaagtacctcaaacgcatacatatttatcatctcgatggttattgccatgtcatttcatccgaatgggtgcttaacacatggagtttactttctagcatgctttgaagcttttatacttctttgatgtgttcgagtgaaaatggactccagtggtttactattttgagacagtctaaacattataattttttttctcagccatatgagacctgttgatacaaatccaaatgatgattggacaaatgtaagttcgcttacgattcattgtagataaaagcaatccttctttttctaacagccagtctgctcattggtacagatgtcaatggctggagtttctccacagatacgtatccttattattttctcattgtccgtaagattcttgtgctacttttgttgaaaatcatcactaactgctatatggaatctatggcgtagctagcctcttgtcctgttttattgtcatagtaatgcaaaaatctgaaagatcaaaattgtttatatgattattgtctaaggcttggtgactattcagattttccctaactatgatgctaatcagttatgaagagtgcatacagaagtgtcatgttttacattgggcaaaaggaactggagatgcagtacaagatgaacagaattgttggtcagtgtaggcaaaagtgtgaacttatgcaggcaaagttcactgagaagctggaagaagttcatactgcataccagaaaatggccaaaaaatgccagttgatggaacaagaggttgaaaacttgtcgagggataagcaagagctacaagaaaaatttgctgagaaatccaggtcagtatgtacagtacatttctagtttaattctcatatgaataaacctctgcttcatccaacttatatggagaattgactgctgtcatttccaggcagaaaaggaagcttgatgagatgtatgatcagctgagaagcgagtatgagtcggcaaagcgttcagcaattcaacctgcgaacaactacttcccaagagcccagccagacctgttctcaggcgtgcccaacataatggatagcagcgaccctctgagacaaggtaatttaacatgttatcattcagcttattagttctctcataccatataactcatcctttcctctgtgcacacccttttgttatgcttccaaccagaaaaactgttaactgtaatgcttggattgctagtagccactattaaatatataaaagttaaaatgcttttagccctccacaaaaacagcttattcactggctgcaggattggctggtcttcctgaaactccagggcggagagatgagggatgggctccaccaccaaggcaacgtcggtccacctctggaccatttgagctgtctgcgggatctcctgctcacaatgcggcgcctccggttgatattaggcccagacagccagcacggcccgtattcggcactgccatgaataatacttctgcagctctgcgaaatatgataatctcgcctgtgaaacgtcctcagctttcccgaaaccgtccacatatgttcacgtaatgtcctccttattgctcatgcatgtatttcacatctaaatgaagcagtttgggaatgaaaattgatgtccaacttgctcaaaagaattatttcaacagtaacatgacatttctacgcttgccctttcctatactaattcatggaaatgtgaaatgccaggttgtagaattggaagagctgatgtggcatcctgctttggaatctgtcacggtcttgtcatggacttgctaactgtaaatgcagtaagatcaatctgtctctttccctcacttcaatttctgccccatcatcttggtgtatagaaactgttacagaagtcccttgggagaagattgttagggaggttctgatatatacttggggcgcaaagtcactccttcctgattgcaataacacgtagtgtatctgcagctaaattcttggactttgtgactgtcatcacactaaccatctactattagtagtaataatttactactgctcggggtggactaacccctgaatgatggggacggtttttctaggattatgttctagggaccagtactgacttgtcggatgcgggttctatagctggaaactacaaagggatctgttgtaatcgtgccttctgttgtttattatatttgtagttacctaaaatgcacttaaccagttcttcattgagctatagtacagcacatcgtggtcctgaattgtagaagtggtacgtggcatgctatttgtatgcaccctagcaaactcatcagctcgagactagcgcctttcggcctacctggacgaatttttatacctttctgtcaacaacccaagggatatgtcacgccatcgcccatcgatgatcagctgacggccaccgatcgtgaaggcgagaggtacaggataaatactatccgtgatggctgcgtctgcattttttttttgtttagcattgttcgggtgactatttatggcagcgggccagctgctccaccgagctgaagcctcgtcaccgcccacgtacggtgcggcgattggctgggcttgcgctcgccggagacgctcctgatttaaattaatcgaatgatgaggagattttgttccagctaatccctcttgaggttgacagcgaaagcggagaaaacgaaacctgccgctccaatccggagggtgacgctgggccggctgagcacgtcagcactcgccattgaaaaggattacggggtgtttgatttgatgcttcttgtcgcaacgtgatagtactttaatttgaggaatgtgttgggttaattgtactaacaatcatggttaatcgtactactctgttaaaaaaccaatcctagtttatatgaactaaaaaatcaattctaattatgaacctaaatataatcctagttatgaactaaaaatcaatcctacataactaaaaatcaattctaattatgaacctaaatataccctaggtttgtagttaggattgaatttttaatgggggtggaggggtatttcacttatttgcccacctggtaaagattattttacggccaacgcaaataagtgaagtacgatttgaattaggagagtattattgttcagttcggttagtgactagctttagcaaaccacacttaaacttcctattatgtcttaacaagaatgtgtggcttacgttggaaagaacggctagcagaacggtagccataagtaaattgatgtacgtcatatatgggaccatatagctaaaatgagctacaatgcgtggtgaatctcatctaaaaaaaatgcgtggtgaatcataatgatggcaataaaatcaaacaactgctatgctaagatggtctaaagataaagtgagctaagatgccttgtgatagtctaaagtgaaagatacaaagatagctatcgcgggaaaattcctgtgtattctctccgtttaccgttaactttttaaacattcctatcatttcatttattattaaatatacttttatttattattaaatatagtttacatgcttcacaaaatattttaaatgacgaacggttaaacgtgttctaaaaatgaatggtaccaaacatttaaaaaatatttttcctttcataaccatccaaacaaggcacactcaacattcgattccaacattcgattcctaatactgtgcttttcctgtttctgtagtttttgaaatcttttgttcaaacggagcaaattttgttgaacttagatactaccagtactattatttttttttgcttgcgcatatacacccggctggcccacaagtcaggcacacaccgagaccaaaaacccccaacaagggggaaaaaacccaacatggctactaggagagctacctagcttccttccttcgccgttcacagccacttcgtccaaacactttggggagggcaaactgaaacggaaaatactactgcgtacacaaatcgttggatcggcaacaagagcacgaatctcaaagcggttacagctttagtagccgctgtccaccaccgggaacgcgtacgccggcgggtagtcgacgccggcgtcgacgacggcgttgccgaacccgtcgccgccggtgtagaggccggtgaagtcgaccgcgtcgtccggcacgaacgcggcggcagctgcggcctccgggccgcagccgccggcgtagaacccgtctgcggcggcggtgacgaggtggcggtcgccgtgggtggtggtggtggaggatgagtcgaggaggaggcgcggcctcttgacctgatgatgcacggcggagtcgtcggcgttggaggcggcggcgttggtgttgtccctgtcgacgaggcggcgcagcacctgcgggtcgccgacgaccttgacgaggaaggcgagcatctgcttggggcggcgctccgtctcctgcacgcggcgccacatcgcggcgacgcggccctcgatctcccgctgctcccgcctcagccgcgccacctccaaggccaccacggcgctctcctcgtcgacgtccccggcggccgcctcccctccgccgccgcaaccgccggcctcctccttcctcttcgctccccctccgccgctgctccgtcgcacgatccggcgcagcaggtgcgtctggccgcgcaggaacgacacgtgcgcgaactcccacctgtccggatcaaccttgcgaaacccctgcacaatccattgatgacagaattttgaatataatcgagcgagcaggaagcagggaatgggatggaaggaaagcgagagcgtacgtaggtgttgagctggcggacgaagctggagaagttggagtgcttgaagtgggcggggaggagggtctgggagaaggcgaaggggtcggcgacgacgaagctgttgctgtccctgccccaggcgatgacgccgtcggtggccgggtcgtccaccatccggtacgtcttcgccacgaacggcgccaccccgccaccgccctccgccgtcgtcgtcgtcatcacccttcttgctatactagtagtgctagtacagtggttggtgttggtatgcagtggaggaaatgcgggatgcaggggatggtggagtgacgcaaattttatacggggatagcgtagcgagaggtggcaaaggtgatcggcagggggaggacgcgtgtgcgcgccctggaccctcccagccacaagttctcgcgacctttttcattccttggccgcggtcgctttggggtattttttttttggctcgcggcgcgcgtgcgtggacttgagggagggggtggggtgatcgcatgtcatggtcgtggacgaatcgcgttggttgggatgtggagtgacctggcggtgtgggccaatggggcttcgacgtgtccgaactcgagtagctggggggccaattaacccaacgcaaccatcacgctacggaaagggcaagtactagggtaccgagtaactacggctactcctcgacggtccaatgcgagaagggcatagtaaggccgtggggcgtcgcgccgctggctggggtgtccgtacagtcggcaaccacacgcggcagcgagaggatatagatcacagtacacaggtcaccccgcggcagcgcgagcctacctgggcgcgccacgccttgcatgcaggtacgcgtctcacgggaattcgcgcgctggctccgcttgccccgtcgctcctccgtactccgctactgtctccccaaatgggccatgccagcccgtctccaactctccgtgcatgtatgcctgccaatacttcggtttggataattttagtctctctcacatcagacgttgagatattaattagaagtattaaacataaactaatgataaaacctattccaaaactctggactaatttacgagacgaatctatgactagactatgtgacgctacagtaaacatgtgctatggattaattaggcttaaaaaatttatctcgtgaattagctctcatttatataattagttttataattagtctataattaatacttcaaattagcgtccaaacatttaatgtgataggaactaaagtttagttcttggatccaaacaccagcttaccatgcccaaataggtcagtgttgtggataacggttggtacggccgtatattcgggcattaatacgttggcgccgacccctccgtcacgaatgagcaaaacgctaaacattaatcgttttaggatgtataatcaccgtcattagtgattaatcggccgtttccgactattcggccgaataaacggccaaatcatgtgacaaggccggaaggccctgcccagccagcccacgatactggcccattagttgtgtaacctagcaatatatagctacagtacgtcgtttgtaatcaaaaaccctcgcaactcattcctgaagctacaacctgcaagtctagggttagttcttttcatctaatcctctttcaaatccaatctccatattttgttgttgtcattttaatcttctgtttgaatctcgaacaggtgagcatgcttgaagtttttcttctatcaaaaataataagctattatgagttatgtacatatatttgtacaaaacattaaatttccgtcaaataccaattattcgcccgtactccgattaatcgtttagcggaaccctctccgtccgacatccgtgttccgtcatccacaacactgaaataggttatttgagaatagctatatatatatatatttatcgataaatcttttttctaaaagtttttaacaaatataagtatagtatatttattgtatattgcatgtacctataatacaattgatatgtaacttttaaaaatctcatggtaacatgttatttttgtgaaccgaagattatgataccgaatctcctcactacgatgccactgctgacctccctctacacaccgccgcccccggtgccgcgcgccgcagccaccaccgccccccgaagccactccgccgtgtgacgccgcctccgaagtcccacgcagcagccgccaccactccgccatgttatggcgtcgccgcagccactggcgtgcggtgttccgccgccgccgccgacctctccctctgtgcgccgctcgcaagagattagagagagataggattggcctggatagggttgaagtgtgtcgagggtattttggtcaatttaaatagtaaatattttttttttctaattgaaatcctaacggtgtaatgaaaagagggttaaacggggtgttcgattttgaaaaacgtggtcaaataagcaaacgcgtcgatcggttccatggatcggtggctgggtgggcatccctgcatccaactatgaactaccagtgccgatcaggttgggagttttggatttgtcctcccccacgtctcggaaattaacgatttcacgaaaagaaaatttttgggtgtcacatctgatgtttgaccggatatcggaaggggttttcggatataaatgaaaaaaactaatttcataactcgcatgaaaacagcgagacaaatttattaagcataattaatctatcattagtacatataggttactgtagcacttatggctaatcataaactaattaggtttgaaagattcatctcgcgatttacatgcaaactatgtaattaatttttttatctatatttattgcttgatgcatgtgtcaaatattcgatgtgacgtttttagaaaaaaaaaattagaactaaacaaggccatatataacgggcggcaaagtgatcgatcgaggtgattatttttccttatcttttttcaaagagataaagatgatcttaacagagagagagagagagagagtagcggtacgtaacctggggcgagtgtaacgccttagattcggagatgggttttttccacatggcgcccacctcgtttaattttcacttgtgtagagttttttttttatttttttttatttttttatggagggagtactgtcatctcgtcaaacaaaacggtaggcaggcgggtttgaccgacggcgccctttctaattccgtggagtcccagtcacgtcacggcatgcgcatgcctaatctgtacaccgagccttaggtggtgtttgggtccacggacttactttagtctctatatttagataataatttagagtattaaatataaactacttacaaaactaattatataaacgaaagctaattcacgagacaaattttttaagcctaattaattcataattagagaatgtttactgtaacattacacagactaattatagattaattatgcttaatagactcgtctcgcgaattagtccaaaattatagatgggttttattaatagcctacgtttaatatttataattagtatataagcatccgatgtgatatggactaaaaaaaattttttagtccctgtcttagccaaacgaaacgactacttgtagtaggcagcaagctaccgttacaaaacgacaacccaatccgggggtatggatgcaactgtctttatctcctctattagtagtattgtaaaaaatagctaggtggcctgtgtaattgcgctaccccatacgtttatcatatcttctttatttgcttgcttgatttactactatttctattcattcttcttgaaacctttaaaagttagatcttgtagtttttagagtttattgtctcgttatgtttcatttttataatttctagaagtcccgtcaaacgctgccattatacttctctacggctcgtccactgtcttttatctttattgtcattaggattttaaaaatcgaacataattatcgtttggttttatttttttcctttctagaagtcctgccaaaccgtcaacggctttggcattgtacttctgttaacgaccaaatttggtaatatcagcatcagaaaggaagattagatcgaagcggaatcaaagataaggattatcgcggaaacagagtaagaatcggctggaatccggatcggctacgactgggatcggctgagtccgagttagactgggttaagtgatatagccgattccgacaatacgacttggtggacgacatcgggtctagttgatatgcttcaagataattgccatgcatggatagagtccagggaaggcaattgtatctattaatttagatattttatgtaatttccttagagatatgtttgggtaaaaatctgccgcaaaggcttatggtatcttaaagtttgttagagataagagtcgtgtccgatatggacatagtttgtaattctcgggtataaatagatcccgaaccccatgtaattaattaacacacacgttcaatacaatctcggcgcatcaccacccttttttgctttcgttttatttcgacgagttcttgctttcgggttgagctgcatcggtttcgattttcaacaataggtaaaacttgttatggcagcttgcattctcaagattagtacttccatctttacgatactctaattttgtttatgtaattcgtcgagttatcatatatgttgtataatctgtggcaatatcatcacaggggcgaagctatagccatctatcggggtccactgaccccgacgatttcttgtgtacgtttcttactccacttaattttaccgtgtatgaccccggtcgataaaaacactagaccctggtaaccatgatttgttatagcctgattaattagcaacttgaaacgacacgtttgagattagcaagcaacaaataggaattagctagcgctaatgattatacgtcagcccaaaggcccaatatacattttggtaatcttagcagtgagtatttgtgcatttaatgtctactttgtttacatattaattatgtccggtttttaatacttcctccgtttcaggttataagactttctagaattgaccacattcatatagatataaatgaatttatatataatatgtagattcattaatatctatatgaatatgggcaatgctagaaagtcttataccctgaaacggaggtagtataatttatagacatgtccgtgcgttgcgacaatctcatatgggccaatggttgctcgtagcattatttaggatatggattttcatccctcgaggggatatcccctcattgtttgcatgtcatctaaatagttataaaaaaattgacaacataggttgataagaaatatatcactctacaaacatgcaaaatcaaatttgacttctacaagttacaacaaaaaaaataaactgaaaatagttatcgtacattcgcatttatatttgttatttttgtttcaatttgtagaagttaaattttaacttgcatatttgtggagtgatatatttcgtattaatctagctatttagatgagatgaacgaaacgagggatatcccctcgagggatgaaattactttccccgttatttagttttctgttgggtctggtttttcccccttttttttttctttcagggtggatgataaattctgtttttatgtagtagagataaataggcaagcaaagtattatggagcgattcttgaaaccccccccattattttagaagatctaacaatgtatcatacactaaattagtattgaccccgtcgaccatttatcctggcttcgcccctgtatcgtcatctaacctacaattggctaacatctgctaatagagggcagccgattaggttaggatatcgatgttggtttagattatatatgatatctaccactctatgaaacttccaatggcttgattgtctagatattgctcttcttttcatacttatagctgtatcagttgtttgatcttatgagtcatgattaaaatctcaatatctagcctgcttcttggttgccgattagggtagtatcggggtttcagccgatcttacctgatttaactatatttgctttatatgctttaccgacatgttaaatctgccctttatgtcaagatcttattgcatttaagtatattaggcttttgtttggtatattttgcttggtttaatattttaatatagagttgtatcggagtattagccgatacgtgctagatctatttgatcggctatgctatgaacatatatagtcttgttgttagtatatattttaatctaagtgatttatactgtctcggtatggcgaccgatctatcccaatcacttgatttaagtatatatcgacataaggattatatattgttaatatctacagccgatcgagtagatttagttctttattatctacctataactgccgatcgatgcatatatgacatcggctcgaagataaatgatatgtcatcggcacttagtcgatcggctatagtttatggatttaaccacgttttctttgcctttgtttcttgttaattgcaggatcaaatcaactggcacgctagcatacccgaaggcgagttttggacctgcactggagttaagcagatctcccaggcctcgtgtttttcatcaacaacttctttatggctcgcattctacatcccttattatgtcattgagattttaaaatcgaacataattatcattgggtttttttttttacttttagaagttctaaacctttaaaaattaggccttgcagtttttagagtttattttcttgttgggtttctttttttataatttttagaagtcccataaaacgatgccactatactcttgtacggcccatccgccgcctactctttattgtcattgggttctaaaaattgaatataactatcgttggaattcattttttattttccagaagtcccgccaacgtcggcagctcttcaactataatcctatacaccccgcccgctccttctcctttttattgtcattgagattttaaaaatcgaatatgattatcaatggggtttattttttttactttctagaagtcccagcaatcgccttgcacgtttgcttcacggcctgcctgtcgtccttccttttaatcgttattaggattctatttggtgtttattaacaaattttatatgtcatatcaaccaccaccactctacccctttatacacatgttactcaatttatctcgtcatgtgttttagatggtcttttctttcaatagtctttatttttatcaccaattttagttatttacaaattgtattcctaattgaaatcttttttttctttttctaatttcagaaattttttttcaaattttaattaataccgtacagtgttctttcaatatttttattttttatttttgaatttcagttgtttcaaaattgtattcctacttgaactctcttttattttttcaaattttggatattgttttatttttttattctgaattttaattaatctcgtattgggttcttatatggactcttgtctcattccttagttttaattcgaatttcagttatttttaaattgtattcctacttggactcttcttttccttttctaatttcagattttattttttttattccgaattttgattaatctcgtattgtgttcttatatggactcttcattcaacaatgcttatatttaattccaaaatttagttatttttaaattgtatttctacttggactctccttttctttttctccgattaatgtgggaatttctagccccctagtaaacgtggtgcctcctttcaaagccgcgcaattgcgcggctagcacccatataaaattatatatttatttaatatgattttacttaaaacttattaaatagttatctcattgtcttaggattttaaaagaccaaacataatcatcctcatgtttctaattttatagtttttaattgtcacatagttgctaccccttacttctgtcatattattatttattagcttgctcgatatactactatttctattcattctccttggaacctttaaaaaatggatataaaaacttatagtttgagtttattgtccagttgggcttcttttttataatttccataagtcccgtcagacgctgccattatacttctctacgaccatccaatgcatcttctcattattgtcattgctattttaaaaatcgaacataattaccgttttggttcattttattttattttatttttattctgaattttgattaatctcgtattgggttcttatatggactcttctttgaatagtgcttatatttcattctgaatttcagttatttttaaattgtatttttacttggactctccttttctttttttccgattaatgtgggaatttctagcccccacagtaaacgtggtgcctccattcaaagccgcgtaattacgcggctagcacccatataaaattatatactttttaatatgattttacttaaaatttattaactagttatcttgttgtcttaagattttgaaagaccaaacctaatcatcctcgtgtttctaattttatagtttttaaatgtcacatagttgctaccccttacttctgtcatattattctttattagcttgctcgatctaccactatttctattcattctccttggaacctttaaaaaatggatctaaaacttatagtttgagtttattgtccagttgggcttctattttataatttccataagtcccgtcaaatgctgatctaccactatttctattcattctccttggaacctttaaaaaatggatccaaaaacttatagtttgagtttattgtccagttgagcttcttttttataatttccataagtcccgtcaaatgctgccattatactcctctacaaccgtccaatgcatcttctctttattgtcattgctattttaaaaatcgaacataattatcattttggttcattttttttactttctagaagttccgccaaaacgttagcgactttgtcactgtacttctctatggcctgcccgctgccgcccttctttattgtcatcgaaattttaaaatcaaacatgattattattggggtttatttttttattttttggaagcctgaacctttaaaaattgaaccttatagtttttagagtttattgtcttgttgggtttcatgttttttataatttttagaaatcccgtcaaacgctgccactatacttttctatgactcgtccgccgcatactatatattatcattgggattgtaaaaatcaaacataactatcgttagaattcattttttactttctagaagacccaccaatcattggctgctctgcaattatactcctatacgatctgccccctgtctctcatttttattgtaattgagattttaaaaatcaaatatgattatcattgggatttatttttttactttctaaaagtccccgccaaccgccttgaccgattgcttcacgacctacccatcgtccttccttttaattgtcattaggattctatttgattatcaaccgccacaactctgctcctctctaggcttattacttaattaatctcgtcatgtgttttagatggtgttttctatcaatagtcttaattttttatcaacaattttagttatttataaattgtattcctagttgatatattatttttctttttctaatttcagaatttattttattttttgtaatgtgttcttttgatattttgatattttatttttaatttcagttgttttaaaattgtattcctactttaactctctttttaattttcctaatttcggattttattttattttttattctgaattttaattaatctactattggattcttatatgtgctcttatttcaattttgcttatatttaatttcgaatttaaattaattttaaattgtattcttacttgaactcttattttcttttcttttatttaatttcaattttttttatatttttattccaaactttaactaatgtcgtattggattgttgtatggactcttatttcaatattccttatttttcaattccaaatttcagttattttaaaattatattcctactcgaactcttccttttctttttctaatttcaaaatttatttaatttttattctgaattttaattaatcacgtattgggttcctatatggactcctattttaatgttgcatatttttaattctgaattttagctatttttagattgtattcctacttgaactcttcttttctttttctccgattaatgtgggaatttctaacctccacagcgaacgtggtgcctcgtttcaaggctgttttaataatataatagatagatagattagtatagggccccgtaaattacgcggctagtattcttatcctttctctcatataataacatatatattttcttattttattattagaatttcttaaaataacaacatatttaaattttgtactaacttgaccaaactatccatgtgtaatattcatattgtgttgtatatacgtgatactacctccgttccaaaatatatcaatttttagctattcatagctaaaaatgcttacattttgggaccgagggagtagttcttaattattttctaatactaaacttttgttattttaaaattatgtttgtatatggactttagactcctttttccaacattctttgtttttttaattatgaatttctattatttctaaattttactcctatatttcctattttagatttaaaatttttagcgacaccgccagtgacgccactcccctctgccagatctgggcggagagggaaggaaggggaggggaggggagccagaatccatacaggggttgaccgccgcctgccagatccagcgtctccaccgctagaggggcccgctgtgcacggtagagcgtggaggaggccgccgcgcgccgtcgtcatcgcctacgcccaccgccgctgtcgccgtcgagagggaggagaggagaggagagaagagaaagagatagagaggagaggagagaaataggggaaaatttgaaatgggtaagagggaaaagagggaggggcatttttacgtgcggacttcttaataggtccgcctgtgaaaaatatgctcattttcacgtgcggtccatttaatagatctgcatgcaaaaatcgatttttccgtgtgatcctcttaaggagtcgcacacaaaaatggaggacgattttacagacgcgaccaattatgatccgtctgcaatctaaatgagtccctgtacaggaaaatcattttttagtgggactacctagagaatcaaaatagatcctactcttaaacttactagaggatgcccccgcgcgttgctgcgggacttggttaatatcaatttgttagataagagatataatctcaagaagaaatagaagaaacaaatagatttcttggagaattttttttagcagccctatcaaaaatttatagataatttaggtagcacatatcaactgaaggagcgttcagccataaaactcttttatacggattgacggactggatacatgtagatgtgtgtggagataggccgatgtgttcatgtgggctatatttgacattgaggaggcgaagagactcactcggtgactgatgggttgggctctatactgcattccatccaacgtctgagaagcaatctaatacattcatccaacggttcacaatttgatgatgacgtgaaagcacaaggtttgagcttttggccttaactttatagaaagaagggataacttgaagagcctaaaaaaattttaaaaaaaagagaaaaaaaagggtacggttttggttgttatcagctgatggtaagccattgattgatgtgttgaattgtactacatgtatgtgcttctgaattggtatattacaaaatagaacctgatgaggaaatacaaaacatcaaaacaattgaatttgatcaatgcggttacgaagagaacaacgacgacatggtaatgatcagcatttgcatgggcagcatggacatgcgttgcatatcggacttgaccctgcaagaatcgtttacatgtcggtgaaaatgactagcgataaatagaagcagaagttatgaattccgtataaaaaatgaatcgagaattggctgtaagcatgattaaaaatataataactattcaatttttagaatattttttgatgaaaaacattaggagaggctactagtagtactggactatatatattaattaaattgggaaagtaatttacacatctacctaagtgaaaattgaaactcaataagcaaccaaaatgagtcatgtcatctatcaaataatggcagttggattcacaaaatgacaaaataccaaacaagaattctagccatcaaaatgaggagtacgtcttctaaaaggggtaaaatatacaatgagtaccgtaattttgacaatttgacccttttaaaaaacttatttcaaaattgaatcatgccaaaaacgaattacaaaaataggctgttttctcagcgccatagagattggcgctgagatataacatttcggcgccactatcattggcgctgagatgtcatcacaggtgtcgcggattttacacgtcatccgagggcagcgccaaagtattttgcgctgatctctgttcaatttacaaatattagctatctacaagcttcctttgcacttaaagagaagatagcttggtggagaactctgggtgctaaatactgtgaggtaatgggttcgattctcagtcactaaagttttcccatataagtacaagcatcttttgctgttctatttaaaaatctcacatgtttttcaaattcattttatttttaaatatggatgttttttaaatttattttatttttaaatatggaaggaacaaaattatgtatgcagtatttatagcttagttttttaaatttattttatttttaaatatggaaggaacaaaattatgtatgtggtatttatagcttaatagttggtataaatttacatctttcagttttttttcaccctctattttgctacataattatgtagatcctaaaaggaaaaaaaaagaaaaataagaagctacagggttcgattccttgacctgtagttttgagaggcagcccttcaccaccaggatagacataccgtacggtaagaacgtacatgcatactatttatacaaactagaccatggaggttctttggctctgacatcgcatgacgtgtgatttacgtgacacgtcggaccgcatctcagcaccaaagaaagtggcgctaatacgttgtagctcagcgccaagtacgatggcgcgagaaaacagcctatttttaaaattagtttttgacacggctcaatatcaaaataagctttttcaaagggtcaatttatcaaaattacgggagtaggaaaaggctgagaacactctttgatgaagtggttgcctcacattagtctctcaaataggcctaatgggctggtttggtcgaacagaccaaatggtcctttggaccatatgaccaatcaaataagtaataagttcatccaaggtcccttaacttgtcgacgaatccgattttcatccttcaaccaaaaaaccagatacaacgggtccctcaactatcaaaaccggtgcaatataggtctcatggcgttttggacggcggttttagcttacgtggcgcctacgtggctaaattgacccggtcttcatctgacgtggcatagatgtggcattgacgtggcaatttgatttggaaattaataaaaaaagagtgaccccacatgtcagctacaccaaaagaattaattaaaaaatggtgggtcctacatgggcctcacttgtcattcactcccctcgtcttcttccgacacggccggccggtggcggcggagccagggatgacctcgaggacgaggacgccggggagctgtgcctggacggggacaccgacggtgagtgcctggacgtagacgatgaggaaggcgaagaggaggtcgatttgatttagaaattaataaaaaaagagtgaccccacatgtcagctacaccaaaataattaattaaaaaatggtgggtcctacatggaccccacttatcattcactcccctcatcttcttcctctctccctatctcccctctcctctctccaggcgccggcggttcggcgacacggccggccggcggcggcggagccagggatgacctcgaggacgaggatgccagggag

SEQ ID NO: 6446 - DNA, 151988 bp, Oryza sativa
tatgaggatgactcatctcgaataggaacatcaacttttgttttatcaaatgacagaaaatgggcctatagtagtacaggagattttgtgggtaatccagatgctgattacattgctagaaacacatcagaactcacactggatcaccctgagttatacactgaagctcgctctcacccctctcactgaaatactatggagtctgcatggaaaatggtgaatattctgtagaacttcattttgctgagattgtgtttacagaagatcatactttttccagcaatggcaagcgcatttttgatgtttttatccaggtaccattcccttaatctgtaggatttgccattttcctttatgtcataatcttgctggcatcttaattctttgctactcttagtttataccacttgtcttacttcattattaaaaaaactatcagaaattttgtgttgaaaagccatcattatatttggagaattcatattttgtctggagcaaatgattgtcctactaacaaaaaggatcaacaacaattgcttgctgcctaggggaacagttgtctcagttatagaattcttacttcattcttaataactatcagaaattttgcatggaaaagctatcattatatttggagaatttatatattatctggagcaaatgattgtcctactaacaaaaaagatcaataacaactgcttgctgcctggggaacagttgtctcagttatagaatttaccatgtttagtggcagtttcttggtcgccccttggtgtttagctcaggcgcttttatgtttccttcgttgagagttgtgtgaagttgtgtgagttgtgtgtggtgtgtgttgtagggctctagccccttttctctcttcttaatttaatgaggcgtagttctcctgcgtttttcgagaaaaaaaagaatttaccatgttttaatgtttgaaaaattccaaaacagaatcatgaatgcacacagagttgtgcaaatccacaaaatccaatttcaaatccattatttgtattaagaagcgacaaagatgaaaattggataatctgaaatcgtcagcaacccaagtggatataaaattatgaataaaatatggaagtttcttttcttggttactttattttttgttggtgtaagttatttcctgctcaaatgatttcttgggcacctgtcctcactttcttgaatataccatgcattatttaattcttgttaaagtagcatcatacaaatatggattactgttctcttaagacattattaactaagatttgcaataatctgccagggtactaaagttttgaaggattttaacattcaagatgaggctggtggtgtccatcgtgtaattacaaaaactttcacaaccaacatcacagataatacattggaaattcacttctactgggcaggcaaaggtaccacaggtgttcctgaccggggtgtgtatggtccattgatctcagctatatctgtgatacaatgtaagttctttgcactcccaactaaactgtcttctttccaacattttacatgtgcttttcaagctctctaattacgcatggatactgtttaatcatatcttctcatatgcttggaaattagctaactgtagtacttgtacagtaaacaggaaccatcatggaatctctactggattgatgattactataatagtagcagcatgtttgattgtcatacttgcgctaattctttgctatatcaaattcttccggaaaaagaatctgaaaggaaatggtaagttgatattcattttctaccttgtcctacatactatatgaatgtatgttatcttctctgtctggtttagcatgcttgtcattgattctaaactatgaaattcataaaacccctaggttttggccttttggggaatttgtagcgtaaaaccttaggttttcccatgtataaagcaacccaggtttttgggcaaaatgttcaacaaaaccagatttatgcaaagtacacatattcttataatgtgtggtattttcaaaagcatatactctattcgttgagaaaatgcctaatgtttctatgcacacaaaatactgcataatatttttgtccaaatattatgcacaaatactataccatgggaattagatgatgtaggatgtacctgggttttatgaagcatttccccccaattcatggggttcttcgaagcaaattgcaaaacttacgaatgccccaaaacctgggatgtgaaatttactaattttgaattcaagtatcagcccgtaaacttattattgaagcaaccaacttgagcaacataaaccaaaattgtgttaattcattacataaggaccaaggggatgctatcctttttctggctgtattatgcagttgaaagtttataactatctctaaactagaagaatgtcaataaaaaaaaattgatatgctcgtcagctaatattgacgacagacatccaaaatacactagtgtttctaccttctagttttaatattttactgtgcatcacaggtttacaattcttttaccatggaaggaagaccgatacttcagatcttcagacacggacacagtacttctttagcttaaaagaaattgaatctgcaacgaaaaattttgatcctgcaaataaaattggtgagggtggctttggacctgtttacaaggtaaaaactgtgaacttaaggttttctcccttaaggtgttagaatacagaaaatttactttgtattcatgacatcactgcatatggtatacacattttgggtgtgtttggataatgggaaatggggggtggtattgggaatgggaaatgaatgaagggttaagattaaatggaaaaggagaaatgaatggttaggatttaaagatgtcttttggtgggtgggaaatcatttcccctatcccattagccaaacactgcctttgggataagtaattcactgccactgcaacatactcagatgatcgaacataataactaagaaacatataaataataataaaggtgaatcgaccagcactcagatgtaataaactaacagtaggcattttaattcagtacctctttcattcctttctgagttgtaacacactgttaaccaatcttctatcttcagggtacactagccaatggtactacagttgctgttaagaaactctcttcccagtcgagccaagggaatcgtgagtttttaaatgaaataggaataatatctgccctaaggcatcctaaccttgtaaggctctttggttgttgtattgatggagaacagctactgctgatatacgagttattggaaaacaatagtcttggtcgtgcactttttggtaagactacataaattcagatgatatttccaaactggttttcctgccccaaaatgaatttccctacaattatctagttcaacgctcatcgtagttggtaagagcattctattctaatagtgtaccaatttttaggacgtggagatcatcaattgaaactagactggccaaaacgatataatatctgccttggaacagcaaaaggcttgtgctatctccatgaagaatcaacattgaaaatcatccatagagatattaaaccatcaaatattcttcttgatgaaagactgcaaccgaaaatatctgattttggtttggctaaactgaatgatgaccgtgggcgtatgagcactcggatagctggaacagtgtaagctgtcattctatatttttattggctacttcacctttcattttctattattgtatattgtaaaaatctttattatccaacatctgataccgttctttatttgaaccagtggatacatggcacctgagtatgccacgagaggttgcttgacatgtaaagcagatgtatacagttttggagtggtgacattagagattgttagtggaatgagcaatacaagtagcatgtcagatgacgaatatctccatcttcttgactgggtatgctattttagcttctttttttctgttactgcttttgtcttttaggactcgaattcataaccagccgtccagccccatagaattgggtatgatcttatgggacgaatttctgtcatagatatgttatcttttataaagtcagtttgcttaactttggagagctctgtcacattttaggctgataatatgctgagtaattgatgatttggattggctgttcaaaattatgttatgataggaataaaggtcaattgtaacataaaccaacaacattagttccaaaaatcgatcatttgaatggcagctattctgctatagccaatgaaataagaccaagtttcttggtactcacccaacggataacaatggataatcagtctgtctagtagctactgagattctgtcaaacaaaggctaacaatgaactaggtgtgcccataaacaattttctcttgatcaggattagcccacaaacaaaccaatattcttcatgccagaagaaagaattgcctagtgctaactgaaagtgtttcacatctgaaaggcgaattacccaagaaatttagccttgcattgcatgttaatatcaccaagtaaactgctgatagtcctgctacacattttaaacacgaatctactaactggatttattttctgcccacaggctgaaagattgaagcaggaagggagactactggaaatcgttgaccagcgtcttggttctcactactctcaagaagaagcacttaggatgctcaatgtagctcttctatgcacaaacacatcacctgttcagaggccaagaatgtcttcggtggtgagcatgctctgtggccaagcccctctagaggttgtacctgatgaagatttgagtggatacatcaggcccagttactcccaatccaatcaatccatgaacaacagcctaacggagtggtcctacgcgccatcgagcgatccttcgatcttgctgcagaacagtatggagagtggttacctcccatcttcaagctccccttcttcaaagctgtgagctgcagcaccaggattagctaggatgaaatgttggcaattgttttgagcccaatgcagcaactgtacatatgcatatgcatttgctctgtctgtaatcccctgtagtttggcattctgtcagttgtcctcagccttctcatccatggcatatgacaattgatatcaatgatgcattgccatgatgatatattcttcacaaggggactggaagcagatattggaatctgatgctgctgatgtgatggtacatatgaattgagcaacttctcaggggcaccacttgagtttcttgtttgttagccttggtcatcatgtatctagtaaatgcaatgtacaactaatctgtgcaaatgtggatatctagtaagttttttttttcttttcttttctagctaggaaggttattgtttggtgggcaagtagagaagacatgtaacataataacagttcagtgcaaactagtttctgcccttgttaacttaaaaaagaaggaaaaagtacactcaaggtccctcaacttgtcatcgagttacaataccgtcctcgaaccgcaaaaccggatatgatgtatcctccaacttaaaaaaccagtgcaaactaggtctctggacggttttcactccggttttgtcctatgtaggagctgactcagcatgggacccatgtgggccccacgcatcagccacttcttccctcccctctccacctctctttctctctctcctatcttttccaaactgcacgggcggcggccggcgggcgcaggcggcgtggggaggagctgcgtgcgggcggcgagcggcggaggctgggcgggcgggcggcggccggcgggggaggagctaggcggcggtgcacgagctcctcgccggacgaacgctagaccggctccgccatgtcggccgcgaggaggtggcgcgcctcgtcggctcgctcagccggagtgccgccgccgacgttaacgcaaatgacctgagaatttgagatcattgccatcttgctgttctccttcaagccctatcaacaagattgacacgattaagcactggatcgagatatgatcgatcgagcagcaccgacgaactagccgccgatcatagagtcaaatgctcacatctcaaaagcttcaatccacgtggacgaatcaatccattaaacttgtacgcatgcacatcacgcacgaacaccacaagaggacatgaagcttcacctgcaaatctctctataaatacatggcaaaaccatcaacctagctagcatacagcaacttacacatgggcctcgtgcatgcactcctccccttagcaggagctgctcctcgctacgccgccgccagcgacggccgacgacccgggcctcgtcgtctactggggccgccacaaggaggaaggctccctgagaaaggcctgcgacaccggccactacaccaccgtcatcatcaccttctacaacgtcttcggctacggccgctactcgctcgacatatccggccacccgcttgccgccgtcggtgccgacattgatcaagcactgccagtccaggggcatcaccgtgctcctctccatcggcggccagggcggcggctactccctccccaccaacgcctccgccgccgacgtcgccgacaacctgatctggaacgcctacctaggcggccaccgcgccggcgtgcaccgccccttcggcgacgacgcggcggtggacggcattgacttcttcattgaccagggcggcgcctaccactacgacgacctcgcccggctgctcaacggctacaacaagtattatgatgacctcgcactgcaggtttaacgtgctggtgagctccgccgtctcggcgaccacgctccacatctcctccgtgtcattgtcgtcgccggcggccggcccatcaccaattcaccatgcgagagacgatgtcgctggtgaggcccatcagcgcggcgtcggcgtcgacgtgctcgccgttggcggcactccgactgagcgagccgacgaggcgcgccacctcctcgcggccgacgtggcggagccggtctagcgttcgtccggcgaggagctcgtgcaccgccgcccgccgcctgccgcctgccgcccgcgcgcggctcctccccacgccgcctgcgcccgccggccgccgcccgtgcagctactccccgcgcgccgcccgtggagattggaaaagagaggagagaggaagagaggtggagaggggagggaagaagaggctgacgcatggggcccacgtgggttccacgctgagtcagctgccacatgggataaaaccggactcaaaaccgtcttgggacctagtttacactggttttgtaagttgagggatgcgttatatccggttttgtggttcgaggaccgatattgtaactcgatgacaagttgagggaccttgggtgtactttttccaaaaagaagtcatgttttgttcattggaagttcattttggtggggattgggcctggatttgggctccctaaagtctctctggatcactggatgggtcttagccttggtccatccacgcccatccaaacaagagcctaacacaaattaaagcccatccaaactcactgaacctgaaattgatcttatgaaaccaaaatcggagatgtgaaacattcagcagcactgcttgattttctacctttctacacgggtttctatttaagcaccatgaatccgtgagaatatatactgtcaaagaccatgcaagatctaatcaattttaacatctttcaactattgctaccacatatcatagatttcttcgaaatgctactgctcctagtccaagaaaagacaccacatcaaagccaaatgcagaaatgctagcaaaaggctcattttataagtaattccggtacgctttttttccaagcacaccggttgaccatggttccatttcattggtactattttttctcctcgattacatggaagacacatgtcttttgtcacttgctatgtacatggccaaattaagctcattccctatttcaaacaaaattaagttcccttcttatttcaaacatgtccttttttttcttgataatttagatgtcgaaatactgaacttcataagcatggatagaggggggaacttatcatactcacctatttaaaagaaaaccataatctgcaaggaaacactctgcaattttatcacgtggtccaaaacatactattccacacacacatatacatagattttttaagttctacatatataggaggcagagaagttccacacgaattttataggaatccccacatctaaaaacacacatcacagaattcctataaaattcctgcgttacaaaggaggccttgtggcacgtagccgagacgacaacgaactaacgctaattaaattactactatatatgtgtacgtcacaaatagtagttcatccatctcttcccttttaaatgcgatgcggtgcatcgatcaagcatctcgatatcgatctcgaacagaaagtagcagtagtagtactggcagtagtaattaattagggttcttggtggttagctagatagaggttaggtggaggagttcatccggttcatgctcttgaggaaggagccgctcttggtgatctcccggaggggcttgttggtgaagcggatgatgttgtaggcccaagctccggccaccgcgccggcgaccggcccgacgatgtacacccagatcgacctgtactcgccgccgatcatcgccggccccaggctccgagccgggttcatcgatgctcccgagatcggcctgaacagaaaatgcacatgtcatcaatctctgatttttttttttgaaaaagaattatctgaatctctgaatctctcatcccaaatctttattagggcttgttgatcattattgtccaatataaaatgatgctggttaaaggtaggtaaaagggtacaaatgaattttcttcaacaaaacacaaaaactctgtttcagctttttttacggactctaattaatctcaattatggacatttgtttataagaattgactaaacattatttatacattaattgaaaaaaaatagataagaacaagttatctaagccttagtgaaattgtgaaaagaagaaattgtagtttgagaaccgtgtaacaaaaatctacaaattcataaggtttaagtcgtagacccgagtgttcggtacaattccaacttcacgggataaaaatcttacgggctgtttggatgggactaaaattttttagttcctttcacatcacatgtttggacactaattagaagtattaaacgtagactaataacaaaacctattccataaccctggattaatttcgcgagtacgagctgtatcaaacggggtccatagtatcatgtcacaactatggttgtgtttagttacacgttaaaattgaaggtttgaaaaaattagaacgatgcgacgaaaaagttaaaagtttgaagagaaaaggtagaatctaaatagggcctgtatcaaacggtgagttattgagaggcaggcaccatgggtgaggagtgaagtggagtggagagtgtgaatttacaagctaggcggccggaggtaggaggagtaattaagttgacattaatgcttggttgcagtgcagtgcatggccgatcttcactgcaccaaccgcagcacactcaaagccctgcgctccacatgaccgaatttattggttggctttggctccttcaaaacgcactctccctaccgaaaaggacgcatacatctgatctagtctgaactctgaatctgacccattgttttcttaattttgactggaaattatatactactactactactatggcctggtttggtttagtttctaactttttctacaaactttcaacttttccatcacattaaaacttttctactcacacaaacttccaacttttccgtcacatcgttccaatttcaactaaacttctaattttgatatgaactaaacacaccctatatgtttcatgggcatggaaagaagtggatcgataccaacacattttcagcctctagatcctctttgaaatactttccattgtgaagagtaattaattaattatcatcatgagagagatgatgcgtgaaagaaagaaaaattaaaacgtacccagcaatcagcacgttaagcaggatggttgcaccaacggccagccctgccagctccccgatctgcatccatgcatatggtcaacagaattatcacttcaaaactttcagattaatcaggatcaaatcgatcctaattagtggagcaatcaaattacagatatatagaaactaattaaactagataattaattagcggagggagcaattaaattaaatgaattaaaatcgtgctaggtagcttacggctcggttgtcggtggcgacgccggagatgacgaacatgaggtagaaggtgatgatgaactcgaggacgagcgactgcacgtcggagccggcggggagcgtgccggggaagtgctcgtggcggccgccgaacatgagccggagcgtgccggcggcgagggtggcgcccagcatctgcgccgccgcgtacgccggcacctgccgccaagggaacctccggcacgtcgcgaacgccagcgtcaccgcggggttgaagtgcgcgccggagatgtgccccacggcgtacaccatcaccatcaccgccagcccccacacgatcgccacccccgggaacgtgatctgcccgttcttgctctggttgatcgtcaccgccccgcaccccgcgaagatcaagaagtatgtcccaaagatctccgcgatgatctacaccatgatcgatcaatgcgcgcgcccgccattgtcaagatcaagaactctcaagatcaggaggaagaagaagacatgaaatgatgatcaccttctggatgaaagggacggagaaggcgaggccgcagccctggccgtcggcggcgaactcctcctgcttcctgccttcctccatggctctctgctcgtgacctgagccgccattggtggtctgggagttgttgtcacctcctgccatctctctctctctctctctctctctctctctctctctacagatgcaggtgagtagagaaagaagaagaagaagaaggatacaactgcaatggcaatggattcgccgatgacccgggctcctatttattggcgccaagcaagctaagatctctctctctttctctctccttccatggcagcagctgatgctgctactgcggatagtaatcactttccaagccgtttggattgaccgagcccactttaatctcctggttgttggtgtgctccgttaactgctggtgattatccatttaatttaatcgtgatcagggattaattgattagtatctgtttggtttgtttggcgtgtcaaaaaagaggattatctgttggtccaatgagaggccgaagggagtaacaaaattgggattcaaagcccacctacccaccagtggcagagtcgacaatcaagtgaaactcttcacaaatgttttactggaggcacagttgatggaagaccgtcagaaagtatggctaatcgacaagcccgggaatcccctggcaaaattttcatcatgtcatattgaatgtttgacatatttatagagtattaaatataaacgaaaaaataactaattacataaattacgtgtaaattgtgagacgaaccttttaagcccaattgctccatgattaatttgacaatgtggtgctacagtaaacatttgctaatgacagattaattaggcttaataaatttgtctcacagtttacagtcggaatctgtaatttgttttattattagaccctgtttagatggggctaaaacttttaagtccctatcacatcggatgtttggacactaattataaatattaaacgtagactattaataaaacccatccataatcttggactaattcgcgagacgaatctattgagactaattaatccatgattagcctatgtgatgctacagtaaacattctctaattatggattaattaggcttaaaaaaattgtctcacaaattagctttcatttatgtaattagttttgtaagtagtctatatttaatactctaaattagtgtctaaatacagagactaaagttaagtccctggatccaaacaccaccttagtctacgtttaatactttaaatatgtgtccgtatatctgacgtaacacgctaaaactttacacacatcatgccatcatggatctaaacatccccatagtactgaatagttgagtaaattcccaaactatatataactttttttctataaaaatataaagaaaactattactcccccatccaagtataaggttttttctgatccaaattttataccatagtttaagaggattattgtaatgatttccatggttcccattattttcaatgatgcttggaaaggaaatatgaacaatataaaatttatgattaatatctgaagtgactaaaatggaatctctcgagctaaccttaatattggctaaacaacttataaatctttatatttttggaacagagagagtaaattattttcttttcaaaaaatacacatgtacacccacgacaatagatttgtgcctacattgcatgcatatattctttaatggataattttaccattcttgagaaggtaccgggaggtactatattttttatttctagtataaaatttggtacctctaggtagtaagtatcttgaggtaccaaaattttagtataaaatcttggtacctccaggtactttctcaataactataaaatttctctcctttaataatacagtacaccctttcaaagtaggctcaagaaacagaaggcaacgataaataatccatgaccaaaaactacaatattgtcagctatgcatgaaagtcatgacaaatagactcatcgattggggaagagtcctactgcgatgctcccccataaatgaaccattgatcacatttaatcaaaagattcagatctatttatactatcattctagttagcagcagtggaaacgtagaggggcatcattgtaaagaaaaagtgcgaatgaatataatcctcaattagcagtaactaaactttttttccttctttcttttttggctttttggtagaatatgagcgatgccaacacaatggatgaccacatatcgatctgggcagggaaaaacctaaatggcaaagttaccaatcatcattatactagtaaattaccgatatacccttaataacgaatggtaccggtagagagcaccggtgcatcactcatcgggaaaaacattagcgatgtaggggtggaatcgtgggtacatgactccaaccgctaggattcaaatcctagtacccacgaatattgtacatatgcaggtgtgcttttaacggaattttagtaaaatcatggatgtgctgatttcagtctctttgagagtgtgctaaaagacgcattcgtgggtgtgtgagtgtggatgttgcgtgtatagtggtgtttgtgcgtgtgcgtctgcagtgtaatcgaaaaaaaaaaactcatcgatcattcacactagtggagtgtaccagataaattttcgtcgatctccgacaattttttgccattctaattaattttcaagatgggattgaagagtgttgagatacccagaaggatatgatcgtacggcagaaaaagcatggccaatgaaaaaaaaaacgagcttttgtgttggacaaataatgcacggccatggctctgtgaatcctcttgtcgccaagttaaaagttgcaataaatcgtcgatcggcacattaactttcaacgtctcccagtaaatgcgagtgctttatggcgatccaacaaactggtatggccatgccttaattggtttagtttttatttttgaatcttgattggtctaatttaattgtgaaataaatagctcggctcctattacggtgaaataaatgccgtccgattgttaaatttaaatcatatattcacatgtatactatatactccctccgtactcgtaaaagtaaatcgtttaagaaaatgtttaagttaaactttgagaatataaatcataaataattctcaagttgttgagtttgaaaatgtaaaaattatatgaatagatttgtcttggaaaatactttcataaaagtatacatatatcactttttaataaatattttttatagaaataagaagtcaaagttgtgttttggagaccgtgtcgctgtacaaaacgacttcctctacgagtacggagggagtacatgagattttctggcatttctcataagtaaatcatacatggtatatactccctccatttaaaaacagagagattttagttttatcgtaaatcaaacttatctaacttcaaatataaaagcacaccaatacattaaacaccaaattagtttcattaaaataaatattgaaatatgtgccttgatagcttatttattggtatcacaattgttaatatatttttctataacctagttaaaattagagaaatttcacttacacaaaactaaaacctcctatagtttagaacgagtgaatactctttaactttgaggctgcattaatttgtaattatgcatttttgttcttagttttgacaatatttgtaattagaatccatgcattctaaaaaaactatttaattaagcgaattggtgtacttcaccttcacctagttaggtttcttgcggtggaatctatccatcctggctcatgtcctaaacttgagatggatacttatatgtacggttaattattctatagtagaagccaacaacaagatactcatcatgacttcatcggtcagaagatatagacgtgggtagggctgaaaaaactcgattagctacctcggtggctcggttcaaaattgctcgccatgatttgatctttttcttttaaaaaaatattcaattgtaaacgaaagttatttgcgctttggcttggctccttacttcattaacaagaataggcacaattgatagataaaaatataataaactagaaaaaaatgcccgtgtgttgcaatgggtgaagtctattttaatcttgttatatggtttagttaagatgaaattcactgtgggagtttgcttggatatatatatttttagaaaatcatgagctgtagttaggagtccgatcgtctcaagttagcatacgagtttttttaaaacatatttcttgtatgattccttctgtattaccaaaagtgaacgatcttaaaaaccgactcaaacacaaatgactaaccgcgaaaacatcttcaatttttataatcgactcaaacacggatgacggaccgcggatagaaacatctttaattattataatagtaatagatatatagatatagatatagatatagatatagatattgattataggaaaataactttgaagaatgctagataaaaagttgaccaaaagcttcttttgcaccggaagtgcgggtgtatgctttcatacaagtgagtgtatatcagtcggtactatgtttcgaaaaaaaaaaacaaagacacgagggtagcatgcatgcatccacggtgtgtactatattaagatgaattgtgcgcataattaagcacgtacgcgtacgtccacacataataagcattggtgcgaaatttcaaatttatgcttgcttcgaaaattaagattgattgaaatttggaagtttcgcaccaatgcttgctttcatttggaagtttcgcaccaatgcttgctttcatagttcacgctaaaattggaagtttgattgaaattggaacgatgcgatgaaaaagttagaagtttatgtatgtaggaaagttttgatgtgatagaaaagttggaagtttgaagaaaaaattgagaactaaactcggcctcattaaactataggatgtgtcacatccaactaaaatctcttattatgggacggagggtataaggttgtactatgttatttttcaaaagttaagggttaggtgagatgattttcttcactactaaattacaaatcgttaggcgctctaaataagttttcacaggcagatagattatcgttcggaactaaaggccactgagaatcgacaatgtttgtaggtttttccacacccacccatcaggctgacctatgaaagcctttttttttatgcaaaaaataaaataaaaatctaaaaaatctagtagtcgttgctccccgtatccatcatgagctccttgccagatccgtcgtcatcacctgagctcctagaattggagctgcatactagcccccatcccccctccccaatcgcaatcgccagatctggcaacctgttatacccaccaccacagtatgtggatgacccctcgcggtcatcgttgtacgtggttggggtcaccatcattctcgtagccttgcgatcaccgccgctggtaattattatggtcgaagtcatggatctagagcagctcatgagtcgccgccccgtaggatcggccaatggtggtcgatccggtgctcccaagcaccgccgttgcaagatctgcttcctctaaccgcatctgccttttgcctttttcccgttcgctttgagtgcagtcatatttcacccagagcgtcaggaccagatctaatacgttgaggaagactgaagcaacggcgataccactggtaggaaaggatgaaaggccgaggagggggtgttgggagagagagaagacgggagtggaggtgaggagaggccgaggagagggcagagatatcaaggaaatgagcgagagtggagacagaggaggtcacttgtatggtggaaatgagcgagagtggagacagaggaggtcacttgtatggtggtgttgtagatttttaatagggtatctatttattacgtggaaggtgccaaagttttgtagcggtgcttttcagtcatcttattggttaagttcaaatttgaactaattagtttattagaatattagatttccgtatattgaaactggttcgtagaaatgtttactccctcataaaaaaaacccaacctaggatatgatgtgacctaatccaagactatgaatctggactgattcatataatagatcacatcctatatatctaggttgatttttttaaggactgagggaatatattattatatatagattttaattagaaaaaattatagtattttaaacagagaaagtactgtgcaaagcaatagccgccgacgacgacggacggcatgcagcaacaaccgcagcaaatgcagcgggagtgtacaggtgcgaagctggctggagtcgcaaacaaaggcctctcatctcactggccgcccgtacgtgcttcattcagtaataatggcggctaagcttgcttgccaggacgagatcgagcagccagcctgcagggcgccattgccatcgccaaaatggagaaaatatagttagctgctggcgaggcaggcaacccgtgttgggaggaggccattgataagccgaaaaccttggtgcatgtatgcgtgtgtgttctcgcataattaatcagtaatgctcatcatattattaatgctgtacatgtactccctagctagagctagtacctagtagtatgcatattggatcatcagtatttgcgcgtggtcattaaatccttaaacctaacacttcaattgtcatccacgatctgggtccgttaatcacttgttattacgcacactacggagtggcttgaatcgtactagctagtacaggcttgttttttttttcttttgttttgttttcctttcgatcatcttcatgcagggaccttattgactactgtacttggatagttcgatccgactgctagccaatcgctctattcaatcgactagttcggtcgatcgccggtcggcactgccagccttgataaccaatagttaagggggctgtttggttcactccctcactttatcaaactttgctatactttttaagatatatgtttgtttcactttcaaactcgtggcatgccacagttttttaattcaaaggcccacatgtcatacaactattttttagccaaaccatgtctaaggcgtggccatcaatttataagtcacatatttggctagattacatatttggctaagtttggcaagaaggtttggtaatgtttgggagggaaccaaacaactccttaacctttactatagttctgttgttgggggacgacatcaggaggggatgaaatcaggcgctgacgtcagcgcccaatttacgtgcaaaattaatttaaattgatttttctcttaaattacttatccaaatcatgatccgattgcaccattaaattcgttgcaattaaatcttcaaaacaagaccacacatggatatattccgacgaaaattttttttagcttattattgaattatttttaaatgttgcacgatgttccaccaggtatatcggaattgtttcactaagtagatcaaaaatgtcactcgtttaaatcgggtgttgttttaccttatataaaaacaatgtttcagcaaatagcgaaagaatgtttcagttcactgcaatatttgatccatacatagtgaaacattacaagtacactaagtgaaacatttttcggtggaacaaaaaataaaatgaattcccttaataggaggtttccaaaatatgtggttttttttgttgcaatggaatatttcagttcactgcaatattagatctatatatagtgaaacattgtgagtacactaggtgaaacattttttatggaaaaaaaaataaaccgaatttccttaatagaggggttccaaaatatgtgggtttttttgttgcaatagagttgtttgtgtgtggacacgtggtgggccaggggagtgcagacatgcacgcgcacgcggggggcggggggagcgcatgatttttcctccccccgcccggtcgcccggtgcacagcattatccctattgttggtttggtttcacttactcactgctgaaaaagcgattttcacggatgaggtgcttatgttttttcaagcgaagatattttcttttagcagaaatccgcctgcaaaatgtgtgggtggggggtggtggggggggggggggttgatgatggcggtccacatgtgaagatcaaggaacatgactagtcatggccaaattttaaatttgtttttttctccaaaaaaatggtgatattattaattaaataaagtgattacaattccggaggcacaagattgatcataaatataaactaagaaggtagcccgtatattcacgcgtgcatatatcataggctgcatttgagatacttgtaagtaatagaccgattgtattagaatgtcgtatttgttatatagcaaactataggcatgtggatctaggcctgccactcggtattcattacccatccgatatccatacccacattatttatgtagggtataggtaaacaaatttacccatttaaaatttggatttgtggagtgtattacctattttacccactttgtacatacccattttctatgcgtaaaacttgcacctaaaatttttaaactctcattcacattacaaaatcttatcaaatttgactttaatttggagggatgatttctgaaagagcaattttgtacaaattttggtcaatttctacattaagacccacatatgtctcttctcttatccattggtgtacccatacccattgggtaatacccacttaatttaggtatgagtaattgctagtgttatagataaggcatactcaatagtcttggtttaggctcgatggagcccaccatataccaagtcttatacaaaatcatgctttattacagaaggtatttcgaataaggaaggagaaacagagttttacttctccctaattctattttccatagttctatttgaagaaggggatattcgagggcataaatacaagatccctagaaggaaggagaacatgcaacacgtctagatagatctagacatgccaaaacaaaagacatgcccaatccggaaaaaaaaaacaagagggatataacgctacctccaaggctatctcactgaatttatattcaaagacgaagacaacattagccgtcgactatgattagatgaggatgagtaaaattagatatggatattggtttccaaataccctccatgctcccattaaattaatttcagttatttgtgtccattatctattaaagaaactagtttactggtgaatcggctactgtatcacacatccttccgaccatgcatgtagcgatgtgatgtacgtaagccatcaattttcataagttttcctaattaacacgcaacaataaacaaggctgatcatgccggtcactgaatgaattatgattattagcactccactagctagctaattaacgagacctaattaacgtacgacgtacgtggatattaaggtagccaaacctggagaactatatagtacgtatatagtatatactactagctagcgcagcatacttcttcagatgttttgactgatcaaggaaaaagatcgacgtaggaccgactaattaatttgcatgtattaatttatactccctccccatcttagacaaaacatcatttttctcatataaaattatttttttgacgaaggaattaaccacgtatatgcaaactatatatactgtgtggttactggccttatcgcggggtacggtaatagaaaaaccacggtaacctcctcaaattcaaataaatttaaaaataatttaaatttttgataaattttgcacagtttcgtacggtttttcacgggttaccgcgcggtaaccgtgcttaccgtcggggcgcggtaaccctggccccggcggtttggaaaaccctggatctgacacatgcaatcaatagatgcatatgactagctagcttgctgcggattcatcagttcttcatgcttaattacgtgtaagtgagatcatgcacacgtttggacgtgccgtacacgacctggtagtagcattggttgacctggagtgaacacgaacacaacgatatactatatatacatacatatcaacccatgcatatatgtggtatttttttttgtttgaacattcatatatgtggttagacgaccaaatattcgagtcatgctttgtatctaagctatatagatagaccaaatatactacggcgcatgtgttaggagagatcgagggtagtctttacgcatgtagtgtgaatgtgtgatccgtacgtggccgagcgcaacaaaagcacgtcaatgcggcgtgcttacagtttttctttttctattttctcttctttccttccaactgatggtagggaataaaaatgcagggatcctaattagggcacacgtaccagggagagaattaagttgcgcgcagttttcgactgcatggcgacaaactaaggttaaggttagggtttcgggctgggggaagggagggtggtgctgggaggaggaagtgtggggaggatttagagggatggcctaggaggaaacagaccaacagtgagtagcggacaaggccagaaggcaaggtggcgatggcactgctggaggcgccgggtttgcagtggacaatgggctggtgatggtagcagggataaagtgaggcgaaggggaaggggagggtgaggaggccggccgggcagggcggcacgttccgccctttcggtgccagcaaggctggggcggcggcacggtgggggtggcggtggagctaacctgttaccagaggaaggaatatggagctatcattgtcgccccttcgctcgcatcattgtcgctcaactgcaacccctcttctccgtcatagcaaatcactagagtgaggaggaagaagctcaccgtgaggctgtcgcccgctccgctcacgtgcgttgagtggagaggggaagtgaggggaggggagtgcatgagaggggggaaatggggtgagatagggggcgtgcactcatgcagagggagaggaagtgtgcacgacttcccctcctagctcacgtgcacttgataggaggccccttaaacgtgcttacaaattttccttttctttttctttttggtattgctctatggcatgtgatatttttttaatcaatagtaattcattaaccgaaaagtaatgcaaatttaggaacagttgtatatcggtattcagaaagacttttacatattcagaatagttgtataccggtataaccgaaagatttttgcaatgtcataaaactatttaaaattccattaattttgcaatggaactttgttaatattttttatctattgtatgagatatgcatattgtcatttttagttatctttattcttttccagaattttactagatcattgatatgttgatacaatcaatttgaagaattttatataattccgttaggaattttctcaaattattgatgttatgagctaaaatttgagaaaatatgattaagtttcctacatggtatttttctatattagttcctatatttgacaaaagtatgattaagtttcctacatttgactacttataatttcaaaaatttgagaaaatattatttctttgttcctatggtattgtcaaatttgagaaaatatggtattgtcaaattctaacatggtatttctttgttgctggtttcacttcctttaatattatttttctatattagttcctatatttgacaaaaatatgattaagtttcctacatttgactacttataatttcaaaaattttagatataataacgaacgttatcccatcatgctgatgaaatgattcataattctgtacctctatcctttgaattgtttccttcaacttaaactttattagcttatatgttgcctaattgtactttataagcaattaattatgccttattcaatgctcttgcatggtgtttaattgtacttttctgagcatcaaattcatttaaatttctcatttgtctacttataatttcaaaattttcaacaacgaacattatctgatgaaatgaaatgaaaatgctgatgttgatgaaatgatttataattatgtataaatcattttattagtcaaatgagaaattttacaattatgtataaaattgtccgtaactacattaaaacgtactgctaccatattctccccttctttttaatgtataacgtcgttaactttttatcaacatttgaccatttatcttatttattttttatgtagatataaaaatatttaattcatgtttaaagataaaaatatttgttttacataaaaatattgtttatgtataaatcaaggtcgccatgagccaagggaaaaagcttccgatgaattttccatggtgatttccactttccaccctgcattatattaggtactggcgtgtgtatattctaattctcccccgtgtgagcgtcgtcgtcgttcggttttgttttctaaagtcatttagcatttttttttttgaaaaatagatgcaatagcttttgggatgtctattacaattttgatagaaaaacaccactaaaaataatggatattcttgatgttggatcgctttattaagatatgtgcgtctggtttgaggttcatactccaccttatttcttcctttccagctcgtggctgccgataaatgctgatgaaatgatttataattatgtacctctatcctttgaattgtttccttcgacttcaactttattagcttacatgttgcctaattgtactcttctaagctattaatcatgacttattcaatgctcttacatgttatctaattgtacttttctaagcatcaaattcatttgaatatctcatctcatttcttaacgaaacatgcaattgatcatgtaatgaatgtcaaccagtttggattattttttggtaactttttcaacgaataagtacaatttatctatattatttataattcataacctcaaaagtaatgcaaaattcagaaatatttgtatatatgcattctttgaactatttcatttcacttcagccatgttctagtctttgaatagttcatttcctacaattgccctgtatattcaaaatttgttgtatatttaatgaacatctaaaattataactataactatggagacactgggaattataaaatctaatgtctaacgcgagcatcacaaatatttggatgggtattatactatccaatgcccaacgcgagcatcacacatatttggatgagtgggatccaaaacatgtgcgatgctcgtgttggatattggaaaatataattaccggggtgcccacactaatatgaatggtttttagatactatttactaactagcatgcttattttttttattcgcattatcttatattaaaatcacagtgttttaattgtgcaattttatcacatatgcactgtaaattgttgaataatgatattatagttgtattatattcaagaaaaaaaattatgtagtattacctgtatttatagttacaatttatgttgtctagtagacatgaataaatcaaatgagttaatatgatcttgtaggagttgaaaaattgttccgttctattacccagttttatgagctaagcagaatgaaagtttgattgtgttctctttgcatctgaacttcccatgatgtagatttgatctcgtttcctagtagatccaccccatgctgtttacatacttgtcagctcaatttgagtgaggagatggagtacatgtcaaatcaagaaccaaaggatagagaaaactttccttttgatttcattagattgatgtgttcttccatatgtttttgttttcatcaacttagttaacttatatgttgcttaattgtactttcctgatcaattcatcatgacttcaatgctcttacatgttgcctaattgtacatttcttagcatcaaatttatttgaatttctcgtctcatttcttaacagatcatgcaatcgatcatataatgtatgccaaccaattcagatctttttataagtttctcaactaatcagtatatatattttctcataatcatttatgattcataaactaaaagtaatgccaaatttagaaatagatgtatacgtatatcctttgaactatttcattccacttcaagacactctctattatttgaatagttcatttcctgtagttcccgtttattttcaaaaaaaaaattataggactaaccaacaaaaacttttcataatgaaaataattgaacaagcatcttaaattataactataacatgaatgatgttcagatgctagcatgcttctttttcatttacattgtctttatattaaaaatacaatgttttcattatgtaattttataacatatgtgatgcatattgtttctactgctattataaagagaaaattccttctatacccctaaaagtttagcaaatcccttctacgccctgagttttgtccactcccttgtatgcccctgaattttggttttgatccctttcatacccattccgttagttgaccgttagttgaatgtttaattcctatgaaaatgaccattttgcccttacacatgaaggaaatctgaaaattgtagactagctatattgttggaagtgtataattttgttatataagactattatattcatgattttattgtacaaggtattattcatttcaaagtttatttttacataatgacataaaaaactaatatttatttacttattaaaagagtatatgtagcattttttatggtacttagatcaacattttttttcctgtcctatatattaggaatgttttccaaaactatgcttatcatttaaagaaaattctatacatactttttaatatttattaaaatgtctatgtacaacaaacttacgaatgttataatcacacaacaaatttctatactttcaacaatatagtctacaaatttctacatattcctcatgtattgaagggcaaaactgacttttctatacctattaaacggtcaattgacggcaagggtatgaaagggatccaaatcaaaattcagaggtataaagggagtgaagagaattcaggggcatagaagggatcggctaaaatttcaggggtatggaaggaattttctctattataaaaggtattacaaatatagtaattgcaatgaaaaattttgaatcaggtaactgtggagcaaagtagtttacttgttagtttttaatgatgtgattttgtagaaaaaaatattgatgatatctttctgttgtcctaaaaattgtcagcataaatatttaaaaagaaaatatagtcaattacataaaatttgcatatgaatctggtttaagaagattgttgaagtttttgatatgttatatgaatagtacatgtttttcttttaacagaatgcaatttacttgaatcaatggtagctatgaataaaactggtttaggaggatcgtagacctatgaaaaacatgtttgtgtttggttggctggtatcaacaaccatgtacttcgatattaggagttcgaccttcctcccccatccctcaactagcgcatgggtatacaatttgtttcccttctcacatgaatcttggggcaatccaatattattatcacaaatctaaaagttttaactactaaaaaacgatttttttatacgagagcccctataggttgcgcgcggaccataacagatcgtgtctacaaaaatcgaaccccccatcttcgcatatggctccttaagaggcacgtgtgcaaaaatctattttcgccggtgggtcacttaaggagccacatgcaaaaataagtctattttctcatgtagtcctcttaagggaccatatgaaaaaaaaatagattttcacatgtggacctcttaaatggaccacatgaaaaaaatacctccatcttctccggatatattctctcctcctctttcttttttctctcatcactaaaaaaaacttttgcctcctctcctatcctctcctctcctctgctctctctccttttctcctctcgccccctaaccgagtggcgagcaggagcaacgcgtgcatgacgagggccggtggtgacggctggcggtggacccggcgatgccgcccttggcagtggctccggcaacgatgacggcggggtttttcgaattttttttcaccgaatttatttttgcatgcggttggtatagttgaccgtatcagaaatctcattttcgtgtgcggttgcgttggccgtatgggataatccgatttttgtggaccttttggtgtaagtgggctactcatctgtacgtaaaaatcactttagcctcgcggaaaaaactactttttagtagtgtttgaggagaaaaacactggtggaagttttttagcaattaaataaattaacagagtataacactatgaaagtactactatatccttaacactacgataagataatcgaccatatacacgtcctagaccaaattaatctctctcacaggcctactacgacagaccatatacacttaatccattataaaccacagttgacgattagtagcaagttaacagaggactaaacgctactacgactacgacgtatactactgccagtagtgtactagttagtacacccggtcactggtcatcagttggctggtcgatcgacctctcttccgggaggaaaatgtgccgcacattacgctctaatcaaccaccacggtcttactgactgattcatccatcagtcttctctttgaattttccacttacatctgatcttcgtctggacacagccagggttgactccatccgtcattgctccaacaaacttcatgtcactctacgagctagagctagctagctaccggtaatttcgttatatgtaaccgttggatagtactccctccgttcctaaatatttgacgccgttgatttttttaaacatatttaatcgttcgtcttattaaaaatttaagcaattattaattctttttctatcatttgattcattgttaaatatactactaccactcaagtttttgaataatattcacaaaagtttttgaataagacgaacggtcaaacatgtttaaaaaagtcaacggcgtgggaatgagggagtacaagtgtagtactactagtgttcacacatcatccaagcttactgctcctgcagagtcgtgggcagatctacagtgttagcttagatgcaagacaacgtcaataatttttaattgaatttatggttaaactgtttattcataatactacgatttatatatatactaattaacatactatgacactacactagtacgtatgttattatgatacaggaggaccaaattgtatcagcctctgtgttcttttttggagggtctgaacctgatatttttttcgagcgattcttctatctgttttgttttgtaaccagtgtcgcaatcaactctttaattaatcggtgccatgataatcatagttaacaattaataatatcaaagtccctacatattaaattctccaggacaaaggaaaaataagcacactgatgagctagccccagcgtctagattgtatagcaagatatctgccatttggtccttccctaccgatgcaaaagacgattaaattcagacatgacgtgttgccgacatctctcagcactagcaaagatcgtctgcatggcttttcaccacaaccaaaaacttccagataaaatggagatgaacacagcacaggtcacacacatgcatcacaatgcacgtttcatatggtaaatttgtgttcttcctcctaacacacacacacacacaaaggcttataatatgcagggatatattcagctaatccttttttgacttgttctttctttgttccctgatggaatgttcaccatttggcagggaatttcttgtgtttacatgggctttttcaccccctactaattagggctaagcttctgggtgccggtgccaccagtttctagtcatgttgttgtcagtattagtgtgattgtgacattgcttaacctgccttttaccatctgaatgtgatcaaagttaaagtactccacacatttagttggagcatctgcaactgagatcaaattaacgacagccgttgccttttttttttctctcactggaatatagtagtatatatagtggagatgataattaaccgtgcagcttatgttgatcgatcgatcgatcttgactgctgcatgctcgtagactttaatttgttgtgcagatggttcttcacgcgtgctacgtaaaaagcaaagctaacgaaagcaattcaattcaagcactgcatgtgtagtttgttcaacacttagcaaagcagctttaatatttcatgtgctttttgtgacagttttatctgagctttaacacttgcctttcgtatgcacaggagaaagtgagaaacagagtagcagtacgtagttttcaacgagagacaaaactgcttaacagtatctgcttgtttatactgatcaaagtctcaagctagcaaaaaaagattaaaactgtctccctggaagacattaatctttcagtataaacaaagcactgcagttttaatctttcagtataaaaagattaaaactgtctccatgggcctccagggagacattacgtgtgtcaggtacagaaagcgtatccagatctgaaaaaatgctggtccattttgatgtagttccatcatgatgatttatgtactggatctcaactgccatctgattattgatacattgatgaagagcgatgaagcccctgactttactgatacacagcttcctatcaccaaccgtaaaacatgtgatcgcattgtcattggagatcaaattaaagcgacacagatagtattaatattcagtattcccttcgattataattattcgacacaattaagtatttgtattaatatttaaaaagtttgtataaatatatgagaatatacatacttaaaacatctttaaattaaaataaaataagtcacaataaaatattttatattttttaataagacgaatggtacttaattagccgagcaattttaccgtccttgaggaggtaagtggtacctcgtagtacctccttaaggacaataaaattactctaattagaccgttgtaattcatggatacgttactagctagtataaaaagggctacaaattaaattggcttctgttcatcgtccacactggcacgtgcgtatgcttcgagtctatcagcatcgcgtgggatcgatccgcttacatcgtcgcactcgcacgcgcgcaaccgatcgatcgagaggcccccaaccccaagtcgcagccgttactggctactgcgctgccatgcccgtgtccaactgatctagtagctagtgcgtgtgctcgatcgatcactcgatcagtagcacaaattaaccagcaaaactatcggttacacattgacacttatagtgtacattatatctattcacctatatatctgcaattctaaattatctggctgtgtacataaaaagacgtgaatatgagggaaggacataatatcaaataattagaaagagtaaggcttcaaactcagatcgtctagcccaccaccttgtgaagctagccggaagaccccaggtcgtctggctgtgtacatggccagacattgaccgtgtacacgacccgatattttggaattatatatataggcgaatagatatactatacgtatctatgtgtacatgattttgtcgattagtttgatcataaatatttaaacgattgattttggcgatgaagtttaaccattcgtcttattaaaaaaactataaaatattttagtgtgatttattttatttttaaagatgttttaagtatgtatattcttgtatatttatactttttttaaataatacaaataatcaaacttaattgtgtcaaatatttataataggaaggaatacaaagtagtatttctacgtacggtaccgtttgggaatattggcaaacagtaaaattcccaacttcgtgtatataggataagctggctaattaggtccctttgaatcaaaggaattatgaatgaattttataggattgaaattctataggaaattttcctatgtagccctttgattcaaaggattgaagttttccaaatcctacaaaattcctatggaatggcttattgcatatagattttggagaaaacttagcaagaggtctaacctcttgggaaaaatcctttgagtctatctctctcatccgatttctgtgtttttcctgtggtccaatcaaacaatcattcatgtgttttgcaatcatctgttttacacttgcatttctgtcagaatcctatgttttttctattcctctgtttttccattcctacgattcaaaggggttaagcattttagtcgcataaaggtggataaaatgtcaacttaaatttggtcatttttgttcacttatataccaagatttgacatgcatcgtgtgtgcatgcacactatcaagtcaagacgttctggaatttgacctaatcagtcacaattgaaaccaaccgaagctacaactatggtacacgtatctgtctgaccggtgcgaaactttgcgcgtactgaactttcttctataagatttaagtgagttatgtagctttgacaaaatttgttcatcttttcaacccctaattaacatgcatgttttcatggttatttttttttcacataatgaaaaactaaaattatctagaaatgggggcaaacgtgttgcctggagttgaataatcttagcactttggccggtacagttggacttgaataaaattgtcttgccccaagtgaaatcagggagttgaccgatcgaatgatcgatgcaaatgcaaaaatgcttaaggaaaatacatctttgtagcacaggggattttgccatgcaaaatttgaatcttagatttttctttcatgcaaaagttttatgaataataatagaaagagctcctattttatgccattcaatgttatctttgactagcgaaagggcctgtaacctatagtggttacaagagtctcagtagcatctgaggtcctgagttcgactccccatgagagcgaattttccaggatttaacggcgttgtgctttcagtggtagacgacgtacccatcgacagcgatgcgcctgtggtgactttgtcaatctccaggattggggtaggatagcatcataggggtaggatttgcgtgtgtgcgttcatagaggtgagtgcacgtacgttgtaagtgtctgcgttttactgtgtaattaaaaaaaagttatctttgactagttggaacagaagtagatcgaagaaaacattactaggtttcaacaacaaaaaaaagaaaaaaaaatactaccaagaaatcagcatttcggcccatgcccgtagcctgatttgtccttgtttgatgggcctccattctggccagccacgtaatcaggccaagatattaacgtaccgcattaggcctagaatttggacggaataagttcatctgagttcccttaacttcaacatgggcctccattctggccagccacgtaatcaggccaagatattaacgtaccgcattaggcctagaatttggacggaataagttcatctgagttcccttaacttcaaccgaaaaaccagatacaacgggtccctcaactgaaaaaaccagtgtagatgaggcccctctgcggttttgacggcagttttggctgacgtggtgcctacgtggcaaatttgacttggtctttatctgatgtggcatcgacgtggtgctaacgtggcaattcgatccagaaaataataaactttgtgggacccacatgccagcctcacacataaattaatataaaaatggtggggcccacatgtcagctacaaataaaataaagatggcggggcccatgtgggccccacaagtccctcttggctctccatcatcctcgcggcggagcgacggtgaggaagaggagcgggcgccggcaacagcaagccgcgggcggaacggaggggcgggtggagcaacagcagatgcatcctggcagcagacgccaggcggaggtggtcagaggaggaggttgctaacagagcggtggcaagccgcggacgcgcggaggtgaccagaggaggaagaggcagaggaggagatcgccgatgagcgcagtagctccactccgtcggccgctatgcccgcgatgcccagcagaacaacgctgccccttcttgctcggccgcgccgcgccacctccttccttgcccggccaccgcacaccgcctccctcctcgtccggttgctatcgctgacgtccttgatggtcacatccgggtcggagccctccctcctcacctggtcgccgtgcgccgcctccctccttgcccagccgccgcgcgccgccttcctcctagcccagctgtcgcgcgccgcctccctcctcgcccggccgccgtgagctacccctcctcgcccgggcgccgcgtgccgcctcggggacaggagagggaagagaggaggaagaagaggggaagagagttgaagaaagcgagatgatgagaatgacatgtggggcccacgtgggccccacaattttttattaatttatgtgtgaaactgacatgtgggtcctacggagtttattgcttttccagatcaaattgccatgtaagcaccacgttaatgccacatcagataaagaccaagtcaaatttaccacatagacgccacgtcaggtaaaaccgtcgttaaaactgccgagggacctcatctacactggttttgacagttgagtgacccgttgtatctgttgaacgaagaaaatcggattcattgacaagttaagggacctcatatgaacttattccaatttggactaatattttggcccacacacacgaatgggccacgattcacgcccacataaatgaggcccatatataataatgggccggaatttggaaccatgcagacgagttcttacagggccaacgtctcatcaacgccaagaaaccaaatcatcattactctaattaacatactcctaattatctttctaatcaattaattaaacgcaaaatcagtagttttctaataattttattattaaaactgtacttttagaatatttcaccttataattcgatagttttacaataaatttactgttataaatatacatttaacagttgagtgataatttaaccaaataattaacatattatttttaaataataaaaataggttatatcttccgactttgtccatggtcacacaaccaacaaatttcacaagaatttaaaatggatgcgatgggtcaaaccctcaactctcaccaataaaatgataaagtgaaataacgttttcaaaatcagagagattctggcacgaaataattatctttctaatcaactattagttaattaattacggagtagtgataatccccggagctcatctccatctcctcttccgcttcctactcctactccgtcgcaatccgccgcctccaaaaagcatccacctgtacccacaaacggaagcaaagattccaactttcgatcgagagcctcgccgtcgattcccccacctcggctgagcccggattccgaggcagcccccccatggcgggagccgagcgaccctactacccgccgcggcccacggacggcggctccggccagcccgccggctgcgactcgccgatgaggtgggacgacgacgacgaagaccacggtggcggcggcggcgatggcatgaccgccgttgcggtgagcaatcccccctctctctctctctctctctctctctctctctctctctctctctctctctccccttacgcggtttcgtcactgtgaagattggttgcgtgtacgcttagttcgtttggttgagttcgttgtgattttaaagcttgtggtttgggcgattggttgggtgattagggcttgctgtgtgattgtgagaatcatggaggaatatggaaaatagaatgctttaatgggtgattgggttaagcgcttaagcgagaagcaagaaaaagaaggtttgggtttttaggattgtatggctgctgctgctcatcgccgtcgccgctttggctgctgggaattatggggcttttctacgattatttcttttaaacatgaacgaatttccatattggtttctgttgtaattttattttccaaatttagggattcaacctgttcgaggaagaatcagatgaccctcctgccaaaaatggcgtggtcgacgatcctgatactaccactacaagtgattgcaacactgatatgagtgaggatcttgtaaagagggaagaagggatgaacttccattgtgatcccccgcttcacgaacatactggcatctgggtgcctgtttctgtcccgccaatgaccaaacgcgatcacgaggagtggcataagggctttggtcataatggtgactactttccagaagacgaatttaactgggagatagatgaagagaacaaggagatgacgatgtgggatgtattttctgagatggttgttgcggcaaaggataaggtaatatcagttgcatcgtatgatcttgggagacgtggtatgtctatgttgtccaagtttttcttccaagaagcttggaaggatatggcccaaacacttgcagatgccaatgctggcattgcgaatgagctcctagagactgaacgaacaatatggttacctgacagcgctgccagcgcctgcatgctctgtaacgtgcgttttcatccgataatgtgctctcgacatcattgtcgtttctgtggtggtgtgttttgtggtggttgttcaaagggtagaagcttgatgccaccgaaatttaatacttcagaacctcaaagggtttgtgatgtttgcggggtacgtctagagagtattcaaccttacttgataaatcggatcagtcgtgcttcacaacctccaactcatgatgtcactgatctgagtacattgaggtcgtggctgaacttcccttacgcacacacaatggaatatgagatctacaaggctgcaaattctttgaatagttactgtaaggtatgcctttttaccctaaattgtttactgttgaatttgtttatcagtgctgttgtaatttttttagacattttcttttgttcttctcttttactgtttgagaaatcatgtgcttatgctttagtcatagcctatcaagacttgtcacctaattctaaggtgctttatcatgtcttaattctcaacagtttatatatgatttactatggacatcactcattaagtaattgatatgttcctttcttgctaatacaataataatatctataagacttgtaacagagtatggtcttccatatttcttgcaaagtaattttcagtttccttaagtatgagttgaatagatgaaaaacctaacccggtgattggataagaattgcatagatatttgctctcagcttttgcacaattacacctgtgtaatctatagtggcatcatatggttgtccacaacatttcagtacgtttatggtcttccctctgttgtataatttgttaatgatatctattattttttaaagacatacctgtgttacattcatccattccccaatctttattataataactctagaccattcaagttacagtaaatgctgccaactaattaaaatgatatctacattagttgttttagtgatatattcaaattagagaatcattttgtctgtcgaatgctggttcgaagtattatacaaactaaaattgggtttccacatcattctagcttctgaaagtgctgattgttcagttagttcagttgttaggagaccaaccagtagcagtgcaatcattttttttttcttccatgtgccattcaggtgggaagactgaaaccagaaaaggctatcccctatactatccttaaacaagcaaaaggccttgctataattactgtagcaaaagtcggtatgatggttgcatataaagttggtactgggctggttattgctcgaagagccgatggttcatggtcacccccttcagcaatcgccacttgtggtattggatatggagctcaggtgacatcttcttttctagtgtcctttatgtgcaaattcttttatcatcacactagcacatcataacaaaatcagataatttccgacttacccatcaggctggaggtgagctagctgatttcattattgtgctgaggaacacagaagctgttaaaactttcagtggaaaggcacatttgtcagtcggtgctggtgtaagtgcttctgttggccatgttggacgagtagctgaggctgattttcgtgccggtgatggtggttatgctgcatgttacacatacagttgtagcaaaggtttgtttcaaatttactccatggcatgcgtcactttggcgtcttctttcatatgttcattttcacctcgctcaacatggaacacatgctttattatatgatacgactgtatattcgtgaataacttcttttggtggtgatggtgatggttgggagaatatgtgtaacaggacagttcatggttacacaaagagtcaaataaacatgtaattctgtcttagaatctcttaaaacaaaacaacagaattggattggggtccttgacccatagtttctcaatatattaaggtaatttaaagggttttgtttgtatccattgcaagttgattatttctcttggatttcaaatggcagacgagtaattctacaaagtttgggaatgtcctcttaaacccaattttagttctgcatactttttataccaacacaccaggacctgttttaaaaggcccatagcttagtaatttgacccttctattattagctttatctttgaatgactaaaatatgtcctagtatatcttatcactggataagtgcacaaattctcggccttcattggcttacatcacgaacttattttgttactgatgagtaggcattatagtaagcttagccattcctactgttttttctcacaaagaaataatgtttaccttgttttttctcacaaggtaaacatttatacgttgaggcaccctgagaacacttgggactctagtctgaacaattaacttgttgacagtcttttaatgtaatattaatatatatatgcacttgtggaattcatattcataggagtgcaaaccatgtcatatgcatattaatttattttcgaggaattgctttttgaatttgaactttttgactaaaataataatgccaactgtgaaccactctagactgctggatgcagttatagtgacaaacctaagtagtattacagtgacactttagttcattcgtgcaatatctgatgtcgaatttttcaattaagtgtagcaggatagtaccatttttcaagaaataaatgttcattgctaactgttaagtacttgtggctagatctggtcattcagaccattcagggttgtcttatgtaacaactgagtctgtatatctgtcttatgttgcaggtgcttttgtgggctgtgctctcaatggtagcttagtatcaacccgagacacagaaaatgcccgattttatggtggtccaataaaggcacccgatatccttatgggatccatggctagaccacccgcagccgctgcgctctacaaggttctgtcagaattgtttgacaatcctgagaagcaatcgctttaggtctctagtatgcgttgcgtcttctggtaaatacattctggaactctctgtcaagtaattggattgcggttttgcgatcttttcacttattcgttggttgcagtttacgcaattgtacagtctgccattcattgacacgccaaaggtttcacatcatggttaccacaaaaccaaatgtaaatacatgtacattggatcccttcttgcttcatcaagatataaaagaaaaaaaatatatactattttccattccccttgatgatctgcatgcatgttcttcagctgcattgatcagcactcctgctgtgaatgacctaggactgtttttttttttttggttgcatgcaacttttttctcagtgtacatgtgaatgtcctcccatcttttctatgatctttgaatttgtgcacctcctccaggggaaaagaggagggtcccccaacctctcttcttgatagaattcacaggcagtatagtcatttttgatggtcctaaagaggacactgaaaaagctggttgtactggctctgtcatcctgttgtgatgttgtgtgttgttgcattccctgggtaattattttgtcctggcaatgcaatagcaaactaaaatgtactactacttcattacattgtttcagctagcctgtaattctgatgcaagaaattcatgcagaattgcactagacctgagaaacaatacttctctagcaaaagataaaacagaaaatgacttcatcaaggtagtggtggtattttttttttgttcatatgatgccattgcacttgacatgatgagttgtgagaaaatactccctccgtcccaatatattaaaacctaggataggatgggatattttctagtactacgaatctggacagaattttctagtactacgaatctggacagattttaatatattgggacggaggtctgtccagattcgtagtactagaaaatgtctcatcatgtcctaggttttaatatattgggacggagggagtgcatgacactgcagctaatgactatgattactgaagcgtgccgcatgttgagcttgtctggcatgcccagagcacacactgcagatgaatggaatctctgtccctgtcactgcaaaatgtatattcctggtcttaacaaacaccaatgtccatccagccctgaagatacagtaatgcggcagtgtccaatcggtgtctgactgaatgtgccgtcctcgatactagtgcccttgaatcattgagatgcataattcacttcagttccagttcagttctaccatgatggaattaagctgaatatacttactagagatgagatgagcaagagaatgatacagtatcctggaaagtgagtagcaatggataaatggataatcaatcagcaacacacagaatacagagcataaaccagcattgatcatgagcaggaagcaaaatgtataaaattattctctgaattctactcccaactgtctgacaacccattaaccatgaacatcctaattcccttcccttgccatgttttccttttcattgtcttctaacaaccgaaaattataggatataagaaagcaaaaaaaaaaatcaaaaagaagctaaacttaaacgacggcctgcatgaatttaaacccagttcagagactcctcataagatgaacttcttctgaacccctctctgatgatgatttctccaattcttgatttcttcgtcttcttcttcttcttgatgagatgaggaagtaagcttagcgatcgccgcgagtcatggagctcccgagggtgagctcgagatcgtcggagccgcactcctcatggatgcgctccccttcccacgccttcaccagcccggtcatcttgccgccctcgccgccgaacgcgaactcgcggcgcgccgcgtcggccatctggacgtcgccgccggcgaccggcgagcacgctccgctcatcaccctcgaggaggaccccgcggcggcggcggcggcgccgaacgggttgggaggaggagccacgaggctgtacgtcggggacgacggcccggcggaggatatctggaacccggcaagccacgccgccgcgtcgttgccgccgccggcggcggcggcggctgcggcgaccttgcggcgcgggctcggcggggtggagtttggcagggacgacgaggccgcgtaggcgtagctcgcgccgacggtggcccacggcggcagcacgctgccggcgtggtggtggtggtactcctcccaggcggccgtcttgaggcgcggcgtgcgcggcggcgagcccgagggcggcgtcaccggcgcgctgatggagccgccgccgaagtaggagtagtgcgccgggaacttggacgacgagccgccgccgatgccgacgccggcggaggagagggtcttgagccacgggatgaggctgctgccctcgccgccgccgccgccgccgagcgtgatctgggaggaggagccggagctggggaaggaggacgtcccgcgcgggctcggctggtacgacgagcacgggctcgccgacggcgagcggccgagctgatcagcgagctctgacgccggcggcttgcatccctgaaacacacagacgaacggttcgacaaattaaaccaaattttttgaagcgaaaatttaaaccaaattggtgaatttgacaatagcaagttaatgacattttgcatagaagaataacaatcagaaaaatttatcatgtacagtttaacaagaattaaaaaaaaaattgtaacattttgcatagaagaataaaaaaaatcagaagatttgatcatgtacagtaaaatatgaatataaaatctgtgtcgttttttaagtaaaaaaaatgtgacattttgtatagaagaacaaaaatcagatgtacagaacaggaataagaaaatcacctcagaacacaatgtgaaaataaagttacaagaaacgtgaatgcaaattcttactgaaattcgctgcctcagaattaaaacttcacaaattatggccagaaatattaacattgctggcacaggagttttcatcaattcaaactataaccatgataataccaaatagtggcaatgcaaacttaactgaaaggtaattaaaatcctcagtgaaacgcacacaaaaaaaaaaacaactactgctctaaaaagccgattgcaataaaagaaagaagatacttgggtagaatttgtcattttgtaatgcaaagttgattttctgaaatcaaaggcttctgtgacagccttagctttctttgatgtaatattcggtcatgcccatatctatctgcctatgaccatgccactaacttttgtctccataattgcctctttcaccagtccttttttcacatgagcagcttcaattctgtccaggctccagtactacatatagatgcatccatagagataatgctaatcttaaaaagagaatttactcaaggtatctagaggcagagcttgcagccaacttagacttactttgacaaaacagggcagatggattctgtaaaggtactagctttgaccaaaaactaacaatctttgattcttgtattaatctacaccttaattcaaaagcgatttgtttggcagtctaaccatgcagttactaacgcgtgcaagccacatcctattttgcatttcttttcaattgaaaacaagtagcacttcagtttttttcggttttcacttgtcagccaacttgtcatccagaagacttcagaaaagaagagatgatctaatccttaatttttttttaaaagaagagcaggcatctaaaaagcaccatagataacaaaaagaaatgcttgaaaacagatagatttgatacattgtattctgcaaacaagatcctgatagcaatgttcagacttcagagctagtactacaaccaaaaagatgctagtactgctcttctgccaagacaaaaataaaataagaacaaaaaaaagaaagaaaacaaagtgatgagctttaagtacagcaccactactactacgacctcttttccctgcctaaaaagacactaaatcttgctaaaaagacccagcgccacagcatcatctctccaccccacagatgaagaagatgaaatcaacaacaatctaaaaccatttttgttcagataacggaagatctttttaataccaaaaacaacaaagaaacaaaaccaaaaaaaaaaaagagaaagaaaacgaacgctttttatccaggaaacggccacggaatgtcgcggcggcacgcgtaatcctgagctcctagtgcgtggcttgtcccacgcacgcaaagaaaagaggagatgagaggagagaatttcccccgccattatcggagtaaaaggaggaagacgaagcagaggagagaaaggagaggagaggagagagcacgcgcgccgcgttgcaggaacgaggaataaaaaaaaaaagccaaaaaggcaatcatggataacgagaaaaattcggtaccctcctctacagccgacgcaaattaagcaagaaatccattccatataagagcaaaagattaaatgaaattcgacgagaaatcgcttaattaatttgcaagaagaagaagaggaagaggaagagggaccttgcggtaggtggtgccgtcgggctcgacggtccagccggcctcgttgcagagcgccttgagcacctcgttgttgtcgcagtgcttcgggagcgtgtagtttccgtacgcccgcagccccgcgtagatcttcgccgcgatcgcccgccgccgccgctcccgccgccggttgttctcccgctccctccacgtcggcaccctccctccccctcctccgttcatcatccctctcacctcacctcaccgccgcgacctacgaggaagccaacggcggtgcgcgctcgccgtcgccgccgctgcaagctcgccgcgcgctctgcagtgtcagcctcgcaggcgcggcgtataaatacgccggagaagcagtaacggccggaggacgcgcaatgaccattctacccctgggtggtcttgcgcgggggagggtaaatgcggcatttcgcgcgggggtggccggtaatgattccgccgcagttaaggcgggggtggccgagaatggaatgcattcgcagtggcttaactagcctatcgccttagtgaacagtggccatttttagcagcagctagctaagctaagctaatccatgcaaaccaagcgtgagcggcgtgggtggtcaggtgacgcgtggtggggccagggtgtcagtgactgtggggggttggtgtgctactggaccagtggtggtcaaacgaccggccggcttgggttttggatatgttcttgggggtgcccttgatgacttgggttttggtatgatgtgtatgatttggtttgatgaggttgggggagaagatggatatagctagtgtggttgctgtcactgttcaatgtgtcaatgataactctacagtaatgattagttaaaagctagcacgagtctagttatggtttgtaacggttttggttttgtgtagcgcatggttatatagccgttaaattattataaatatgtgtatgtggaagtcaataacgagaattgttgtcattgattaactgcctatcgtagttactgtctgcacgattggatagtttaaacgtatctcgtgatatctcctttgacgatttacacgtgacattgattagacgaaggggacgatattaaatttgccacaataaccaccgtaacggttaatctggttgtgtaacggccatggaatgcaattttatcctcataatgactacatgtagtattggatagtttaaattaaacatgtgattccttctttgtcgatttacgcgtgacattgattagacaattagattatgttaatctttaccgtgacaacagtaatggtttgtctagtaacatagaacgtaaaattggacgtgctacgcattaatagagcattgttatctataataattgatctgcacagtcaaaacaaaagatttcaaacggttcaattgggtctagcacatggttacgtaaccatggaactacaactgtacatgcattcaaggtgtaaataaaacattaatatctctagtaatctatctacaacgtaacgcactagatagagctatggattgtaaagcgtccagttagttccatagcacgattgtataactctaggattaccatttacagtgcatataggagttgataaaaattgctataaaaataatcgttaatcaacataactgcagacacaattatatgtacaggtaacacatattatttgttactaattaatttatgtgtgatattgattagacaaacatggttgtgataagatgtaccgcattaatcaaatcggtttgactcggtcattaactatgaaagtgcaaccgtatgaaatcaatataacactataaatctaataactaccatttcctgagaggaactactgctaggcttacctagcctaaaagggctaggtgcagtcagttattaggggctgtttggttttcagggacttattctaagtccctgtcacatcggatgtttggatattaatttagagtattaaacatacactaattacaaaacccattccataagcttggactaattcgcgagacgaatcttttgagtctaattacgccatgattttgacaatgtgatgctacagtaaacttttgataattatggattaattaggcttaaaaaatccgtctcgcggattagctctcatttatgaaattagtttttttattattccatatttaatactctaaattagcgtccaaacatccgatgtgacatgggctaaaaagttttagccccatctaaacacccccttagtctctctggccatgttaaatttgacagggaatacgtatactaattagagtttaatttattatttttattataacttgtagaaattaaatttgaaattgtattttttttcaatgatataggagtattatatattaatatatcttatcaatatttttgaattttattcataattatttagtaacttggatcatggaagttcaccagagaatacaatccatctctatgcaagcaaggtaccgtaccaacagttgctggcagctggcacgtacgtgaagtggactagagatcagcagcaggagataggccgtgccgtgcagtggctcatgactcatgagatcagcatcatgcatgagctagctagcacacggcgtgagcgcggttaaccgcggttggatgtgtgggtttcagttagtacgaacccgggataccggccaactcatgaaccgctgcttactttgtggagaatttttttttcttagtgaataatttgtgtttgtccactgagatgcatgtctcacacaatcttcctcttgatgcttaatttagatggttaataatatggggctcacacaaattaagcactttttaggttatccatcgataagatcgatgccattttgagtcaagatgataaaagcacagttaatagatacctgcataagtatataggtttatctcatggttaaaagtaaaagatttactactcaatagatctccaaatctcagtcgagtattatcatttatttatatacacagctatattaatagcttaaaaaaatactctcacatttaactacgtcatcaaattgggtcagccattagattgaaatgtctaatacacattgaacattagaccgatcaatgtttcttcctaaaagaattcttatacccacgtatcaacacacgaaatatcaactagttcagtggcggatgcaagatttctaagataaagatacaacatcacttaagcatagttaaatactccaaaaaaaataaaaaaagacttgctataagtgaaagtcaagtgataattttgatcccaatgcaaattaatagagaccaattatacaggaaaatttacaaaacaacgtaactaagctagaaaatacgtttaatacccttagaaagaatgattttgggattaagtgtgcttgttttgacacaagtaatggtatatagacatattatacctataaaatcacttattttttacaaaaatttgggatagaaatgtacccatgtcccatgtcccattgtaggtccgctcgtaactagttgttatgacgtggacaatcacgtgcttgtaatggcctgataattgtctttaactaagctccagctagcacccatcaaacagcgatggataagcgatgaggatggcacaacattaaagtaatccaggccatattcaaaagtaaatgaaatttaaataaaaaagcaagatgatcgataaataatactactacatttgttttttaatatatgacgccgttaactttttacatcatgtttaatcattcgtcttattcaaaaattaaataaatatattttgttttgatgtggcttgatttatcactaataaactttaagcactacttatatttttaagatttgcataaaatttttaataagacaaatggccaaatattataacaaaagccaacaacgtcatatatattgaaaaaaaaatgaatcaatcgatatctcaaatatatcaccccgtctaaacggatatcaactagccgataccttaaaaaagtatcatcctgtccaaaagtataccatgttgtagcattttccttattaatttatccatcaattggcgtgtgaaagaattaccgcggaatatgatttcttctccaaacaaaccaaattaaaccaaagttcatgaccgacagaacgaaaatgccagagcaagcaaagcaagcatgcatgccgcattttcaagcagtggcagattgcatatcgtggaagaagggccaagcatgcagcatgacacgtcgttttcttgcctcatccaacggcaacgtacaggccggctgctggtccatatgcgcctctccctcctctcttctgctcatgcatgcacgtacatgcatgcatatgctccatcatcgtttcatactatatccgtgtttcaatgtacgaaactgttgattttttttataatcaatctttaactattaattttatttgaaaattttatacaaatataaaagtatttatgtcatgcttgaaaaatatttaatgataaatcaaaacacaataaaataaataataattacatatttttttaataaaataaatgatcaaaaaccaacgacatctagtattaaaaataggaggatatatctcttcctgtcaagcagggcccacaggtcaggatagctagctagtcctgtcgatcgccacgtcgtcgtcaggcacgcatgctgccggcggccagaaacactgcatatcgatctgcaggagtagcactgcagggcagctagctattcccaccgcttctaaattgtaataacatattcgttttatattataaattatttatatttttctctaaataaaaatttaaaattttattaagtttatagaaaaatttagcaacatttacaacgctaaattaatggacctgttcgactggtattttttacagctacatggctgccagctgcacagcaacaagcagcacggctgcagccacacaacacaaattaccgctgcagcctgcagcagcagcagcgctgctgaacggcagccgaacaggcccaattttgttaaatgtaatattgaatatattttaatattatatttgtttcaggttgaaaatgttattatatttttttttataaatttgattaaacttataaattttaactaatagaaaaatcaaagcgattcattaatacgaaacggagggagtattattctaaatctattaggatatatccttcatccaatttcataaatagaaatcagatatcttatttagtttcgtaaccgaaaatacgcttatatttttgaaagtgaaccgatattcgaaacgatcaatacaaatacgaatatcgatgcctaggatgagaaagaattgagatggcaaaagatagcatcacgaggaggatgatgccaaatacgtaggaaggggtgaccgggtgacctgggggaaagagaccaaagagggagcaatggctaagccagctatatgtggcgcatgcaatgccatttttgtcactttgctccttggatcaggggaaaaagaaaccttcttgtgtcactctgtcagtgcttgcatgccaaattgactattgcattatacaaggatttttacatatgcatcccaggtcggtgagcgtgcatcttttatataatctaaaaagaaactctgtaaaatttacttatttatctctaatcaaatttcacacgattgactgattatttggaagattgttactcatgctctaccagaaccgtgcagcccagtctatccgacaggcaaacacactgactgttgagaatataggcatataatgatttaatatattccataaataaatcatgacattacatatgtatactagcattaacgcatcattaaatctacacatgtaaattaaacagtaaaacatgaacagatcaaatacgcgcaacatgtcgaacacgtaccgaggtagcggaaagaccggttgctcggcaggaactactcgcggttgcgagcgtcgacgaaggcgcgcagcacgcgagcggataggaaggcgagccgtcgcgaacgaacaggaagcagtcgcgcgaagcgcttcccaaaaaccttattgccgccttctcccggtgcaggacgtcgaaggcagaggttccggtgacctgctctcctgatcgccggtgcacactggcgagcgggatggagtagtctacgagcgacggcgcaacacagaggaggaggcaaaccctagattgatttcgcgtgtgttgcgtgaaggcggcgacacggtttatatagagataggtggcttgatcaggacgcccgcacgatctccactctgcgtaaccgagccggataagtcacgcgtaacttatccggactctacgccattttcacgcaccggatttttcggaatgtttccaacaacaaaacaaatccgaattttcctgcaacaaaacaaaactgcaaaaagaggctgcatctgcgcaatggtgaggagccaattttacggaccattcgatgcgtacgtcgtgcacgcgcgccgcctgcccaggcaaggcgaggcgagcgagcgcgcgcgtgttccccctcttctctccaccacacatgcttcaagtggctaggagggcatcctcccttttaaggaggtctccctcttctagaataagcaaggtggtactaaactccacatgcatgccatcccatgaggtgggcttttgtgatttcccaaagaattaatcttcgaatgggccttagcccatctattaattccaacaatcccccaccaaatctcaaaatcccactgagatttgccttttccaatgtactgtttatataccagcggttcgatggagaccgattaaggttgaacatccacctagaactccaagctacactaactcacaacttgaacaatggactacgccttgaattgcaagtcttgtgcaagcaagtttcactcagagtcttatctggtactagaccgtctgtagactacccctcgggtggagcgtataagtcatactcctaggtttttagtaagcttcctagaagattcacccaaaatcttaatagactgcggccaacagtcaagcttacaaaggtgagttctttcaagaatgctctgcaggacaacatcttcgctaattaaagccaacagaactcattaaggcatagccaacctgccttgcagctcacgagagtacatgtatcttcacttagagagggtatagattggtactctcctctagtttactaatggtttgttcttcccaggttctaattcacgagatctccgatcacatagactggattaccaccatagtataactcacatgggtctcaaacccatctccttcgatgcattatctatcacatttcgtgatagtcccttcgtgaagggatctgccaggtttcaagctgtttggatgtaatccaacgttataactccggagtttctcaatttcctaacagacttcaatcgtcttttcacatgtctagacgatttcatattatccttagaactattcactttgacaattaccgtttgattgtcacagttcataaggatagccagcaccggtttttcaacaataggcagatccattaatagatcatgcagccattctgcctcaacagtagcagtatccagtgccgtcagttctgcttccatggttgacctcgtcaaaatagtctgtttgcaagacctccacgaaacagcaccaccacccaatgtgaagacatatccactagtggctttgatctcatccacatcagagatccacttagaatcactatatccctctagtaccgcaggatacccagaatagtgaagtcccaattccatagtacctttcagatagcgcattactcgctcaagcgcacgccagtgatcatctcccggattagaggtaaaccagctcaacttgctcacagcaaaggagatatcaggcctagttgcactagccaggtacatcggcgagccaatgatttgggagtattccagttgattcctagcaattctcttgttcttgcgaagcaacaagctaggattataaggtgttggagaaggcttactatcaatgtagccaaagcaattcaagatcttctccacataatgggactgcaaaagtgtaatctcattctcacctctaattagcttaatgtttaagataacatcaactactcccaaatccttcatatcagaatgatttaacctcatttatcacctcaaggtttgtcccaaatatcagtatgtcatcaacatacaagcacagaataactccctcacccccaccatggcgatagtacacacatttatctgcctcattgactgcaaagcctgcagatgtcaatgttttgtcaaatttctcatgtcattgcttaggagcttgtttcagaccatacaaagacttcaacaatttgcacactttgccttcttgaccttcaactacaaacccatcaggttgatccatatagatctcctcatctagctctccattaagaaaagctgtcttaacgtccatttgatgaacgagaagaccatatgaagctgctagggaaagtagcacacgaattgtggtcaatctagcaacaggtgagtaagtgtcaaagaaatcttcgccttcttttttagtatagcccttagcaacaagccgagccttgtacttttcaatagtaccatcaggcctgagcttcttcttgaacacccacttgcaccccacatgtttacacccataggccgctctgtcacctcccaagtcccgttagcgataatggaatccatttcactacggacaacctccttccagtagtctgcatcaggagatgcgtatgcttctgaaattgacttaggagtgtcatccacgaggtacacagtgaaatcgtcaccaaaagacttaaccgtcctttgtcttttgctccttcgaggagcttcactgtcatcctcctcagtgacatgttcatgtgtatgttcagtttgttctggtggtgtgattgaactgagaattatttcagagggttggctagaactactatgtgtatccttcattgggaaaaagctctcaaagaaggtagcatcacgagactccataattgtaccaacatgcatgtcaggtacctcagatttaactattaaaaatctataggcaatgctgtagtgagcatatcccagaaagacacagtccacagtcttaggtccaagtttgcgcttattcgttattgatacgttgactttcgccaagcacccccatgtgcgcaagtaagaaagtgatggttttctcccaatccatatctcatatggtgttttgtccttatttctgttaggaactctgtttaacacatgattcgaggtcaacaatgtctccccccaccatgccttaggtagtcctgcggtgtccaacatggcattcaccaagtcggtcagtgtgcggttcttcctttcagcaatcttattagactcaggagaatagggaggcgtcctctcatgtataatgccatgttcctcacagaataagtcaaactcgtttgagaaaaactctccaccacgatcagacctaagtctttttatctttctgtcaagttgattttcaacttttgccttataaattttaaaatagtctagagcctcgtctttcgttttcaacaagtacacatagcaaaatctagtagcatcatcaatcaacgtcatgaaatatcgttttccacccttcgtcaacaccccattcattttacagagatctgagtgtaagagttctagaggtgccaagtttctctctttagcagccttgtgaggcttgcgaggttgctttgattgcacacaactatggcacttagaacctttgacaatggaaaacttaggaattaaacacatgctggaaagccgagacatcaagccaaaattaatatgacataaacgtgagtgccatacattagcctcatcatccacactgccacaaatatggttcacagacttattgcagaaatcagaaaaggaaaagcagaacaggcctccgcactcataacctttaccaataaaatatctatgtttagacacgactactttattagactcaaaaaccaacttaaatccgtctctagtcagacgggagccactaacaagattcctgtcgatagaagggacatgctgcacgttcttcagctgcacgatctttcccgaagtaaacttcagatctaccgtgccaacaccatgaacagaagcatgtgacccattccctattaggacggtggaaccccatgcgacctgataagaagaaaacaatgagatgtcagcacaaacatgtacattggcccctgtatcaacccaccaattagtagactaattaactgaaaaaacagtaggtaaattaccatacccgcttccatctccagtgttgccaatggtcacattggcagacttagaggtctgccctgcaggtgccttcatccccttgcattgtggacacttcctggccagatggccaggttgaccacacacaaagcaagtcctcttatcctgattaggattgttgttgttgttcttcttcttgaagttggtggtctgctgagctttgtatttccccttgctcttgttctgggccttgtgcacaacattggcagtggactgcccaccatcgcccttagacgcgacatctttttcccgagctttctcctcaacatcaagagacgctatcaacccctcaacggagtattcctgtctcttgtgtttgagtgcagtaccgaaacctctccaagatggaggtagtttcgcaataatgcacccggccacaaatttgtcgggtaagacacacttaaggagttcgagttccttagccatggtttgtatctcatgagcctgttcgactacagaacggttgtcagccatcttgtagtcatgaaactgctccatgatatacagatcattgctagcatcagtagcaccgaatttagtattcagtgcatcccacaactccttagcgtcggtcatatgcatatacacctcgaccagacgatcgccaagcacgctaggaatgcatcccacaaagagagtagtggcctcatcgaattctttctgctgatcagcattaagaacgcccataggcttgccagtactcacctagaagcatttcatagctgtcaaccatagagtgaccctgatctgccatctcttaaagtgcacaccggtaaatttatccggcctcagtgcattggcaaaaccagccatagtaaactcacagtgcctatcataaggtttttggattgttgagaatataggcatataatgatttaatatattccataaataaatcatgacattacagatgtatactagcattaacgcatcattagatctacacatgtaaactaatcagtaaaacatgaacagatcaaatatgcgtaacatgtcgaacacgtaccgaggtggcggaaagaccggttgctcggcaggaattactcgcggttgcgagcatcaacgaaggcgcgcagcacgcgagcggagatgaaggcaagccgtcgcggacgaacaggaaggaagcagtcgtgcgaagcgcttcccaaaaaccttattgccgccttctcccgatgcaggacgtcgaaggcagaggttccgaagacctgctctcccaatcgccggtgcacgctggcgagtgggatggagtagtctacgagcgatggcgcaacacagaggaggaggcaaaccctagattgatttcgtgtgtgttgcgtgaaggtggcggcacagtttatatagagataggtcgcttgatcagggcgcccgcacgatctccactctgcataaccgagccggataagtcgcgcgtaacttatccggactccacgccgttttcacgcaccggatttttcggaatgtttccaacaataaaacaaatccgaattttcctgcagcaaaacaaaactgcaaaaaggaggctgcatctgcgcaagggtgaggagccaactttgcggaccattcgacgcgtacgtcgtgcgcgccgcctgccctgcccaggcgaggcgagcgagcgcgcgcgtgtgttccccctcttctctccaccacacatacttcaagtggctaggagggcatcctcccttttcaggaggcctccctcttctagaataagcaaggtggtactaaactccacatgcatgccatcccatgaggtgggcttttgtgatttcccaaagaattaatcttcgaatgggccttagcccatctattaattccaacactgacacatagcaccccctacacttttattctcacttcgagtaaaatgattaacttggaagtagtattgagcccatccaacaggtagacccacttatactttcattcgacagacatgttcacttacactttcatcatcatttcgtgtaaatggttaacccaaaagcgatatggttggatggacaacccatcctccagaaccgcaaaccaaccatccgtatagcacctcatttacactttcattctcgcttcgtataaaatggttaatccgaaaatggcatgatttccttaaaaaaaggaagtggtatggttggagggcttataagagattctactcttgctcatataaatcaagggcacacaacgctcatgggtaacataggccacatcctaattgaaccgagatatcactcatcacaaattaggctgtgtttggaaccctgggttcccaacccctcccaatcgtattccgcgcgcgtgcttttcaaactgctaaacggtactttttttgcaaaaaaaaatctataggaaagttgcttaaaaaatcaaattgcatgttgggaacaaattattccgaacacagccttaaaatagatcttatcatgaatttgtcatataatataagaaaatagggttaattacttctttcatataatcacatcttatttaattaattttcatccatccttatctccaaccaccttcactcgttacatattcctcatttaagtatttaacgagagatattatagtatattttttcttgtttacctaaacctcttcaaaaatcctaggacattttatattttgtgatacttattaatttgataagttatgtcaaataaggagattctcactcgtgacgaaaaggaattggaaaattttgctagagggtattgtgacttcgcgtttttagttgtagaacaccacacgaagtgatttttaggggaagacactttggaagcgtggaaattagctcatgggaaccgcaaccattagaatattaatttttgattgaataagagagaaatcatgtgaaaattatgaaattaccactgggcccacatgttaggtttgccatctctctatccctatctctctctcgcacatgaacccacatgctgcctgctgtggaaggagaggagctcttgcacgcctagttcattgcatcgccaagcacacaataacaagcctaccttcatcggcaactagttggaattggtgaaccattggatctgactatctgagtaggtgcagctccactttggtcccgttctgctcgtctaccaccacctgcgcctctggccggtcaccgccccaagctcctccttgcatggcgcctgtgggttgtggtaagagtcgtccttcgcacgcgatcttaggtctccaccacttgtggcgtccctgctttcaagacccattgtcgggagctggatcgtcaccctctgactatcttcatcacagtcgcacacccggggggaatggagcccatcctctccatgactctgcttactcccatgtcggtgcatggtttgggccccccctccctcgctgcttacatgctgcagcgtgaaccgtgtggatgcgccacacccataggagcgcgccgatgccgagtggactatgacagatgatgtcgagtaggagctcatctccttccacgatccaccattcccaaccagcatctagctcgcctcgccgtcgccggtcaccgagacactctctcacctttgcctcctgcgagagtgagaggaatagaggaagtagatggggaaaaagatagtagaggcttatatgcggattccatgtacgagagagagaaggatagagagatggcaagcctagcatgtgggcccatgggtaattcagaactttcacacggttttttctcctactcaaccaaaaattaatattctaatggtgtagtgtccacgagctaatttttatgtctatatggtgtcttccctcaaaattaactttgtctgatatcctacaggtaaaaccgtgaattcatgatgttgtctagcaaaatttgctaaatgaattactacctttttgctaaaccaatactactagaagataattcccctgtcaggataaccatcggtcatttatcatgtcattctaatcttgtggctattttgctattggttcctcgacatcggcagaaaattatctcacgttagtttaataattttgcttgcagaagatataactttttttgccccagtactatttttcggcttacggattatgaattatatcacaggcatattattttacttaaaaatcataggcatattttactttttaagctcctaaacaataatttctctaaaaaatttctccatcagccctccgaaagaacatttttatataaaattttcagctttccaatattttatttatttatttatttatttgcgcccttaaataattgttatagactagtttcatcccacacccatcgtgggtcgtgcatcaacactttaggatggcggagaatggaaggcatttgcagtggtcatcagctagtcaagatggtcatttaattcaaacaggtacatcaatgccataaaatttctttgttttggcatatctagaacacatggatttcacaaggcaaaattaaaaagattaagataaagggaatcttttgaattcaggcaaaacaagattgaaatatagttaatcttctcaactcaggccaaaaattctcaattcactggtttacctgctcatagcaatcgtggggaaagtaagaaggcattgagtatgtgagttctgatggatacccgtttgatgtgcttcaggattcgtgcagtcgtcacatgggagtgatgtatagaagctctgtttaacaccaaacttcatctgagaaaattattacttcctccttttcacaatgtaagtcattctagcattacccacattcatatagatgttaatgaatccaggcacacatatatatctagattcattaacatcaatatgaatatgaaaaatgctaaaatgacattgtgaaatggaggtagtacaaccaataagtgaaaatgttactttcaaaacaattattttagacaggagagactagccagacagaaatacagaacaatttgggtaataatcaatgagagaagcagcttattaaatggtttgcctggtgtggaaatagccaacaatagtcatcttacaacagacaccattatttatctatagacacatatggacatcagactagtgtaatactacaagaatttcatagaagactacatcaacatatgtacattttatagccgagaagtaatgtttacgcttcgcagcaaatttatctgcatacaacaacacggtagcagtttggagccttgggagttcattccacgtgtcattgtgagctcaatgaatcaataacattagtaagttgatacaagaagttgatagtgggaagggaactcagcttcccagtttgaaggcatccacaaaaaggcccagacatacgccggctttccagtagttcaccattgcaatcaatgactggaatcgtccaggaggtctactcatcggttttctgtacataagcatgccaattccctctatggcagccactacaacaccagccacaagaacatcccagtcaccagtctgccctaggattgttgccaatgcgttggcggtatagaagccaaacagcacaaggaatatcttcgtgggggagttgcttctggcagagttcagcttttcaagtagttccctcccagcagcttggatgagccttcccagccttgttctaccaagaaagccaccatcatcttcgaagtcttggctatcagcattagatggtccacctgtttccaaggcaaatactggcttccatctagaatttttcatctggtaactatagagtgcagatatcaagtcaactaccaaatcttctgcatagtagagatctgaagaaattgattgcatcaatcttttatcttttctcaatctctacaaaccttcagtcatgaagctaactagtaaataattccacaaaggatggacacatcagcaattcatctactcccatccccaaaagaatataaaattggtaacctgactagtcaaatcttcctaagtttgaccgccactacatagaaaacctatttatatttatcatgtgaaaaaagtataactaaactggctcaagaaatattttggcaccgcaatacatttacagttattttgccaacacatatgacattactatacaaattgatggtccaatttatgcacttgataccatatcatgtccgaagtgtcgtatatttttttaacagatggattacttttattgtttctatttttttattgaaaatagtttatgcatataataggtagataccatataaattgaaaaatgggtactatcagtaacaagattgactgtccacaagttcttattatataatgattacctgccaaattcttgtattttgtatgccttgcggcataataacatttctgtttgaagatgctaaacgagatctaggtaggctacattttgcatccatgtcaccttggagagcacaacttgaacccatgcatttcctaacaacgtgcggtgaaacctaattacacttcattgtctattccattcttttgtttgggtgagcccttattgaattccttttaaacagtcaataatccaacctatgtcaactgaaatgtatttcttcaagtgtccagcttatatcaacaaatatatgattcttcaatataatctgactgatagtcagcaaagatgcattgtataaatgattgaactcatcataaacataaaaagatgtactgaaagctagatctacttatcaatggtgccaccgagtagaaatgtgtatgcaaattaattgtagtagggggaaatgctgttcatagatttaaaactttcgtaaaccagctcctccaaaattcctgttgacagaaaactgacccaaagttctggacgagtccaatggaacccaattcccaattgatttttgggatttttttttttacagaaatactaggtagagaaattcaatacgctggagaagagaagagaagacagcgagcagcggcgtcgggggctaacctgagcgccgctccgcccgtcgtcgccggccacgagaggctgcaggtccggcggaggagcgcgcggccgcagagaccgccgggtgccggccgaagaggggcgcggggagggagggctccgcgccgcagcggcatgaccggcgggcagcggcgccacggggcctctgtcagtctcaaggcggagctaccgcgacggcgacggcggcggcggcggcggcggggtgaggcgatgcgatgcgaagtagcctgtggttgacagtttcgatggtctagaatcgcgccttctgttccgtacgtggatagttgggccgagaacttgttgggctggagcccaactctccagttgcaaaacgtacctgtgggtcagtggcgagtggcttctctccgtcgctaccccggggacgtcgcggcggtcaagcgccgcgaggcgggcctcgcgggcggcgtcggaggcggtgaggatgcggctcgggtgggcgagcggcgggaccgccagcccggcggcgtccctcagcgcgacgcagtggtgcgccgagctgtgcgtgtagtcggacggccggatcggcgccgacgacgacggacgagcactcgccaccgccgccgctttcttcttcccgtcgccgccgccatcatcctcgtacgcgtcaagccgcaccggccaactccaaatcgacgctcaagctcaagctccgccggccagggcggagagggagagggccccgctggcggcgcgaccggcgggggaggaggaggaggaggggaggggaggcgcgcgggcgggtggcggcggctgaggaggaggcgccagctcggagcgggaggcggcggcggcggcggtggcttggagcgggaggcggcggcgttgtcgagaacgggagcgagagacgcgttcggtcgcgagcgagaccgcgtcaaagggcagagaagatgacgattttgagggagaataagttcaccggagattttttaaagtatcttaaccaaaaaaaccaaatatttactcctaaactctcacaaaccgttcactggaggtccctcggtactatttttgtccggtttttctgacgtggcattctagttagcaaaaaaataagaataaatatgtggggaccacatgtaagtgacataaaaatgttaggtcaacaatcctagtcagcactgatattctaaatcgcttttttctttggcgcacagggggagcaacagcgacacgcatccgaaggcaggcggagcagggacgcggcggttcggcgggcgaggtggcggttcgcgagtgcgactgtgatgagcacggcagcgaagcggcggtggagcggtggtagcgggcgagcagcggcttcgggctcgggaggaacaggcggaggggcggcagcggtggcgcggcagcagctggtgccggccggagagggcggagatgaggccggcgggagagggggtggagcgccgcatcggcggtggtggttgagaggacgggcgcctcctccaccgctgcctccctcgcgggaaccgtccagcgcttgccctcggcgcgccagagcacgtggattccacggcagcgggcgccgcggcagggatcgccaccgctatggcggcgcatgtggtgtgaacacccgtcgacgtcatcagccagagcctcatggtgcaggggaacccgtgcccggcctcccactaccgcggcggcctcgacgtcttccgcaagatcgtggccgccgacggcctgtaccgcggcttcggcatgtccatcctaacctacgccccctccaatgtcgtgtggtaggcgacatactcattgtcgtagaagacgatttggaggaggcgcctatcccctcagcccctcctcctccatcgctgctcccccctcttccgccggcgtgacacgtggagaggatgggagagggagaggtggtcgacgggagatgactagatgggggaggggaaaggtggccggctgctgccgtgctcgtcctccgccgctctgcccaccactcgtagaccgttgccgcgctcgctcgccgccagcctcccacattcacgctcgccatcgtcactccgccctccgccggagagaagagagtaaagagaagagaaggtgaagaaaagagaagaaaaaaagatgtgcagctgacatgtgggtcccacttttttaattttattttctaactaagatgccacgtcagcaaaatcggacaaaaatactgccgagggacctccggtgaatggttttgagagtttagggggtccatatttctggttttgtgattaagggacctcaaaaaatctcgttgttaagtggagggacctccggtgaacttattccattttgagggcatgcacgtaatttcacgttggctggagagctcggctccgtgggcttcggtgacgcccactgtgggctgtctgagtagccaaatgtgtaatctggtttgaggccacattggattgtgtagcttgtggcttttgaagttctttaatctatttggagtaaattgaacccacagtacaacaacttggtaggtggatgcgatatagaacaagaacttaagatttgaacgttcgagtacagtaacttgacaattgggtgcgatctagtatataagaacctgatagttcgatattttggtgcatcaacttggctaagcatatgctagatgagttgtttcacgatgtcaatatgctattagacagtaatcctacagatattaccttaaatattgaatttaatctttaagaattatattacatatatagtttacatccaattatctttaagatttttttttgttttcttcatcttctcaaatattaactgaaatataataatttttacatccagtttaattgactttcagttatgggttattaggataaaaatataaatatgcttatacaaatccatgctagtatattgtcaaaataattacttaaaaatgaatctatataaaaaatttctccaaataattaagttgtcgcataatttcttagtttactgtatcaaaatcgtacctatcttaaaagtttttacatttatataatcatttataaagttcttatactaaattgcacctacctattaagttgttatactagaactctcatttctcaagtagttcttataccaaattacacccacctaccaagttgatgcaccgtggatgcaatttactcatctatttggcaccctagtctgaacagatatagtggcgcattggtgtggtaggtggagagtggtgtgtttctatttctttaatgcccttgcaaattccctaatggtcccaacaagtcaccgaaattcaacgcgcgcgaaatgccaaaaaatattggtgctctgtctcatttcttcgcacaccattacaattttattttacagaacctttcctatgaccccaaatttttacactaacgggtacgttcacgtcaggaaaactcatattactgacggtatctcatccacgtcaaggaaaattccaattgttccgacggttttaaaggatcgtcacacaaattattttttctctgacagggttttggactatttgccactctcccgaatggcgtgttctcaaatgccactctcccggatgacttcgctattttgccaccggagatagaagatttcttgcctgtgtgccatttttgagcctgcaaggcaccacgtcactcgatatgaggacaaaataattgtcttaccctttttcttcatttctcctcctgtcattgggctccggtgagctccccgcctcgcactcctccctccttcgctctgctccttaccttcccggcccctactccattccactgcggccaacaccggcccctgtcttttcttttgtggcctcatcggtgcctcaccccatcaccgtcgacttcgcattcctcctcacagctcttctacactctcccccgatgtcggcggctgcgccaggtccaccctcagggcttcccctaccttgtcattctccacccagcgccaggaggtcggttcggcggtggtggtggcggtgtcaccggctcacatacagggaggaaggttggagaagagagacccgagctagaggaagaagaagggcaagacagttattttgcctttggatcgggtgacgtggcgctttgtaggctcaaaaatggcacacgagcaagaaatcttctctctccgatggcaaaatagcgaggacatccgggagagtagcatttaagaacacgccatctgggagaatggcaaatagtctaaaaccccttctctgactggtggttgcatgcatgtcactgagtcagtaaaattagcgaccgtcaggggtattctaatttctgatagtgtaatagaattaaacattctgtgagtgtatgatttaaaaaataataatttaggagagaagagatgttaattaattgtcatgcatgtatttatgttttatattatgaaacacctttaaaaagcatgtgtcctatattttggaatggaggagtactactacatgcaagcgaagatcctacaattcaagcaaagcagtccactaaatcgccgctcgctgtaattgcgtaactaatgatgccgtcaaacaatacatgtacgcacttgattctacaagaactcagaagaaggctgcactacttgcagtttgcagccatctcccggctagagcgggcctggaagacgacggtgggctcgccgaggtcgtcgtcctgaagctccccatccacgtgtcatcgtcgtcgatcgtcgccgtctgtggcgtacgtcgagcaggttcaggggtttcctccgtggcggcgtcgatcaagtataacatgggacactttctcgtcagcccgagcttctgaatgggtcttggattattatttaaaaccaccatgtgtgacacctcatttgtgcttttttttaaaaaaaaaagaaaaaagaaaacagcatcgatgatataattaagtacagactttacaaataagtgcacaaataaagcgaaagggcatatagtatagtggttgcagttatctgagtagcaccccaacgttctaagttcaaatcattatatgagtgaattgtctcaatttaaaatgggaaaaagtacgaattaccccctgaactattgtggttgattgaattaccccctaaattcgaataccaaatatttctcaccctaaacttttaaaactggacgaattacctccctactccaaaccataacggttttggtcctacgtggcatccatgtggcgctaacgtggcaatctaattagaaaaaaattaaaaataacataggccccacatgtcatatggagtagtgcactagtgctaaattgctaatctctctctctctttcttccctctagggtcgcgggtgcgacgtgatggggcgaaaccagacgctgtggtggggacgacggggatggcaggagccgaggaggagctgtgctcgccggcggagaccaaggaggagctgcgtgccggcggatgcggatgaggaacaacgcgtgccggcggaatcgaggaggactcgtcgcggtagaccactcccacttcttccaatgccttcctcggcgccgctcgttgcccgccgcgcaatcctggtgatgccacagcccaccactatcctcgctgcctgtgatatcagagagatgagagagagagagagagatgttgtagccctccccgcgacgcaccacccgccgcctccagcgtcctcctcggcaccacccaccgcccaccgcctccactatcctcctcgacgcggcctaccggccactgctccttccccgttacgcgacaagcttcagcggcggcgtagtaggattttgcgcgaaggcggcaacgagcccgcctcggtctcgagctccctttgcgacagcgggacgtggagcgaggcggcggcggcggcgggatcctccttccctcggtcgcccgagcgacctccgcctccgccgctagcaactgcccccgccctcgcctgctgccattcttggtgtcgtcgtgtgctggtgagctggtgaggagaggagggagaagatagagtggggggaaagattgggatagagatagggtagagagacatagagaggagacgagaactgacaggtggggtccaccgattttttattaaacgaattgctgactggacttccacgtaggaccaaaaccatcgcagattgagctagggggttatttgtccagtttgcatagttgggggtgaaggatgtctgattttgcagttcggggagtaattcactcgaccgtgatagttcggggggtaattcgtactttttcctttaaaatggctgcatacattcagttacatgtgccggttttatttagcaagcacaaaatggatgacccgagtgcacggtgtaggggaaaacatcttctgagtgatcttaactaggggtgggcgttcggtctaaccaaaaatttcggtatcggtcttcggtttttcggtcatttcggtttttgaaaagtcaggaccgaatttcatccaaaaaaatcaggaccgataaatttggtctcggttttttcggtctcggtctcagtctgaccgaatttggaggagccgtgtaacatcctcaaattttaacctaaaatttgactgcatcatgctggcttttgattaaattagtgtgttttaaaaatctatttgattcttaattggttcaagtattacttctttagaaccctactaatttactctaattattccctttactccaaaccttagtgaatttgagcaaattctctcaaatttcaaactatagattattttcttagcttaccctaatattagtgaggatttgctacacttcaaaccctagtgaaaccctttcaaacttatagtttaaattcattctttcctagggaaatattcaaaaattcctaaatttcactgttcatcgcacacaaggtgctcgatgaaatgcccagcttagctagagcagcccaaccaccacccaatcttgtgcaaagtctagaattgatcctaggggaccacaccccactcaaaaaccgtggatttctttgcttcttcctccccttcacacgcgccgcgcgggcatccgacttagccgcgcgccgtgtcgccacgcgtcggcctcgggaccgcttgcgcgtgcccgaccgccttggcgcgccgtcgcccgtccgacgccctcagaccgccgccgccgcaccaatcttgacgacgacaaagccgggatgactaccgccgcaagaaatcgtcgctcgacgccgtgcgctccaatccaagccgctgtcgagtgcgatttcgcttctacccgggatgaatcgcgccaattctttccacacggttggattgaagatagacggtggtatcccctctcacaattcaaaccattcacccccgagtcggccgttttcaccctcgccgccaccgcgcgtcgtgcccggattggcgccaacacgtcgccagccgatttcacacgcggtcaagccaatccttcgctggtaagtattcaaacgtggcctcctgccactcaaagtgatcttggccgccctctcgcagcctctgctgccccagccatatccaatctttgagctcatccatggcgatgacggtgttcgagctcatccgctcctcctagccctataaataggaccccaatcccttccttgtccatcatcgatcatcaacaaccataaccccacaaccccgaagctctgcttcaccaatccatctcatcaaccaccatcgcccgtcggtcgaacaccttgtgcgcgatcgactccacacccctccatccatcctccgccctaaatacctcttagaacaccttatatcaactatgttctagtatattagaccctaaccgaagccctgcatcgagttttacctcgccgcaccaagccgagcaccgccgcccccgcgctgctctattcttcgccgccgagaagtttttccgaccgtaatccttcatctcggcatatctcggtgagttcttccgtttcaaccatctatgtactccctagattccattttagcaatccctttgcactaccatgccaccctctgggctgccgacgtgagcacggccaaggcctatggaggcgctcgtcggcaagtattctccgcgccttgccaaagattgacaagctatcagaatctatctaggtacctcgtagatgctctagaacccctcccctagccatgtctaactcatatcacctcgatcactattacggcctaactgtaccaccgccgccctagtcgctagcctatccatacatcaaattaacccctccgccgccgctcgccatcgccggagaaccccagctccctcccctccttggctgcaacccctttccccctccatcgccgccgtaatcgctaaccctagcgccgccggcccgatttggggaacggccggaggtagaagaagagaagagagagagactaacaggtgggacccgcacatagtaacatttcacttttagttgattttcaaactttagaagcccatatcttttaaaatatatatccaattccagtgaaacttggaccaatattcttctaaaatcattctctatcttttgagcccctttttgctatttttacattttattttattttctctatttttcttatttttggatttaatttgaatttcttttgaatttgaattttatatgtctaaccctaggtcttgaggattcttctgactcaatagataatatcaatcaatctcaggacaacgagcaagggaagttaccatataccttttgatcatttaagcctatattttacaaattatttatttatagccttatatccaatattctattttctatgcataaatcaatcatagaaacccagataatttagtattgcttactttgcttacaatctggttaaaataccttatacttagattgggagagtaagtaagatttggttgatttccgggtggctagtactgtctcgatcgatataagttttaccaggtacttatgtcgaacgaacgggtacgaccgcagtttctagaatagggacatacctagttattatgttaattagcaatatggcacctctgtatagtggttcttatttttaagtcctcacacaggaggcaactatagccgcgaagggcaactttaaccattaccatgtacaggtaaatggtttgtgatagtcgactataaactatatggtatatttctaaaccctgatcgagatgacgtggtgtcatatgatcagttccccttaaatacctcgggaatgccagaactcctcttgctgctgttaacaacacatttagagcatatgaggatatgagttcatggaacaggtgccacaattgttaatgacttaatattgggccatgactaaagccgatgattatcagcaagtcgtggactgcgggtaaagcgtacatctgctgcagtagaatatctttgaaactattcgaatagccgtactcatggagttgagtaccgggactcatatggtaccctggttagaaatctaaagtctatatgttttataaattctaactataactttcctagattgtttattactgctttttgcaaagaaccctactatatactaatgcataacatatttccatgataacttactgagtgttgcgaatactcatccttgctcttataacccctttttcagatctgggtcaagagaaggacccttatgactattactatgatgaccctgataacttagagaatccctaaaggtcatatctccctagtcagaatgtatagaaacttctgctgtgtattaattagttaggtgagtacctattattataaaacccttagtattgtaaaactttaacgtatgcaatgaagaaccagttatactgtatatatcaatatttactgatctagggattgatacattaattctagtcagatccaagtttttagtttcgggctccgacaagccaaggcagggccagctgtaggtggcacacgctgtcgacgccgatacggtggtggtcggtgggagtacggtcgtggtggaggcggaggatggatccggcggccggcgaggcagcgtggaggcggagggcggagacggcgccggcgatgtggaggcggaggtggcggcgcggcgcgatggatccggcagccgctggcccggtgcgaccggagaggcggcgcggaggcggagggtggagacggcaccggcgatgtggaggcggagggcggaggcggaggcggcggcggcggcgtgggatggatggggatgcggagggctgagggcggtggcagcggaagcgtggcgcgatggaggcggtggcggaggcggaggcggtgcggccgcgcgggatggaaacgagggcagcgcgatggggatgcggagccggagggtagcgcgatgggatggatggggatgcggcctgcgggtggcctctagggtttagtgatgtattgggcttattgggcctcctagacctattgggacacaattcggtttctcggttaattcggttaactgatcccaataaccgaattacccgaacaaatttcggtctttgacaggctgagaccgaattactaactgaatttctcggtctcggtcttattctgcccacccctaatcttaaccacctactctctccatccctaaatataagattttgattggatatgacatatcataatacaacgaatttggatatactccctccgtttcacaatgtaagtcattctagcatttcccatattcatattgatgttaatgaatttagacatatatatctatttagattggaaaatgctagaataacttaccttgtgaaacggagaaagtactaccgtccgtaaatataagggattttggttggatgtgacacattctagtacatgtgtcatatctaacatgtattaatctaacatgtattaaatctaaccaaaattctttatatttagggagagagagagtaatctttttatctctcaaacattctgtttgctctttccccagctctctcaaggcccagccggcggaaattcacgttgctcctggtgcattggacaactagttttagaactgtaccgcactaaaattttctccctcgaaaaaaaatatattcacgttgtttttctgtaccttctacacgactcacgaaacagatcggccggagaacaagccgatgcaagtaggggtgggcacaaaaataccgaaccgaaagaccgaactgaaaatatcgagaccaaaaccgaaaaaaccgataccgagaaattcggtcatcaattcggtcttaggtagtgaaagaccgaattttgttcggtcaattcggttagtctcctcgggtaaccgaatagaccgaattatcaaaaatgtctaaatgcaacctataatccagtatgtttaataggattaaactctaattttcacatccctacttcttcttggcatgcaacctaataggagtctttactcatgagtgcttacgaattttttttgtgatttttgtgttgaaaaattccattatttctttgcatatatgaaaacgttgttgaatttcggtcaggaccgagaccgagaccgaatttgttgatcctgacatttttcgctgaaattcggtcttcacttttcaaagaccgaaaagaccaaagaccgagatcgaaattttcgattggaccgaattcccacccctggatgcaacgaagcagtgctactcaaagtaaacagtccgatcgatcatcaatcatgccagaaatttaagaattcaacccagcgtttcaggccgaatataatccaaaattttcaaatcaaccatctactactccgtcataaaaaaatacaaactctagctacgaatctgaaaatacgtgtctaggttattaattaggattagactttttttttgagacggatagagtacatatgcaagcaaatactctctttgaccttaaatatttaacgccgttgatttttttaaatatgtttaaccgttcgtcttatttaaaaatttaagtaattattaattcttttcatatcatttaatgcattgttaaatatacttttatttatacatagagttttatatattttacaaaagtttttaataagacgaacggtcaaatctataactaatataaatattcggatttttccggtcgtcacctcatccatacggtgatttttcgtccctcccccccaaaaaaaaaaacctagccggaatttcatcatcacacaagtagaatcccacattgagcacaccttctctccaatctcaaatcatcacaatccaaatccaaatcaaaagctaaatcccagtccaaatataaatcgaaatcattagaaaacatcatattaacacgagatgactaggagagggaggggcgagccggaccggaggctgcagcgcgttgctgctcgccacctcgccgtcggccacggacccacccgccaacgccgccgacaccgccatcgccgccggatcaggggcaggagggaggcgaaaggggagaagggagccgccgccggccagcgaccgccaccacctccggatccaccggcggctaccacagccgctgccgccaccacctcgggatctgccgagagagtggtgcggcggccaccgctcaacgaggagagaaggagccggcggtggggagagggagcggcgccaccatcgccgcgccgccgcagccgtccgccgcgagggagtgtgccgccgctgccaccgctgctcgcaggagggcagggcgccgctgccgccgtcgtcgccgctgctcagtggggaaggccgccggcggtggggaggggggcaagaggcgtcgccggttggggaggagcgtagagaggtgcgccggtgggggtgtggtgcggccgccggcggggagagaggcggcctgcgtggaggggaggaagggaaagaatgaaattagggttaaggtttatttgggttaggggttttgatagatttggagtcgatctgagccgtccatcaaaacgaacggcttagatcgctcccgcgtcggaccggcctccatcatcgggctgcatcagtgatgggctgcacgcacttcatgggccgcacttaggtcggccgacccaacaaaaacttaaattagatttccaattaaataattgttaaataatgtttgtattattaaaattagcaattaagctctgaaaattccaataaaatttcaaagagcgaaactaatcatggagaatttaataaaattaaatttaaccatatcattttatttaattatatacatacctacttaaaaataccaaatattttagtgaatttatattttaattaattgcatattcttctgctgtacgcttcccgttgcaacgcacaggtgcttttgctaaaccaaacaacacttttggtcaatatacacactccgtaatcacccggtgcaacgcacgggcacttttgctagtatatttaaaaagattaacagtatcaactatttaggaacggagggagtatatattttacattcatcgagcaaagctactcgatcaatcagccattcagccatcgtgaggtcaatcgaataatcccattaaacaatctacatgcatgtatgtactcaagattcttcataaatttcagaaggtttcgtccgtgccgtcagtcatgtccacctgttcttgccgttgcagttgctcctcgtctacgtcgtcgccggcgagcacggcggcggcctcgtacgagtcctcctccggtggcacgtgctctcctccggagccctgcgccgccgcttcttgctcttcctggcgcgtgctgccgtctgcctcgccgaacaagcggtacaacacgcgctgatgctccggtgaaagctggttgccgtcgtggaagtccgctgccgccatgtcatcttgttggtgctcctcctcgtcgtatgcgccgccgtactcgccgtccatgtaatagtagctgtcgtagtacgtgtcatccgcagcaatctgctctccggagatctcttgcgccgccggcgtgtcgtcgtcgtgcgtgtagctctgatcatctgcatctgcctcgccggagaagtgccggggaaagagctccaacaaaaccggtcgtcctcgtccggcgccaccttcttccgccgccgcagagtccgcgtcgtccttgcctgcgtactcctcggtcgccatgagtatcgactctgcgtgctcctcccgtcctccgcgacatcgtcgtcgtagcatcgccccggcgcgccgcgagcgtcgccgacgtcgacgtcgtcctcttcggaagcacggaggcgcttccggcatcgcacctcgccggggtccaagaacatgaacaacgagtgatcttgctccagatcaccgtcgagttcgcggccgtcggcctcggggttcgatccagggaaggatgcctctgcatcgccatccagaccaccgtcgaggtcggcggcggcgttcggttctgggaagtagggtggctgaggcagaggctcgccgtggagatggacgatgtggtcgtcgtcttcggcggggggatcggcgttgaggtcgcgcaaggacggcggagctggatccagtggcgaagctagagagaaataagggggtgcactacatcatcacatataaatgacaatgtacagaattttcaagcaatattatactagttaatatatttttcaatagtctcattagcatagcataagtggcgatggtacaccgacaaaggaacactgacaaaaagaacgtaccataccgagatgaataaaaccactaatatttggaaatacaccacctgtcctcaatatcttgcaacaaaggataatataaacatattaagtttccattgtaaactatagaaaaaccatgtgaaaacaaacaaattaccttttcataaatcataaattatatttgggctctgtcatgttcataaaacgatgaaccacagcttcgttggtgactttcttcatttcttctttttctatatagcaaataaggctatgactcaagtagtcatcaccgatgcgattacgcaaagaacttttcacaatcttcatagctgaaaaacacctctcaaccgtcgcagtggcaacaggcaatactagaactagcttcaaaagtcaataaactaaaggatagcaaagatgtttccttgtctctaccaacttttgtgaaagctcaccaatagtttgtatgttggagaatctatcatcttctcgcacatcagcggtgtagagacaaagatgatgcctaagatctcttaattccccagaattaaaatcattaggataaagttttgctagtctcatcaagttctcaacattaaaatcatggaatgattctcttgggctaaaggcagctgagcaaagaagcaattcagatgatgtctcattgaaacgactatcaagctcttgaagtagccaatcaataacatcattaaaacaatccacttcataatggtgttggtttgtaattcctgtcttttgcctctgtttctttggattgacatatgcttctcccatctcaagcttgatgatatcatatttgtcacaaaaagcatacacatcaccaagtaaattttcccacccatctcttctcaaatcatccaaatggcacctagttgatttgacacacttaacagcattcacaatatcttgatctttcctttgcaacgctaatgacagggtgttagtgataattaatatagttgacataagatgcaaatagaagacaaactcaaaagattggaaatacactagaagaccatttgcttgatctctatttgttctatctttgtcatctttttccacaaattctagcactttgactattgttgggaacatgtcaagcaaacttttgagagttttgtagtgagaactccaacgagtatctcctggtctttgaaggcattgctcttgatttaacccagttccagtttgaagcatcccacaacctaatgccttgcatatttgttcataatttatttctctaatcatgtctcttctcttagatgatccacccaccacattcaacaaagtagatatcatagtaaagaaattactaatgcctttatgtttttctcacaatggctacaacaactaattgaagttggtgagcaaaacagtgaacataataagctgaactactttccctcatgatcaatgattttaatccattgaactcacctcgcatattgctagcaccgtcatatccttggcctctaacttgcttcaaactgagcttaaagcctgcaaatagagaatcaatcgcagccttgagataggaagaagttgtttccttcacatgaacaacctcaataaatctctctttcacaaatccacacttatcaacatatctcaacaccactgccatttgttccttgtaggacacatctctagactcatcaactagcaaacaaaacacatcatgcccaagttcttccatgatagaatgtaatatttccttcgcaaaacactcaacaatgtccttctgaatatcagaagatgtcataagactattccctgctccatatttacccactgccttccctaaagcatgatcatgctctaatagcatatcatgaaactccaagaagttccctttgttgtaggaatccttggactcatcatagcctcggaaaggtaatccttgcttcaataaccttctagcaacactaattgaaccatttaaacgagtaaaataagcctttttagcatcttcactttgaatctgaaaagcaacattaatatgttgagatgtttgtaacaaagcatcacaatttttcattgcttgattatgtaaactaccaactccaccgacatgctctttcagcctgctttttctatgccaaccattccaaccttctgtaacaaatgctttgtatccatcctccttcttattgcagtctctaaataagaaaaaaaagaacaatatgctttgtctttggcctcactatattcaagccagccaccaaactcatcaaaccattccgggataaagcttctatttctgtctgatatctttgtagttggaaaattgagtgtacgaggttggcaaggaccattctctaggtactttcttcttaccctatctctcaggttaggatgataagcatcaatcggtttcctcaatccaggatcatatttgatctcctctttccaattgagatcatttacttctggacaggaagtccttgcattgttgctgctatcaggcacttttcttttaaggtaattctccataataaagttcacctatcattcatagcactagaaattataatatataactttaattttactccaaatcaccaaatgaccaaaccctaaccatttaaccaatataatacgaagaatcgggcaatcagccaagtaatgaagtaacctgaacatatctttcaaatataaaagtttacttacagcaaatcaaattaatcttaaagaatttgagacttgagagcacagtggaggtagaggtcttaccttgcctattgttgcgttgccctattgtgagcaggggcttgattgcttgaattaatctccagatgtagtggcatgtggccggcgaggcggcggcggcggcgacgacgacggcaacggcaacggcctcgaccaccgtcgaggtcggcggcggcttcggttctgggaagtagggtggctgaggcagaggctcgccgtggagatggacgatgtggtcgtcgtcttcggcggggggatcggcgttgaggtcacgcaaggacggcggagctggatgcctggatccatggcgcggcgcgagttgttgatcgagcacctgcgcgcaggtggatgcaggggcgagaggttggaggaggtgggacgacagaaattcaaatatataggtgcgccatatgggcttcttcctcgtgtcggagtcggagtcggagtccgtattccatggggtcattgaactatttggcatttaactatttgccacccctatctcaatgacatgtgggtctacatgtatctatgacatgtgggtccaatggcaaatcgttaattaccacatctaaaagtgacaaatagttaaatatctcgtattaatatcatggcgagttgttgatcgattgagcatgagagggtgggtggggctaacgcgcgggtgatcgcatcgcatctccgtgtcccccgggccccggctatgtgggtagattgattttgaaaataaagttgggaatatatttttttaaaaaaaactacaaataagggaaaattaattctttctaaaaatatacattattcgtataaattttacccatataaaaaatatatatgcagaatcttctgatatagctccattctgaatatataacatttgaatccgaatcagaattcaaatttaaattgggcatataaatttttagagcataaacttttggtatataaatttaggagtactcttgacaggctataccgtcgagtatggggatagttggtggtaaggtatggacgagattgtggtaaaagagacgacggaagatcgtgatttttatacacgttcaagccctctaattacaggttttctgtctataaatgtcttaccaaatccatatttttggattatatttttctaaaactagaatgcccctttcatatttatgtgccaacttattgagaaacacagttctcatgtgaaaaattcattcataaaaaactaaatagaatcatttggaaaaaaataaaaactaaaattttaaaaaaatttcaaatcatttttttgaattcatacaacattttcaccaaaattcgagaacaggtaaaaataattttagttttaaaattctcagtgaaacttttgtatgaattttatcaatttttaaaatttgttaaaatatttttttcttttcaaatttgtggtcaaataatattttcctttgattttattataactaaaaatttcacattcagatatactccaccgtttcatattatataatgttttgacttttttatagcaaacttcattgagtttaaccatatttatagaaaacataataatatatataatatcaaattaatttttatacattgaatattatttctctaaaaataatgatatgttttttataagtttgaccaaaattaaagaagtttgacttataaaaagataaacatcttacattaatataaaacggatggggtgtattcttaagtaggtagcgcataagaaattcagaataggagaagaacaatatagttattttaaaattttgtagcagtcaacaactgatggaaagaaattcaaaggcatatagccaccggacaaaactttatttttaactaggaagatagcccgcgcattcgcgcgggcatgtgcattagtttgttccgaaaatagttctaaaaaataaaaaattaaagtaatgtattttctactgttaattgattatttattatatctctttttcgtgaagaaatctcgacaaactttcattggtttgaaatatatttttttaccattctgctagccctctctttaattgcttcatatacatgcaatttttatgcatgtgaatcaataaagatagaaaatttcttttaaaaaatatttattgtattttgaatttagtgattgagggattcttaattcgactttgtattcaaatcaaattactttattctaaattgtctttttagggattttaaattgcacttaatctcgtatcgtgggggcttttaactatttgccattcttacgagtggtgcttaacgatttgccattaggcccacatgtcatagacacatgagggcccacatgtcattgacagggtatggcaaatcgttaattgccatgtcacaagagtggcaaatagttaaatttccccgtatcgtgctgtatttgatctcttcttttaatacttattttattattccaaattttagatatttataacttatacttttatagtgactcttgatattttatattctacatggaatcttgttatatttttttatagttttagtgtttttttaatttttgtttgtgtattttaatcaaattgtttgttttatatttttgttctgaatttaattacaaactccttgtggtgatccgcctgtcaccatcagcctcgcggatcattgttgacctcctcatcagtgagcctctcttgatacattagacaggacgtggcggggctcggtggcaaagatgaagctattttctagtccttgtcgaagacatggaacgtctccctctgcccctcccccccccctcctcttagtccttgcccttcatctaatcatttagtgcgttattaggtccaggaacttgtagaagtcgatgatgccgctaccgtcagtatccacctcgctaataatgtcttgtagctccgccttcatcgggttcatgcccagagtttgcattctggttccaagcttcttggtggtgattgaacttggatttagacccacacatttgaattcattcatcattttcgaagtgctattttgctcaaatatttgtagtcagaatagcagcattatctaacttctatatagtaaatatgggcaatatggatcttgaatttaattataaataatacaaaaagtcaaataaactgtgaaaagtacatgtaacttgagagtcatgatcatttagctattattatttttctatatattatgtgttaggtagaaaataggataagttatattaaaaataggatatgagaattggatcctagagatgagtaggacggtggaggtacgtacgtacatgcatgctcacatacggtaggggtggaggtgggggtaccggatttatttttgtgagatgtagcagttataattattggatctacctatttaaaggaaaatcaatggtttgatttttttatcataatttctaggaacttttaatttatttgagcactatatggtgtcttatgagtggttttagaaaaccatgtgacagtttaagaggatctgtagggagtttaatgattttttagtatataatagatagttaatatagcattttttggttctttatgtactgaactgctcactagaaaatatggataagaaagtgagcaggagagataataggagatcatttacgatggcatgatatatgttactatttagttgcgataaaggggtttatgtcaaatgatatgtttcttatatatgtacataccaaaatatggtaaacatagttcaaattaaaatcgaatatattataagatattctaattatttagttgttgtgttttttatatataaaattttgctaccataaatggaatgaagaagagaggggcggggagacatacgtactttggatgtaggtacatgttaggagatgagggacctagggagaggtgtggacgtacgtgacatttgtttttttacatatatagatctaatggtgtgtaaagagaaaataaatggtacgatgttttctttttttttctggaatttcttagatttctctaatttatcagagcgtcacgtggcggctcagaagcgtttgtaggagccacatggtggcttaagagtgtttttaaaaagtttaatggacttactcgtacgatgtctatttgtagggatttttttcataaggatagaaaaagaagaaagaaacaaagataaaaaaaaaagaagggaagatagggagcgtacaatacgcatcctgcacggaggtagggacggcaggagtttttttttccgttaaagataatctaatgatccaaaataatgagcccatctatttaagtgaaaatcgatggtcagatttctctattttattagaatgccacgcggcgactcgggagtatttttaggatgccacgtggcggtttgagagtgtttgtaggaagtttaatggtcttttagtatataatagatagataccaacgagacaaaactcaaagatatgaataaaatagatagagtgaaactcatgaacatatgaccaatatatgacaaacattcctagtctcctagccaataacttgtcaacatcttttggtactgttcaacaggcatgtttcgttttcgtgtatggagaaatctagccgcgtcgtggcaccaaagctatctatcatgcatggttattgtgccatggttgccagcatgcaattgcatagacataacttgcctttgctcctcaacctccggctcaatgcttgctttccctttcttcttacctatcctaagttcgtcagcaaatctaatcttctttcactctaagcaactgaacagcgcttttactttttctgataaatatatttaattttgataacatttaatttctcttaatctagagacggtacagtacagaaacacacaacacatatatacgtgtatataaagtacatccacgcaaaagaagaaaagcaagaaaaaaaaaccacaaaatatatacatgtgagcacgtactccattgatctcttttttagatcttttacataaacacttgaatagtatacgtacttgacatcatgcaaccaaacgtatatttatacgagtacacgtacacaggacacacggatatatactgattaagacatgtaattaatcgattaattaattcttaattcataccaagcgtccattgcccattattgcaagcttaccctgctcacggaagatgaacagatgatgatgatctaggccagctacggcgcgccgccgcccaccgtcgccgtcttcttctccttctccggcgcgtccgcgtctacggcgacgtgcccccggctgctcggcccggacggcgggatgcgccatgaccgccagtcgaggtcgtcgtcgccgtcatccccgccgccgccgccgccgccgtgctccttcctccccggccgatggcgaagcacgcggcgccacggcacctccgccgccgccgacgccatggcatgccggcgctgatcatctgctgctccttcctctgcgctcgcctgcaggaaggctaggccggcggcggccatggccgccatggccagaatgagagctaagagcttcttcgagctcatcatcgcttgcatattggagtagtatatattaatataggcaataaatatattcacactactaaactatagctagttaactatatgaaatatgatcgatcttaagtttatatttgaccctagaggttttcaaatgtggcgatagattgcattgatcgagaaatgggggcatatatatatacacacacacactgacacacaaaagaagagagcaataaaaatgcaattaggagagagagagagatgtttaattggtacgtgaaggcagagctaatatgtgtgtgtgctggtagttagaaggtaataattaaattgctggtgaatcaagggaagaagaaattaaagagagaggagtggttacacgtggttccttgctttcggtcaataaagcgatgagtttcttgcaagttggcatgtacatacatataaaacatacgcatgcatgcatatatatgacatagatcgatccggccggtcgatcgatcatttcgtctctttcgcatcgtatcttggaattatgttagcttgtttaattccttctctatgtggaggaagccacttttgatttgatactgttctctagctagcgagaaaataattggaaaaaaattggaaatagagccgatttgtgcaccgcgcaattaagaaaaaagaaatagcgaatgactctttgttgatcttcatacaattggtatcaaaagaacaagttttttttaattacacgacagacttacacgcacacacgccactacacgtgcaacaccattttcacaccctcgcgaatgcgtcccctagcacatgctctaagcgatggaaaccagcggcacatactgatctcactaaagttctgttgaaaaccaacttgcatatgcgtaatttttgtgagcaccaggatttgaaccatagtgggtagagttacgcacccacgactctaccaccacaccactggtgcttccccagaagaacaagtaatttattcgtgagagtggtagcatttatttggcaatgaacaaattaaatgtgcaaaatatccaaaagaataaatttatctttccttgccatgcacgaatcttagcgtggatagcatggccagagtgaaccttagacaacatccgacgactaaaaaattgcacgattttagcaattgaatttctgtcaaggtaacaattctgtggatttagttgttgtcccagtggtacaaaggcatatgtttgttttccccgtgtgtgtgcatggggagaaattcgaacgagaccctttttccccctaaatggaaatagtgataattcgaacaaattaaccttgcttctctgctactgtaacatgtacaatattcaacgcacgtgaagagaagtaaattagtcggtgctctttaaactcgttgtgaagattatggataccccatacccacatgacatgtatatctgactgggtataggggtactatatgtagatagaatatctttaaaggacttggattaatttcctaacttgtgtatcaaggaaatatccgagaatcttagtcggttacgattgtaatttatctttatccgtctattccgttaggaatatgggatgtatcttgtaatacggactcctccccctatataaggaggggttcggatgcctcttggggcataactttttctcccagatcatacgatcaataatacactcggcggatcaatccccggacaggagtagggtattacttctcattgagaggccctgaacctgtataaatctcttgtcttcaaacccatccatttttcctgcttgatagccatccttttttattgccgaaatcttgtttcgacactcgtcatctacatacacagcctaatgctttgctgtaaagattgcaaaggtacaacatttgaagaaattaaagtccaattaagctagacattgccttttgcctccctgtaagaacgaaaacagcttgcttacgttaaaaccggccactaattcgggctagttgtcgtttgtgcgcttgaattgtaccatgagtccatgagcacggccatcactcatcaacatttgctttatctacgaataaagcaaggttaggagttgggaatgcatgggccggtcagcaaattaatttgggttatgacattatttaggcccattttgcaccaggcccactctatccttgccaactttatgttaagctcctagggcttgatcatacgtggtttaaatcatcaccgtgctgccaaaaacccaaaagaaaagtcggagattttattattgagtgaatacgcagacagcatccgtaagtaagggggtgtttagatcacatcccaaaattttacgccctgtcatatcgaacgtttaaacacctacatgaagtattaaatataggctaaaaaataaccaattgcacagattgcgactaatttgcgagacaattcttttaagcctaattgctccatgatttggcaatgtggtgctacagtaaacatttgctaataacggattaattaggcttaataaattcatctcgcagtttactggcggattttgtaatttgttgttattagactacgtttaatatttcaaatgtgtgtccatatatctgatgtgacacggcaaaaattttcacccctagatttaaacacagcctaatatagaatcaaattagatacgtttcacgtttcagtactatgaatttgaacatatcacatgctcatatcaaaatttataatattaaaatatgtctaatctgatgttaagtaattatattttacgacggaggaagaactagtagctaaataaaaagagagataacggtgtgtttagtttagaaatttagttcgaaagtttaaatttcttatttaaaaaaaaacacttgtaccaatgaatactgatgagtattttttttttctttttacaaaatgttactatagattagaatgtgtgacccgtgataatcccatgttcgattagctgaaaaagtagaacccaatctagcactctctctattttaggttagaagacgttttaattttagctaaagtcaaactgtttttttaagtttgaccaagcttttgaacaaaataataacatttttaatccaagttaaatttactatgaatatattcaattattgatttgatgaaactaattaaatattataagtgatactatgtttgtttatagatttagttaaacttaaaacaaatcaaaaactcatcctgacgcatctctgaacacaagatgacgcattgtgccaaaagacacgctcgtgtagcagcgcagcatcgatcagcagcgtccagtgccatcactgcctgctaccacctgctgcctgcatttaatcaccgaccttacaccagcagcagtccaccaccccgccgcttccccgcaaaaacaaaaaaaaaaagaaaaggagagaaaaaaactcctttccgccaccctccccttcccctctctctctctctctctctctcacgcagccgaatcgcgaggagagattccatttccccaccatggcctccctcctcctcctcctcctcctcgtgctctccctcgccgccgtccacaccgacgcggccgcgttcccgtcgccggcaggtgcccgcccaacccagccaccttcttctcccgccgcgccgcggtttgtttgggggtggcggcggcgtgcaatgggcggggatatattcgatcctgacattgtttttgtgggggggattttctgcagatagcatcgtgaggcagctgtcgtcggtggtgaaatggccgcgggttccttcgtcgtcgtcgtcgtcgtcgcacgggcacaagcagccctcgcacccgcagtacggtgagcgccatagctgccgacttggtttgctagttgctactgttccagggtttatttactagtagtagtagtcagcagcgcaagttcgattagttggcggagtggtgatttgacgatttattaggttatttttgcttgtttctggctttctgcagttcggacgacttaccttgtgattactgattagcaagtgtgttagtatcagtatgttgggtggtgtctcttgtgaggaagtgagtttaaccagagtattcttaagatgaccaagctcaccaaacatacccagtgttttgtattatattgtctatgcttgcatttttgtttacttgagttcaaatgccactctgtgcgtgtgacctaagcaaaacaatgtttactgcctatgttcaatttcatgcatcctcacatcactaaagtgaacttaggggcttccagatctagcagagtgcatcattttatttagtgaatgtgtttgtggacagcacgtgttttttcattatcattattttgtgtccttgtatgctgatggtgtttctctgatgcggcagatgggggtgtggctctgcagtttgagagcggctactttgtggagacgctcgtggaaggggacaagcttggcgtcacgccacacaccattagggtgtcccctgttgagggtggagagctccttgcagtggactcggcacatagcaacattgtgcgaataactccgccactgtccgagtgtatgttttcttcttgccatcctcagctcagcgcttccttggttattttaaatatgaatgtaatatatgacatggaacattttttggtgtgtcatccagcggactgtttttaggagtgatcagagtttgttccttctttccccaaaggcatgaaactttaaaattagctttgttaaacatatcagtggctaataagcatatatgcaaatatttttttttcattttcttcttatgtagctctaatgaatttatataccaatttttaaataattgatatttccatgaaaataatgtcatctatttcgaagatttaggaataccttctttttactgaatttaggaatccatgcataaaatcggttttcaggtagtgagagatggagagagaacttcacatttgtttgtgctcaggggaatatcatctagtactagtagtgtagatactagatactgggactgatattacaacctctgcagatagcagaggaagactggttgctggttctttccaggggcattctggccatatagatggcaaaccaagtgatgcacgattcaaacgccccacaggcgttgccgtggatgatacaggaaatgtctatgttgctgatacagcaaacttagcaattcggaagattggggaatcaggtgtgctacaatttaatgttacatctgttctcaaagcagctgtgacttttgacctaatacaaactcttacctctgtttgcaatatatatgtaaatacctacatgtacagtattattattgtactttgtatgcaaatatgaaagttcattttcattttacctaattaattatttaaatttattattggtcgatgtttgaactgtgaaagccaaatgtgacagctatttagaaacagaaggatgacatatgtattttatgcattatttctgtgttagtactaggcgaatgaagtgaatgaactttctgtgcaggagtgaccaccattgctggtggaaaatcaaacatcccaggttatagggatggtccaagtgaagatgcaaagttctctactgattttgatgtggtatatgtgaagaaaatgtgctctttgctggttattgaccgtggaaatgctgcacttaggaaaattgcccttccgcaagaagattgtacctaccaggatgcaactcttctatcgtcaggtccattctcctatttttactttttatgtttgtaatctttacatctagatgtttttgcttgttgtcctatccgtcatgttctttagaacattaagaaaatgttgtttatgttagagagagagagaggagttagctggctgaatatttgaggcagttttgaacaagaaaagggtttccgggccttattttaagttttgtgctaattctgtttggtggtgctatccttgaatttttatggatgattaattgatcaccacacagttttcttctttacatcaagtgtggctcactcgaccgctttggtcccaatacatgcgttctgatttttttattattattttaaagttgtgatgtgaaatgatatctgaattggaagttggtaaaattgctagatgttttttacttcatgtatccctgtatttataattctatggtagcatactgatttgtcaagttgaaccagaagtaatattattagtgccatatcagtaatgtagatctagcacgcgccataagaaaacatagtctgtagcagatcttttgaacatacggatcgctataaatgaatttgttgattgaatacaagtgtagtatagaccatgactttctcaaccatttataacgagatatgccatcctggaactggcataatagtatcaaataaattgtggatgggcatgctatggccagtgatttgcagctttcttagtgagccatctgtaattttatatcatattttgggcctcttcctctatttagacttttggagtttgcatgataaatcttgtttagaaagctgagttacttgagtaaatgactagttttttttcataatccctaagagactctttttttctagaggtaataatgcagttggtgttgtgtttgtgtttctggctgaatcatttatatttctacactaacttatcttaaattatgactgtatgacaccagagctgtagggatttacaattattttcatgttcatttacctgttgaacatgttagtttttatcattagttcacttcttgctgcagtttatgtaccatttttcaaaagaaaaagaacatgtctagacttgatcactgattttgtttattttcacagatatcatattggtcattggtgctgttgttgccggatatattttctctgttgtgcaacatggatttgggtcatcaactgctgaaaaggtagtgttttctgtttgttacattttgggattcggttgtctttttatatgctggattttggctttcagttggtccttttcacttgcattttgcagtatcagtattcttgaagctttgttatgaagaattcttagtcactttaaactattatcaggttcttgctttcagttacaatggactgaagcagagaatccccagtatttgtttcatgaatttgaacccactatttacatagtagtttgtgtggatgccattgcagatcgaagcacctgaagatgagcatcaggagagcagcaccgtgggaaagccacctttggttgtggagagcctgaaagaggagccaagtgctgggtggccttctcttgggactcttattggtgatctactgaaacttgttattgaaggggtggggaatcagcttctcaggctcgtcccatcacgcctgcaacatgggaagagaaaaacagacctcactccactcaaagacaggcttgtgatgcctgaagacacagaggagaccccagtagcccagaagttaagtagcactccaatgagacccgagacactccatggtcctaacccagtaaacgaaacagcaccgaaggcccagaagagtgtcaaatcatccaaatttagggattctacgctgtcaagcaagcacaggtcctccaagaggcaggaatacgcggagttctacggttcatccgaaacacctcaagtgagctcaaaggtcccaaaagatcggctacgccaccgccaccgggagaagagtggggaagctgtttatgggactagtcatccggagcccaagcctgcggaagtgaagcccgcagactacagtgacccaaagtatgatccctacaacatcagaagcaaatatggtgctgacagcggctacaggtactgatgccccgttcctgccatcgttcggcatctatctacccccagtgtactgatatcaacttccattagtcgttgtgcaaaagcacaaagctgctgccggtgcttatgggtcattttctcaccagttgtaaccacccataagatgagatgcggcagatggtcattctagttaggtggtgatcctatatcaatttggcatccggaatccctctatgcggttcaggggaaagccaaaatgtaatttcgcgcagaaagcaacccgtagcctggtagtaattttgatctgctcaatacctttcatgttgcatgcttgagctctggtcttgccatgttatgttacagcctgtggtgcatgggccatctgtcatgacaggcaagtccaatgtcaaaccagctgaaatgcagctcctatcctagttctccttgagctgtcaatgaaagtgaggtctcattcttctctctttacactgctggtcctaccctgcaaaaccaagatgctgactggacagtcctggaaggatttgcatctgtgtgcgtgttgtcaattctgaattattcagattttctgactccatgggcggcctaacttttgatgatatgtgatcctgccatgtgagggagaatacgaggcgtctccgcgtgacaaagtgtggtttcttttgaaggattctgacgtgtgagcagcagcaacagcagtcaacaggaagctggggtccaaacaaaaacaaaagctggccgtttttcggcgacatggccaatgcatcatctattagcagctaatctgaacaaactttcttcctgtaataatctaatcgttggagatataatcaaagagaagaaggaaaagataattgtatgggcctgaattgtatgtagctgtctgccactcttgggaagctagcagccgaagcggtggtggtcctggccatgaactggactgcatatgtaggactactactacgactgaacaagatctggatagattaagtgataacatggcagcaatccacattgttgggcggcacgtcttgtggtctccggcgcctctttttcggaagaaaattgaggagggaactgccattttgctttgcctgaaaggtgcaaaggcactcgcatgatgagatgagaaaataccttgggatttggggactcactcaccgtcctactactgtactgttgtctgttgacttcatcttcggagctcatggttgtgacccccccccccccccggggtcacatgtgaaatccaataatttaacaacctgatggatggacatttggatggatattgctcatcctttatctcagactatgacctgttcgttttcggttttgaacaaaatgtccaaatttagctatagtcgtttttgtagttgtgtgtgcgtgtgtccaacaggcggctaagctaattacttgactaacattactcgtctccggttttgaacaagttgagaaaaccgttgatgaacatccctatccaaaaccacagccgccttttcttctcgacacaacgggcaagtatttgtttttttttcctcctgctcgtaagagcatcactgacagtaccaattgagttttagactaggtaagccatagacttatctgtatatgactttgctttattcttgctctgaattttgttttatttctccataagttttaggatatcacaagaaataaaacaaagtaaaatttctaagaggctaggactctttcttattcccccccccccccccccacataaaattgagccagaggaatgtaatccatagttattttctttctttcctataaaccaaagggatttaggggggaaatgtcaaaataaaattgaatcgttctgaagttctttgccgatccttcgtacaaagggaacctaaggtcagcaacatagctagatctaagacaggatgtgtcatatcctaaaactactaatctagaaggtgcacatatattgggatggagggagtacatattaagcttcctctgaatgcagtaattttacaacatttccatgtaattagtttaacttcccagaaaatcatccgaacttatcaacttcaaataaatgacaaatgcatgtgacatgcatagtagcatggaaacttatcgtatgcacacttacttcggatacattacatcatgcacaataactaacaaatattacgatttcttttttggaaaatttacatgtactttcaatattatgatgttaaaatttattattatttagcctaaaagaataaaaaatgtcagttttaatagtatataaatatgctagaatttttctctcactccctctatgtatgatggatttaacaatgagtctttagagtagtatgcaatattattggaagttcatatacaaattcttttagaatatttgtgacaagttctcttgagccacttcatcggatcattgttgcggattatttgttctacgtatcttgaaaatatgttttttatcttgaaaatatgatttttcataaaaaaatacttctactgcattgctcatatcccttttctaagatatttgttaagtttattaacaaaatatttaatttacatctgtaatcatatggataattcagtacaatagtcttcgcaatttttctccaagagtacattaccaattattagctaggtttattcagaccaacgaaattaaatcatgtttatatgatagaggagcagattcgggatatcccacaattatcaaagcttgaaattatgtgttttaaactgaccctaccaggttatcagctggactctagaatctactgtgagctctctggtcttgggtgcttttattaggtcaataagtggttggtggtaactggtaattaagcttctaattaagcatgtgccagccatacctggatgcaccccaggattggggttagaccagactgggaaaggaaaacaatagcagaaatcagtctgatggtttcacaccacacatgatacatactccctccgtcccataaaaaactaattaatatgacatatcttagttatatgaatctggacatatctctatccagatttattgtactagaatatattacattcagttttagatttgtttttttgaatggaaagagtagacatactcctatatatcatcgtgtaacaaaacgatcagcaacaagttgcgtgtagaaatacggtagaatttagtggaagacgaagaagaatccagagaaagaattaacgactgctgttttggatccatcgaccgcatgcagctcactggagaacaaaattatggaattttatcgttgataaagtgtaagaactgttaaacattagagatcgcaggtaagaatgacctacacgtaggatatatggatctgaaacccactatttaattatgtttctgacgtaaaactcttcctattgtatttctacagtttttctatttttattctaaattctaatgattattgtgcatagaaatattttaataactgcttttttagtttggtcaatttggccttgcgcaatgatttatttataagtatcagttggctccatatttgatcgtcaggaggaccaatgtactgtggttattgaagcagcacacttacagttgatcatcatgagcttcttcatccattttgaacggtgaactattaataagctacgtgcttagcttgcgttttcatttttgcgcttaatctattttatacggaatttttgccacgctgttttttttctcatttatttggttacaggaactttggttgggtagccttgatgcagaggttgaggatggagtaattcatcttccttgcaaaattgaaaccgtttttttttctaaaaatagttttaattagctaggtttttttttctgtggtaagtaaattggttccccatggagtgtcgttttttgttagtttttttcttggttggtcaggatctataaattagctttgcagaatcgttcttgggtctttgacagatcatcgtccttggaattcgtgcaagcagcagctaaaatttctgttgacgatggcgaagtcagttccgtcgtagtttacaataattaattagacttcctgatgttgctttgatcacctaattaattattctagctctttctgatgggtaagttacatcttctcatagatatcaagttcttgtcatccactgttaaattttctgcgtgctctcctattctaatacagcagagtcgtaattcaatcaacacaatcaagtttgttagccctgcaacaaatcaaccgttgccaaaatttaaaatttgaacttaattttttaattgcagtgtattttcaacgtggtttttttatattggcttttcatacacatattattaagctgtttgggccaggctataaacaaacagaaaaaaatgtgtgtttagcaatttgcaaatactcgcgaatggatcataacttatctggaagtgtggagtcttaaagaacaaaaacacccaactttttagtattatttgttcatcgacatcagccaatcagtgtggctgctgatcgatgcagatgaaaactagccctctctacctcaactcacatcagtaatcagatcattggattcaagaaaccaaaccctcttatctgcagcctgcataattgaccatgaacagttcaaatcatagcgtcaaatcacacatcatttaattcaggtcgcctttgaacattacaaccacatacaaacgcaccacaccagttaatccctcaactgtacgtactcccccgtcttaaaagaaaaaaaaacacattctaatactacgaatttagacataaatcatagtattagaatgtatcatatttagtattatattggatttttaagaaacggggagtatgtcacctcgatcgacctgcaaaatctcgttcgaaaaattcaaccgctagctatgaatgtttggcaataatcactccggaaagcaattagtaattgaacacgtttgacaacggcaacaacgcaagttgattcagatgacaaaaactttctgcgtgctatatattgaaatgttttattaagccacgtaactaattaagtactggtagtatatatattctgaaatgtaatccgacgttttgtcaaagaaaatgacggcaggacacgtgtggacacgaattaagccaagaaattcagttaattctcatataattcgtacaaattttccgtattccaaacaggggcttagaataatagatggacagactcgtaaattacagtaagacattaatggtcgagtgagttgtgttttaaaaaaaatattggtgtaaattaggcaaagctgagggtaagagttaaagagaaagtttaatagtagagttaagtattatctataaacttataccatagttaacatgtactccctccgtcctaaattataacgcctatattttttctacacagtcttcaatgacatactttgaccattaatatattagtacatgttatatttccaacaaatatgaaattaacatcatatgaaatactttaaaacacaaatctagtgatataacatgtataatacttagcatatatatggttactatgattattagtcaaaagttatcgagtttgattttccttaaaaagagggtgccttatactccctccattccatattgatcaagaaagacttaactactactccgttctagaatataaagattttaagggttagacactggtattaaaaaagtaagcagaattaaaagtgagaaggttgtgattggttgagaagagaatgtaggtgagaaaatcgaatggtggattggttgagaagagaatgctgatgaagaagttgttatattttaggacaaaatttgaaggctaaaagttattatattttggaatgaagggagtatgtgttttatttaatgtgaatatgtgatggagaataaatcaagaagcatgtagacttaaactccctatatgcaaaagaaacaagcgcttagaccatccccaacccagaaactataaagtagtttccatatttgccatgtcatatagatactatgggtagaaactatgtatccaatggatggtgtcttcaaattaaattctcatccaatcacctctattctctctccttttatccacctatcaccttgttttcattcttagttcttgtgtagatatggtttcttgcatgagaaataatttcttcatctttttacctctctcctcattaactctcttgccacataggatttttgcttatgtggcaatgtatttaatgctatgaacactagatggcatggagggctggggatagccttaactaccctaaatgcatagatacaataatgcttcacgttaaacgaagggacaagagttatatgatgatcaatttgaaatttgtagtttttggttatatgatgatcaatatggaatgagagagtaggttagttataatgttctttatttttttctcctctctctcatttatctatttaatacatttatcttgtatcatttgtaaatgtggctcttgcataagagccaacactcctcatttttcttatatcactgttctccacataagcttatagttttaccccattattccatctaaacttatagttggcttatacctcgttattacctttgctctaatatgaaccatggctcaacatccgatggtgctgttttttttttgcaaatggtttttcgaaaactatatatagtgggaaaacataaaaatggaatccaagtacaacttcttttacatattgttgcttttttgggggatgggaggggggaggggggatgtgttcatattacaggagacattgatttacattcgtcgacaagtaagatcttgactatggtatttgaggatgtagggcatggatggtataagtatatatgcattgatacagtaatgagatacatacatggaattatatataggtttggacctccaatatgggtggtaggcctaattgtgttgtctgtattgattgaaagtatcacaacaaagtatagtacatgaggtggatccataatctggtctacacaagtaatctcggcgaaaatgtgaaggcagtgtagttggcgttagttatggctccttctgaaagttgaactagtgtgcagattgtggcttgcaaatgtccatggcttgagataagatttgatgtccttccctcctaggaaaccttgtatttgtatcaaatcttgcccctaagaggccctgtacttatatcagagtatgacctctcttctaagtaaaactcggcatccaataaggtaccggcagagtatgtattccttatcattcccgattccgactacatgtcccttcttaatagaagggattgctttattgtcctatctaaatatacatgtttgaagatatctttccatatatgattggctatgcatattcctagctaggtaagtacatatgtatagggtatcacatatatactaaattgatagtagtcttgaacctaatttaaaatgtaaaccacacaaagtcaagttatcaacacatataacctaagcaaatttttgtttaactaggaagaggttgatcaccttaatcctttcatccgggtggtgtatatgcatgattagattataaaatttggatagatttcaaatcactcaaccgtcaaactatgcatagtaaaatttatctggaatgtcacccactttccttgaaatacgaaccgctctagactgtaaaacaagatctacttggcatccaactcatttttagaaatgtctcattgttccttttctctgcccaaaaagatatccttgcacgccatgttcttcagcgtctaccataagtttgtcgcccttcttagagccaacaccttgggccacaaagtaggtggtaggaagccaaatcttgaacttgacatgttgttgttctttattcgttcatcttatgtggattcatgcctcctctttttgagatcttggctcaaaatatgtcaaggaaatgtttggtttggagacttatcaaactttggttattcttcaaagaatgaagattatttggtagggtagtgatggttggcacatgttttgtttgttgccttatcaaaattttgcatcaaaatttggtaatatgattttggcaataaatcaaataggccttaaattatacttatttatgttcacataattttcttagttgttggactataatgaaaaaaataataatatcaacaatttaaatgcttcaagggagttgaatgggggcacatgccctcttcacctaaaaatatatgaaatatttgaaatatttaatatgcactaagttgttgctatgtaatattttaaattaaattaactaacttttggtgtgtgtgctctttgagttcagattttcgatccacctatacccaccttgtatagtcactttggtaaaagaaattatgttctttcatttgtaaaagaaatgtcataattttataaagaattttgttatttgttagttgcttgattttatattatttgtaagtccactaagcttacacaatatatatactcacgtgggaacatgtcgatatgatgcaaagcatcgggagttggcgctttgattatcattaattagaccgttaccattgctacttggagggatattatgatatcagactaccttgcatgccttaaaaagatatcaattttatcatgactacagaatagctagttttgtcgactcatatttggagatgcggctgccaggttctagaactacttaccattttgcacacccctttttctcaagtaacaaagcattatcaaggaaggtagaatccaaaagattaaactctcataattttacaatgtgatataggtgatccaggccttagtgacaaggtctgttgacacataccttgaccgcccatcgagggtacatactaagccactatggtacctcacatgaaatgactcaattggtttggatacgttgtattacatcgaatacaccgaccatggagtcgggctaatatgagcggccgagtgaaatgtctagctaccatgggataatctacaactagctggaaagtttaccgtcgatggcaatatctagctcccaatgtctattcgtcgctagttagtaatactagtcattaacctgtattgcacttgcagggcatgtagcaataaactttagatttctctcctgtctcgagtgcaagctaaggaaaataatgttggaactagggcgcgataaatttttatcctttattaaataacagatgatggtacgagttgtgagagcatgtatactcggtttatcatcaaatcatacccctaaggatcgcattagcatagggcaaatgagttgcttgtttgagccctaggcaactttaaatactagaatttatttaagagtttttttatttttatttttatctttttcaatcttgtcttctagattgctagaagcacaagtactaaaatttcagtccaaaactattttttgttattttggtcacgtattttgaaacagtctaaaccatatcgagaaaatgttgtccaaacatacgtgtgctctatattgcgcatgcagggtactaccgatttatactagagatttttaaggaagtagataacatacaatagtaatactcagtcattactcctttcagtgatccggtactcctacgatacaagagagctttcgagtgaatgtgcacatgacttagaccttattcgattaatccctctctagagaattgagcggtatttggagctccccactttctatttttacatgaatctcttctctagtcctctctaatcctttttcataggaattaatcgaacaaactcttatagcaagtttaatactaggctataagccaactataaacttatgtaaaggtgagagaaaattagaaaaataaagaatgttagctctcataagagcaagtttaatagtatagcccactactggctccaaatcatttatagtcaattcatacaatagttacctataaatatataccacactattaatatctggtcccacctgtcatacacacattacatattggagtccgtgctgcagctggctacaaatctgtagcccgttactcttctctctcctcttttatctcctcaaaatttgtttatagctggcttgtagtctgctattgtatccactctaagagatagctctttacatactccaaagtaaatacgttaaatgcatatgtgagagaagagaagaaaattatagacaaccttataactaatactatattatacatgttagctctaatataaatttatagctactagcaaaatgctcaagcttcgctttgggtagaagaagaaaaatatataatatgtcatataaaaaatatattttgtatcaaatatcttatcattatatggtatttacttgtttgaatcaaacgttgggctatttcataatattagaaaatattataaagtaatttacaaaaactacaaaaacaataatgaagtgacagatttactgtcaccataactactccctctgtaaaaaaccaacctcgtattaggatgtgacaatgaatctagacttcgagaatatccaaattcgttgtactatgttatgtcatatcctaattaaacgaatctcatactaggattttttttagggagtagaagtttttaaaaagatataggtcttgtttagataaaaaaaattggcaaaaaatgtcacatcaaatgtttggacacatgcatggggcattaaatgtgggaaaaaaaccaattgcacaatttgcatgtaaattgcgagacgaatcttttaagcataattatgcaatgatttgacaatgtgatgctacagtaaatatttgctaatgatggattaattagggttaataaattcgtctcgcggtttataggcagaatttgtaatttattttgttattagtctgtttaataattcaaatgtgcattcgtatactttaaaaactctacacccaaataagtaaacacacccatagataataggcaaaatttgccacaggacacacaaaaaacgtgtaattggctgggagacaccgcaaacgagcaggcggccgctccgcgcagcagcgcgctagcagggactggacgcggaggcaagcaggcaacagccacgacgggagcacgtgacaaggagccgcctacggtggagcttcgagcagtcgctagatcatgctcctccacctctcgtccctccccaaccatgtcagcctccgcgccagctacctcgccggcagctacaaaacttctgtgatttcgggtgggggaagatgacgtcaagggcaatctcgtcattttaaaaacaatttcacctctttttgactcggaaataataaaataatgcgaccggtgtcctatagccaattatatattttttgtagtgtccattagccgtgtcacgtttttgtgatatcttccaaccaattacatatttttttagtgtcctgtatcaatttttgcctagataataaactctatctcttgcaaaatactcctacctccgtatctctacgagtttccactactgtgcatgccttggtatggtatcctattcctacccgcaggtaggtcgttttccacgtctgctgctgcctgcctcctgcccttgttgccagtctgctgcggtggcacagagaccgttgcgctgcacaagcgttgaccttggattttcatggcaggcatacgtcccaaccatagcacacctccccataccaatcaatactatactggacgtactagtacatcaatactacttctacagtagagtactttttgaacgccaattgccaagacctagcaacactggagtattcttaaaagtggatcactgatttggctaattcatgatttatataaaaagatggacttaattaacacagagtaccgtttaaacttgtaactttaggtaagctctccccacattttttttacatgaagctcttcccacttgaccttagagaagtggagtactatccccgtttcaaaatataataacttttggctataaatctgcacacacagttatctagattcatagctaaaaatgcttacattttaggatggagatagtaactagcagagaagagagaaaaaaagaaattagtcgatcaagctaactttacaagtgcttcaagatattatttttagataatgaagtgattcaagatatatgtattaattaaatacataagtgaaaaaaaaggaagaggagaaaaatttgaagataaacttatagccaattaggtttgaaactaataaagatgaagattaagttgatgcacgtaaaatgagaaagccattagcacataattaagttttaattattataaatttgacaatggatatatttaatattttaaatcaatttctatatagaaagttttagcatgaaacacattatttagtagtttagaaaacatgctaacggaaactaagataaaatcttaacatgtacttataattatacatgttagtcctaatattatggttagatggatttacatacagcagtagtagtagttaactctactgttatatcttgctactacctccgtcccaaaatatagtaacttttggttagtgtctagatttatagctaaaaatgcttatattttgggacggagggagtatttctttatttctaattacgatgcagattttaccttagtttttattagcatgtttttcaaattgctaaacggtacgtttgttttaaaattgtttctatatagaagtcacttaaaaatatcaaataaatttaatttttaagtttataataattaaaaatcaattaatcataaactaataattttctcgttttgccaacgctcactttatcttcatccatctcaaaaccacgttagagcgagacaggaaaaaaaaagaaaaaaaaaacaaaatgtctgaaccttgataaggtcggacagctctgtctgcagggtgggcccagcccaccagtgtcacacccctcccgaaagcaaagtttacccccccaccagtacgcgtagcgtttccccacactccgcggcgccgcaagccaacaaaaaccaaaaccaaaaccaaaaaaaaaaaaaaaacctggcaaaaccgcggatcccaacgcaacgagagatagagaaaggcgaagacgaaaccgaagcagcgaagccaaggttgacatgtcacccgctcctcctcctcccctcttccccttcctcctctagaacacgccgccctctcctcctcctcctcttcctcctccacccctcgccgcgcagggcaccgaccgtctccgcgccaccgctcgtctcggtctcacctccacctgacctgacctcacccaacgcccccctcacctaatccctccctcctccaatcgccctcgtcaaaggggtgcaagaatccaaggggggagtggttggggttgattggttcttggttgtggtggggcatggcggcggcggcgtcggcgtcgtcgccggtggagttcctgctgcggcggccggcgccgcggcggcggcggctgccgctggcgggggcgttcttcgcgcccacggggctcgcgggggccacgctgctccgggcggtggcgtcgctcgccgcctcgctggtcgcgggggccaggccgccgtcgcagcggcggaacgtcgacgcgctcgcccgccgcctcgcgctgctgtccgcgatcctcgagtccatcctcctcgacaccgcggcggcgggcgccttctccgacgcggccaacctctgcttccgggagctctacgtcgtgctcttccgcgccgagctgctcgtctcctacgtcgcctccgccggccgcgcgtgggcgctgctacggagcccgcacctcgccgcctccttccgcgacctcgacgccgagctcgccgtcgtcctcgacgtcctcccggcggcatcactccgcctctcgcacgacgccaccggcctgctcgacctcctccgcgcccactgccgctgccgcgcgcccgcgcaataccatgaccccgacgaggcggcgctccgggaacgcctcatggatgcgctccgccagttcgacctcggccagccacctgaccacccctcgctccaatcgctcctcgccgacatgggcatctccaccgcggcttcttgccgcgcagaaatcgattacctggaggagcaaatcttgagccaagaagaggacaccgacctgccgctcgtcggcagcgtcctcgccttgctccgctactgcctattcgccgtgttcgaccctagcaacgcgaaggcgctccgggattggccgttgtcgggcaacaggcagcggcttctctcgattggcggcggcgatgacacctccttctcggtgccaaaggagttctcatgcccaatttctctggatttgatgcgtgatcccgtggtggcgtccaccgggcagacgtatgaccggccgtcgatcatacagtggatcgaggagggccattccacctgccccaactccggccaaacccttgcagatcaccggcttgtgccgaaccgtgctctccgcagcttgatttcacagtggtgtggggtgtatggcttgcagtatgattcgcccgagagcaacgaggggatggcggaatgtgttgctgcatcttgcagtagtcgggctgcaatggaggcaaacaaggccacagctaggattttggtcaggatgctggaggacgggtcagaaaatgtaaaggcagtcgctgctaaggaaattcggttgctggcaaagaccgggaagcaaaaccgggctttcatcgccgacttgggtgcgattccgctgctttgcaggttgctcttgtcgaatgattggatggcacaagagaatgcagtgacagcgctgctcaatttgtcaatcttcgagccaaacaagggacggattatggaacaggaaggctgcttgcggcttatcgtcggtgttctacagaatggatggactacggaagcgaaggagaatgctgcggccactctgtttagtctatcagtggtccataatttcaaaaaactgatcatgaatgagcctggggctgttgaggagctggctagtatgctgaccaaggggacatcaagggggaagaaagatgcggtgatggcactcttcaacctctcaacacatccagaaagctcagctcggatgctcgagtcatgcgcagttgtagctttaattcagtcgctgaggaatgacaccgtgtcggaggaagctgctggtgctttggccctgctgatgaagcaaccatccatcgtgcatcttgttgggagctctgaaactgtgatcactagccttgttgggttaatgcggcggggaactccaaaaggtaaggaaaatgcagtctcagctttatatgagatttgtcgtcggggcggctctgctttggtgcagagagtagcaaagattccagggttgaacacagtaatacagaccatcaccctcaacggaacaaagcgcgccaagaagaaagcaagcctgattgtcaagatgtgccagagaagccaaatgccatcagcaatggcactagggagcacattgacagtcgttgatcgttcattggtagggaacaacacattaaggcgtgctgcgagctttggcagtggagaattgtcaaacccgatttcgatatcagtgcaggtgccctaggtgaaaggtttctaccctggattatatggatggttacatttggtgagttttgtccccaaaattctttcatttcatgctccaatgaaggtatacaaaatttaatccaaaggatttaatactcgaaatatatcagatgttcctatgtttgtgtgtgaaatgtggataactgtgcagacatatagatgtgcaattagagttccagcttgatgttcctccttggcaagctcggaaattgtccaatttttgttttatttttttataaaaaagcaccaaatatgtatgctgtatgctgtaaactgtttaaattaattagaagctttacactgaggcaacagtggaaagaaatggtatttcatttcaccaatgggattgcaatacaacatagactttcacatttactctacaaaagccagcttaaaattaattaagtatgtagtatatcttaaaaagtaactctagctattctagcataggaaatgaacaaaaaaaattgcactatcaacacagacccccccaatctgaactcttccagcatggaaattgttgggagagaatgagtggtgtagaaactgtgctactttaggacaatctctactttgttgaggagaagattgaaaggacaaagttgatcatgcaactgaagaggagggggaccatcaatccactgaaggccagaaaacactaccggtgagtaaagatgatgttctggaatacaacagctcaatggaaacagggtgcgccggcggcagtaacctgattggtatcagaaagttttatttcacaatggaacccagtttccactcaccgaggcaccgagctggtgtgttcttcgggagaagtcgtgtggaatatcacgctcctgatggaaatttccctgcttccatttgaacaaggagcacaagcctgcaacaaccataataaaaggtggatcaagtcaggatacctggactgatgaccttttgagaagaataaatcttaattggtgacttttgcagttgcatgacagttcttggcaaagttgccaaaccttcaaaattattactatatgtttatcacatatggtacagtaggatacgaacaaattatgtgtgaatcttttttagttaggttggctacaatctgaacgaagacaacaatcgaagtttgctaggtgtaggtggtgcagagaatctttctgttatatgggagtatggaactgactcctgtaccttctcaatcatctgaatttctttatcgtccgaattttcctaccatcatcagcccatcagtcttcatcacctctcttgacattttgtgcctgaaatatcttccctcatctgatgtctacctaacaaggttcctgtacaaattcacaccatgatcacgttttcgtacttaattatcctcaccgtttcgtcagcttccagggtcggtagccatgtatttcaaacgaaaacgtgtgtccagttctcgacttttcggcttgacgaagaagaccgtcgcccaaaatctgcacattttcacacttgggccattttcattttacatgccggtttttaccgtgatcagaaacttttcagaattcatacttaacagtaacagattaggcgaatttcggaagagttttggcgtaccttgcgtgcgaattggatcggaaatcatgtggatgatatgctggtctccaaggcctgtggctgatcgtttcagttgggctatgagctggacctgtgattctcatgaccgtgaggttgatgtgctgaagcagctcgatctggcaaccggagatacggtatcaggatggttctcggcgccggatttgtggttgccttgagctcaggtcggggtcgctaacatggatgtctcggcaaccaatcaaatcaaattcatctgtagaaaaatgagaggaaaaccacacatatcaatggcgtgagtagcgacttcagttgagtcgaaagatcaaactgggacatttcagtggttaccgctggccaacatgcttggaacgcagaaatttttatttactcatgtgagaattgaaatgtcttaaaccctgtaaaattatgcattgaaaatgggccttgaatggatcagaaacatagtaaacaaacccaacggaaaataaagataacgtctgtgcggatacaaaagggttaaaaaattgaaaagaaaaaaaaaagaaaagctgatactgcaatcaggcaaaactgaacgcagatgctgtctatacgttcatggatgcgtgaataaaaacacgtcagttaaaactctaatcggattgagatccggtgcagttataaactctaaccagcatcataggactgttatgtattttcagccgtttattttaatgatcaacagttcagattcactgctatagtactcgaacaacagtaaaataagcaatgttttatattacaacacttttgccacagtatcaaattaatctgtaccgtttaagtttgatccaacttagcagctacaactgctaaagttgcagtcaataatataattgcagctgattcggatcaaactccaatcagtcagtgtgtgcttcacattctgtaccaacaagtaacattaactatgatctgacgggacgctttggaagacgattaaaaagattaggcagaatactgtcaattacctgggtaacatcagatgcgtgtttactctttaccttcatacgcaaaagctgtggtactccctgccgaagtcttcatcaagtcataatgccacggctgatcttgattgtacgatttagaaagagtcgtgatgctagccaaccaaaactgcagcaacagacttgtatttttcagttgttcacgtcagagagtacacatgaaaaaaatcgtatcccagtcgaactaagcaagccagtcattacgagtatgagcttccaggtcaaagatgtacgaacaaggcttcttttttccatcaaacacgaaaataaaactcgaaaagtttcactaagtttccataaaataaattctagagtgaaaatcagagaaagaaaggaatgacggtcgaatagcattgcttctagtaagtagtcaccgacccagtttcttgttgaaatatacaagtacaaaatgtaagatttgcaaacaccagcatcgagattatcaaatatgtcaacgggaagaacgaccgtgcgtgcaaaattcatcaggttgctgatgtcggtgaagaagttgaacctgcacggttgcatgagtgcgctgcatgactacaattggctgctaataactagtgctctacatgactaccttccaacaatttgtttaagtctatactaacaaaccaaaggcccactgattcctgacccagtttgtgcagtaagtagtcagctgatcaaacggcaccttggtttgcagaaattacctgggttaatacactcctatcattttagcaaaaggaggcatgagaagctatatgattgactgcttcatgtagcacagaactacattgaaaggtggcagtggatatcaagtatcaacagccgtcagcagattgtttctcctgtgcaaattatattagcataatgggacttgagcaccactaactctccactcatccaattgtccaattgtttaacctgatacacgagcacctgccattgtacgatgttgcctcccaaaacaagctccatactcctagcctctcatctgaggctctgaaacctttcgtctcaaacaaaagatcacataatctgtccccatctcccatccaagaagaactcacataccaaccatgccttgggctgaaagcttgctgttcctcctcctcttgttctcgctgcccattcccttctcccattcttggtcctttgattatcccagccccattgccaacattaattctctttggacgaacaacaatgccaccatcccatacagtgcaacctacccagatggttcaacgatcagagcgattcttgttaggcagaatcctacatggtatagtccattcttcgcatgtggtttcatctgcaccgctccttgcaatgattttctctttgccatcttctcggtgtccgttggtgatccgagcaaccctgccttcaatacctcgtccatgccacggatcatgtggacagccaacaggtcccgtccagtgaaggataatgcgtcactccagttcaaggatggcaatctcatactgcgagacttcgatggttctctggtctggtcgacgaacacatcggacagccgtgttgtcggtctgaatcttgctgaaactgggaatatggttctcttcgacgcaatggggaagacggtgtgggaatcatttgagcacccaactgacacgctccttcttgggcagtcactgaggcaagggaagaggcttacttcagattccttggcaacaaactggactcaaggtcagttctatctcactgtacttgacaatggtttgtatgctttcatcgaagcagatccaccacagctctattatcaaagaagattcaatatcactgatgccatagttcagccaaatatgaacatatcctctgatggagcaaagaactacacgacttacatttccttcttaaaaggtagcctgtcagcatttgttagcttcaacaatactgatatcaatctattcgatatatcactgccgtcgccatcttcagcacagttcatgagcctcgagaatgatgggcacttgagagtttatagatgggatggtacttcgtggaaacctcaggctgatgttctgcatgtggatcttgatgattgtgcatatcccacagtatgtggagattatggtatctgttccgaaggacaatgcagttgcccgagtcggaattctggggatgaagatcaatttttccgccaattggacaaccggcaacctaacatgggctgctccctagcaattcctctgtcttgtgacttgacccaatatcaacagcttctccccctcccaaatgtcatgtacttcaatttaggacaaaattggaccaccgacgaatatagctgcaaggaggcttgcttgaaggcctgttcatgcaaagcagcctttttcaagtataacaatgtctctaatggttcttgctacctaatgccaaagcttttctcactcatgaattatcagcctgaagtagttggatacaatttatctgcatacatcaaggtgcaaatgttacctccaccaccaagaagcaaacaattaaatccattagtttaccatgttggtgctcctattatagttgcagttatctgcataattattctcatcatcagaagaataatgaaaaggaagatggatgatgacgacccatttaaaggactggctggcatgccaacacggttctcctacaaacagctgagagaggcgactaataactttagcaaaaagctgggacagggaggatttgggccagtgtatgagggaaaacttggaaatgttaaaattgccgtcaaatgcttgcgtgatattggccatggaaaagaagaattcatggccgaagtcatcaccattggaagcatccatcacatcaatcttgttagattgataggatactgttctgacaagtttcacaggctccttgtttacgagcatatgaccaatgggtctctagacaagtggatcttcagaaagaacccaagaggtacactcagttgggcaactcgatacaagattatactggatattgcaaaaggcttggcctatcttcatgaagaatgccgacagaagattgctcaccttgatatcaagcctggtaatatcctccttgatgacaagttcaatgcaaagatatctgatttcggtctagcaaagctgatcgatagggatgaaagccatgtcatgacaaaaatcagaggaacaaggggatacctagcaccagaatggttgtcatcaacaattaccgagaaggctgatatctacagttttggtgttgttgtgctggaaattgtgagcggaaggaaaaacctggataacaatcagcctgaagcgagcaacaacctaatcaatctacttcaagagaaaatcaaggtcggccaagttctagatatattggacaatcagaacgaagaaatccaattacacggggaagaaatgatagaagtgatcaagctagcagtctggtgcttgcagcgcgactgcagcaaacgaccagccatgtcacaggttgtgaaggtcctggaaggcgcgatcgacacggaaacatccgcaggctacgatgcagctagtaaagatgatattaattttgacgcttcatcccctctgtccccagcaccagtgtcagcacgatgaaactctttttaagtaggaacaccgatacttgttacagtttagttgcagtactgtgtgcagtgtgctagtgtgcatctcatgtaaatttgtcccttgtaatatgtaacatcctcatcaatgtgtgaatgaatgaaatattataacgattttattatcgagctatttcatggtttcccaagtaacaagacgaacagcaaaggtagcatgtgaagggctagggaaaaggtaacatccgaaccttgccatgctcggccacgcatttcgtcgaacacgcggagggccgacaccatctgtgcccccccgaccgccgacggggaggccacgccgagggacaccgcccccggactgtcggcgccgcgcgccgcgtgcacgctcgtgcacccaccccgtaggaatcactcgacgccgcagcccatcctcatccggcgcggcgcggcgggcgacgccggcgaggctggcatgactcacgagcgccagcgcgcggcgacgagggaagcgggagagagggaaagaattataaaataataaaataaaaatctaagcgcgactcgagcactgcacgaatctcgaggcgcacgtggcccgtgctgcggcggccacgtgggcgcccgaggactcggaagagttttgtgtggccgtggtatcctcttccctccactccactctccaacttctcccgcagcatcgccgccgtcgtcgtcgccgccgccgccgcgaggtgagggctcgtagcaccgtccgggagggcggaggaggaggagagatgagctgctgcgccgcctcgtcttcctctccggttctcgccaacccccgggtgagtacgcacgccctaccccgtcttcgccttgccggcccgccgccgccgtcctctccatcgacggcggcgtgaaattcctgcaggaatccgatgcgttccccttccgctagttcatttcagccgccatcattggtcttagcggacttagggcaagatcaatcccgccgcgaacaaacccgcgcgcttccgatttttctcacaaattcttcggttcgatgtgctcgtggaatcgaatcgtcggcgcgaattcgctagttcgttgggattccgaaagggagggaatgttccgaagagaatcgattttataatatgtctggatttatctttcaccaaggtcccatggtctagcggttaggacattggactctgaatccagtaacccgagttcaaatctcggtgggacctattttttctccattttttttctgactcgctgatccttgctaggatgtggctacatccaaaacaccatttgctgagtcgaggcgtcgagctgaatccatttgctgagtcgagctgaatttatatatgctccatgaaatctttgctacgaatttatgctttgttttcatttcaaggatgttgctgcatcaaaacaccatttgcttagttgagctaaatttataaatccccatgaaatctttgcaacgaatttatgctttgttttcattttttattttaaactttcaggggggattcgctgctagctgctcaacaagaaggaaccacagggtgatcttcctcggttcaaggcagttttctccgatcatatacagcccagcacgccgcgcgtcgtcacggctgtctcggagagaggtgatagcttttgcaggccagcaatcttgggatatcggcagatttgtcaggacgctgtatttcttcaacgggccaccgaatcctctcaaggtttactcactgtattgggattttttttcacctcttctcgttacagttatttcacatttggcattgtgctcatgttttgtctgttcaatctgtagattgtagagtccattcttagcagtttcactggctctgctcctggtgaggtgccaaagaaaatggaatcttctgatgtggtgctggtcactggagctaccggtggcgttggacgaagagtggttgatatcctgcggaataagggaatacccgttcgagtattggtacaatacttgtcaagcttatctacttttggcttctctgttttcattcattattacatggatagtccaacttctccctcttttgttggatctttgctgctcttaatgttgatctaacatttcaaatttcaattcaggctagaaatgaagagaaggcgaggagcatgctggggcccgatgtagacttggtaagccacttgtttagctggatttagattcatgttccatgtgcggtttagtttcaaccaactaggtctatttcaataccccatgtattccaatatgcattacccttacccaatacccaatgtattccagcaatatgattgcctgaggtaagtctcactgttacatttctgctaaccttctagttgtgaatgaaatgaaactagggaattttgttcttaaatgatagtgaaaatttctgtgtattttttatgacattttgtttgaagtgaccacgtatatgcaatgattcactacatataatgaaccttcctatctcattgctagtttgcatatggtttatgtggttattgaatcttccacacctgtaaagacggaagtattgaatatttatattattaaaatttctattttgtgtcagatcataggagatgtcacaaaggaaaattcacttgatcccaagtacttcaaagggattaagaaagtggtaaatgcagtgtcagttatagttgggccaaaggaaggcgatacaccagacaggcagaagtataaacaggtacgccaaatgccctatcatatgttaccaatatttcacgtactctactttacaccctacaaacttacatttaatctcatcttcatgcagggcatcaagttttttgaacctgaggtagctgcatcaatacattccttctcttgtagaatataagtaacaatggatgactgacatcctcattcccaacatacaacatggaaatattgcatcagtttgcacttttgctcgttcaaaagctagttcattatattattttgttatgcctatcagatcaagggaccttcacctgaaatggtagaataccttggaatgcaaaacttgattaatgctgtcaagaacagtgtgggtctgactgaagggaaactgctttttgggggcacaggtaaatctttcattccataccaaaatgttttttgaaagaaatatcggagatttaaatctacactcaactcaactcatattcattaggggacctccatagtacccaaaaactttggtgcaagatctgcgggaaatccagtttttagtaattatggtgatcataacagtgatttttttcaaaacaacaaaatagtgaattgcttgcaactgaatcatgtataaatttatttttccatccctacatgtgtatacatttgtatgttagttgtctttcaatatataagttttttttccttatcacaacatgttagttattttatttaggcaacttatccggaaagattgtttggggagcacttgatgatgttgtgatgggaggtgttagtgaaagcacattccaaatccaaccaacaggaagtgaaactgatggaccaaccggattgttcaaaggtattttgtttttttttaatgatccctcgactccttgtatatgcgatgtggcaattctttggaaaacctctagtctaagcaggtctgtgcaatgtattctaggtactgtctctacttcaaataacggtggcttcactagtataaggacaaaggtacctactgacatgtattttcccaaaaaaaaaaaaaacaaagttgctgccgttttgtgtgttgatttatattttatttccatgtcctaactattaggaataattaattatttgtcactcttacagatggtgataaataatttgccactggacccacatgtcatagacaaatgaggacccacatgtcataaacagcgagtggcaaataattaattgccacatcttaaaagtggtacaaagttaaatgtccctaactattattgtgatatgttactctgattgcagaattttacagtgcctgaggatctgtcagcatatgacggtattgaactacgtgttaagggtgacgggaggcggtataaacttattgtgcgcactagctttgaatgggatactgtcggctacattgcaagctttgacacgactaagggggaatggcaaagtgtatgttgtatttgttgatttattgaaaaaaatacgtccctttgtttcagcaacttacagctatgcttcttattgatggaacaggttaaattacctttctcttcactgaatcctgtattccgtgcccgcactatgcctgatgctgcaccctttgatgcaagcaatgttacttccttacaggtacaatgtgttcatgtgttggtataattttttaggaataactgaacctgaaattgctgtgataattctgtagctcatgtttagcaagtttgagtatgacggaaagctgaacccaacatttacagaaggttcatttgagctccccttttcaagtattagagcatacataaacgagccaatcactccaaggtttgttctttgtactagttttactatatgacatcatcagaataaatgagcactgtaatcgtccgattgtttggaagtcatcaagactcactagaataaatgacaattctacttgcaggtttgtccatgttagttctgcaggagttacaagacctgagagaccaggcctggatttaagtaaacaacctcctgctgttcgcatgaacaaagagctgggctccattctaacttacaagttgaaggtatgcgccatttttcctttattattgtgcatttgtgcttattgattcacatcatgtctaaatgcttatcgcatgtcctttcagggtgaggatttaatccgggaaagtggcattccatatactattgtgcggccatgtgctctaacagaggaaccagctggagctgacctcatatttgaccagggagataatatcacagtatgtagaggcagcatttgtttgttgccttcataagatgccacgccattcttcttcctccataagatcaaataaagcatcagtttcatataagtttcctgtattttttttttcagggaaagatatcaagggaagaaattgctttcatttgtgttgcagctctggcaagtccaaatgcagtagagaaaacctttgaggttaaaattctgcaactcatttgcaagacactacttgggacaacaaaacttcagaaggaaattgtggcattttatttcattttaagctaactcatgtacttttttttgttaggtcaagagcactgttccattcagtgaacctttcgtggttgatccttcaaatcctcctccagagaaagactatgatgtgtatttcaaagagctcaaagctggcataacaggtaaagaggcactagaaggaacacctgctcaggtctgaagaacatgttaaatgcagaacgcccaactgctttgacaaatcttgacatggtaattctccattgtatttaggtcttaaccacttaagatatatgagattataacgctgaatttcataaattaacttcatgataggtgcttcttgaacatgaacagaattacataaatatgcaagtctgattcataaaccaccaatagttgcagtacctgagcatatgtgccacacttaatctttgcagtcatgtggtttccaaaataccaaatgggaagtactttgtgaagtatgtgaaggaacagttgtttcttttttttatgtaaagtagtatatcctctggagtttgtgttatatttaatctgctgtatctgtatgagaagatatgcatacatcttcagaagacatatggatgtcgatcaagagctcaaaggttatggagcattggagctctttctgtagcagattctgtatattatgttgcttttattttcactgaattgtgtgctgtagatagcgtcattggaatctagatcgaccattttgtaaaatcaaatacattgtcatacagagagaagagaagtttacagttccagttttttttttcaaactttttatgtctctttttagtttgcccctctattggttactgcaacgcacccctcctttttttaatttaaaatatacgatgaagaaataggaagatgaaacccctcaaaagagagaatgaaccatgaatatgaaaacaaggtacatccatatcactagaaataaatgaacagttaaaacacaagcattcatatattttgcacagcatcaggttttctaccaaactgaaaatcagtgaacacaccactacaatccctactacacacaagtcatttgagtactaattttctacatgtttcctcgttacaaagccaaaattaaaaagaggaaggcaaggtgaaattactactccgtgaaacgcaattatacatccaatcaatattcccataattacatgaaaaactccctaaactgcagaatcatatccatgagtcctttgcctaatgatcaaagctccccatgcttcatgcatgtcagactgtcactcaccagcagcaaaacacctgcatcataagaaacaagaactgtcattagctaattaagctaggaattcagaagcagaaatttgtcaaacacatttctgcacaagtgagaagagcacatgacacaatagtgcagtgcaaaccacaaaccttcctcctccagctccggcgccggcgcttcccgccgccggcgagcacgagggcctccggccgcaccaccagcggcgaccagaggccgctcttctcgtactcgaagccgaactcgctggtgtcctggaacttgcccaggagctcctcgctgacgtccagcggcaccacctgcaccacgccggcgccggcgccaccgccgccgccgcccgccggagaagaaggtgggaggctcacgaggtccacgagcgatggtggtgaagaatggcaggtcgacatggcagcatgtcctggtcagggcagacagaatgcatgaggagaaggaagcaaaggagactgatggaatgatatggatagctgatgacgatgatgatgattcatgctgagggaaaaagattcagattggtgtgtagtttgtgtgtgtgtgtgagggacaatggcagggagcagcaagcagagaggcaagaggcaggtgagctgttgtgtttgcttggttgcagggcaagctagctgccaagatgaacaacatgcatgtgtgtgtgtttttgtggttgtggggctgggagtgagagagcagaaagaatctcatgctgccttttctgcagttggagattgtggttagaggggacttttaacggattaggattcacgtccacggtgacttaatcattgacatgtgagccaaggtttagagcaggtacaatagcagactataagctagctgcaaacatattttaagaagataaataaggagagaagggtagcgggctacagatttgtagccagctgtagcacggacttcaagacgcaatgtgtgtatgacatgtgagaccaggtattaatagagtagtatataactattgtatgaatgagctattagattggttatacatgaattggagctagtagttggctatactattaaacttgctcttatggggccaatatattagtgacaattaatgtcacctgactttgaaggttgaggatgctagtttctttaaaacatgcatgtagcatactatctctatccataaatataaatatttctagcgtttaaaatttttccttaaatataaacatttctacagtattatatcattgagtatgatgtttctcaaaatatcaagttttggggcgtatcaagcaatttcacaacaaccttaaatccttaattttcacgtaaaggcttatatttgtggacggatgaagtaactactgtctaaaatcatttaactttataactaatgtttcgagggtaacccaaatagaaacatgctcctataggattttctctttaccggtgttcagtgttgtgcatgcagggctgcatcattagtgcatgcattgtgctaggccaacttttcacatgcctgttaattttaattaactaaaagttgatgactctggttaactcctactagtacctttcagaacaggtaggcacaagatctgctggtgtgtttaattagccaggcatcagctataatggaactttgctttctttcttcctttcctttcctttccatatgcttcatgtgatgcatcgctgtgatgagatgagatgagatggagatggagtgagatatctgaatctggattggttcgtacgcatgatggcaaattttgcaacagggggatgggatcatggacggtgtccacccatgcaatggtgaccatacccatagggcattggaccataagatgcaaaaacggcctctagctagagcgattcacggttggcacgagccatgagatgcttccacgaggtaagaaggttgcgttctagaccgtccgatcgtgatccaacggtatgtaataattcgtttgaaaaatataaggtgttagatttttacagtctccaaccttacacttcgacatagtgtattatcaacaattataaaagtaacatcaaatgaaaatatcttcataaacgaatttaacgctaagtgacgtactagtcaaaattttcatatattgactttttgaaaaacaagaacgcattatattttcaaacggggagagtagcacacgataaccagagaaatgaaacccccttgccattatgcaattaactatatatggactgagactttcagtttatgggcctgagcttgattaggttagttaggaaaaagtacaagaaaagcaattggcattcatgagaataatatgatgttctactattctctgggcatcctgattcctgaagacatgaacagatgaactgccagtaggtacgtgaccctaccccaatcttttccgatccatatatataggtaggttattcagatcaacaatgctgacgagattacgagaaacgtcaaatccaaccaaactgatgtagaaaaaagttaggcgcagcgtgattaaactaatctctagttaaaatgactacatcaactccatcaagaaccttatcatatttgtatagcaagattggctcctttctaagtaatgatcatgagaagtaatgcgtgacatgtagtacattgtagccagttgatgttaacttctgagcagatatctccattccagatttttgaaagaatggacaaatggataaatagggacttgtttagttcctattttttttcccaaaaacatcacatcgaatctttagacacatgcataaagcattaaaatagataaaataaaaaattaattgcatagttttcatgaaaattgcaagacgaatcttatgagcctaattagtccatgattagctataaatgctacagtaacccacatgtactaatgacggattaattaggctttataaattcatctcgcgattttaagcgagttatgaaattagttttttcattcatgtccgaaaaacctttctgacatccagtcaaacatccgatgtgacacccaaaaaattttcttttcgcgatctacggggaatttttgaaatggtgccatgcattcaaacaactcactcaaagcctcccaatagagagcaataagggggaaatttccagaaaataagagtgaacatctcgcatgccccacatgaaacagcgtctacagtctacaacatcaagaaatctagcggtactggaaggtataaaataccccaagcttgtttcctaaacacagcaaatagtttttccatcttctgaaaaatgttagcattcacaagatacagaaataccggtactatgctagagaccagcgagagcattcaacgagatcaggcatcgcaatgtggctttgcccccacaaataaaacggaaatctaacaccaacttggtgccagattatatcagtgtgtgcatatgccttcaatcctgtgaaaataatacaaaagttgtaaggagaagcaattgatatcatgatggcatatgaaataaaagcaaaactatacagcaaatattatcattacctcttcaattggggtgctttcttcattttgcttcttctcatccgccccattttcttggttctgaccatctgtctccatcttttcagtttcctctgaagcatcagccatattagcatctggcttggggattgcaaattcagcaggaatttggccagtgctcagtgcctaatcatcacagtagtgaaaaagaaatgtgagcccatagttagctgttccaaactgtacaaagcgcaggagctaaacgaaaggacatgctaccttttcaagccttgcaacctcctcaagtgtctgagaattcacaatggcagcctgcagatggaataattgttaaaccttgaattttgcaggtagttgtactataccaccatacatagaagatattgacatcaacagagagccatacacatatctaggaatgccaaatgccacactaactacaaacagttagagtttagaattatcaaagttaaaaatcaagagcatactaacaagccagtagaagccatagccacaatcatttttttaatgcagtagctaaataatatagttatttgcacagcttgcaatagtaccttgatagctgtgatttgctcaggtgttggagcaactacttttggaccctgctcctccattgtggtatcttgagcatccaccacctgtccaggagtaaaagttttggctggcaccttctttgcctcttcctctgcctcctttgagtgaaacttctgtgctgctgcaattctctcctacaaaaacaaaagatctcacgcataacttcagaaattaacacaaatacatgcacactagataatattaaaaataacacgtaaactaaaaggcattcatgtatttaattcattgcgacacaaagttaaagagtcgctcttttgccctttttcctgccagcacttctgcagtccattccaaaatcattttggcagtcattccaaaggaaatgaatgaacaacctgtggggaataagtaaactaatcaagcagcaacgcagtttctgcatagatccacatatttcaaaatgcctttgtgaaaaaaatatatgtacaataatataaactatataggcttgcaatgctgtttaattttgaactcctttgaaataatcgtatgctacatacttgcataaataaaacatgcaaccttaatgagtgttatgtcaatacatgcaaaatatcacaatatgtattttatggctccattaaacatttaaaaataagaagcgattaacttatgaaacattgatataaagagagttcacagaagcaccattgcacatagagctaaacgaaaggtgtttactgtttagtgctagaaactaccattagagatcaaatggaagaaaatactgagaaatttaaataaaaataaaccattcaaaatagaagtttttacagaaacttcaagagaacaaaactaagactaaatgattaacaaatttcatacaaaaacatatttacatgaaaaagaacctcagcattgctaacctgttgtttcactttcttgaaatccagcaaccgcaaatgcttcaatttatggatcacatacaaccggtagtctggctgcttggttacagtattatcaagtaagctaagaaactgaagctttggaagagatgccaggggatcgatctccgcaagatttgtaagacgattgtttgtaagcaccaatgtatgtaactttggcaagaactctagaaacaggagcaactgaaggtaagttctggagcaaaattatgaaaatgataaacagatcataacaagataaaatatataatcttaccaccaagattgggattgatacgtgtgattctgttattgttaactaacagagtgccaagacgattcaagtacgggaagttctcaagcttgacaatctcattgtctgacaagtcaattgtgtcaaattggtcctatttgagagcaaagtaacaaaaagaagtgttaaacatgctggagaaagaagataataaaacaaaagctgggtcaaatactgaaatgagaatgagtattttttgggatatcaaatcagatcaaaatgaccatactagttatttaactatcaagtgattgacatgacaaaggaaaaccaagaaacatgtcattcataacaacagaaagtatgccgttaacatactaatgctttgaaattacatgggcacattgtacaactaaaagacagctctatcagcaaaaaacactaaaagacagctctatcagcaaaaaacaatgtgtgggacttatttcctctaaacttccatagaagaaaaacatgcagaacctcaaaaaattgccaaaaagaagagaagtgctaagctacctagcgtcagcatgtacagacaaattttaatgccccaaattttgtaaaattattatgcaaagcacttcaaatcgcagcgttgttaacacatactcaactgagaatatgagttttattccattccagagatcgaaaaagataaaattgaccatactgattatctaactataggtgattgacatgagaaaggaaaaccaagaaatgtgtcactcataacaacaaaaagtatgccgttagcatgctaacgattagaaattctatggacacattgtacatataagatagctctatcagcaaaagaaaaaaaaagttcttccagactcatgtgggacttatttcctctaaacatccatagaatagaaacatgcagagccgacagttatcaagtcctacaaaaagtgacgactggtgctacagttagtcctaaagtctttgagggaacacgacttgagggggcacgactccatgtgctggccgcagaagacgcaatggagttgagacttgagcgaatgcttgggaggcctggtgccttggcctatcaggccctgctgagtgaaagggagattgagagctcattgggtccatcaggcgcagcaagttactagtaacagactagaagtagaagcaatctatgtatgtaataacaacctgatagagtagtcaactcaacgactagtcctcaactatgctccgaccagtctactacccagtagacggtatctcaacccgactttacaacttaacaaccatggcagaacctcaacaaaatgccaaaaagaagagaagggcacactcatatgttagtaatctctcatacctatcgtcagcatgtagagacaaaatgcagtgccccgaattttgtaaaattattttgcaaaacacttcaattgcagctttattaacacaaaattgacgctacgaacttagtagcattatgtactacatttcttgcatcactacctagggcacacccatatctactaatctcccatacgctacatccaagagtaaagcatgttccaccaccaatccaagaacccatcataatacttcaaatgagacaacaatggagctaagggaagaaaaggcttgcggaagctggtggagctcacctcggtggcgcccagattctcgatgatggggatcttgttacctgccaaggaaaagaaacacaacagacaaattaaactaccgagacggagggaatgaaaaaagagggccaagaacactaaaccctagatctagcgagcagggaggaaagagcgcgcaaacctcggatgtcgagctcgcggtccttgacggcgttgaagaagtgcgggctcttccatatcaggtcggcggtgagcctcaccatggcgcggccgggagggcgggcggcggcaacagcttcgggtcagtcgggctacaaactcccccgcggcgcgaggtcgaaaccctagtgatgacgaggaggggaaggaacggcaaggcggccggagccctagcaaacgggaaggcggcgaggggaggaggtggaggagggcggccgcatgctcgctcgggatggcgaggcggcggcagcggcggcaaaggagatgtggaggcggggtgggagagggttcaagggtagggcttttgtggcggtgctttacgatgacaccctcgtagtttttattaattgaagaaagcgtggattttaagcaaaatctgctcgtttgtacggtgagaaacagctgattgttctagaaaaatagggttttcgcttatagtttattttttaattttataactatagcttctcaaaatctgaatgaaatgtagtactgtttatgagagcttctaattctcggagaaagtgcagctggcaaaagctccccaaacatggatcatatagctacgacaacctgacccaatggggacacaagtcaaaaaatgagcaaatgtcgaccacttatatgtgataaaattgtaatatctcgaaatttaactaggtgtatgaaaattcggagggatcatttgaacactaagaaaaaaaatcatttatgcaataatttaattgtattatgtggaaaaaaaataggactccatcggatggctgattgagctaggggcgtttcagccgaagcccatcagatggctgattcgattaagctcattcagccaaacgaagtgagcgcacaatggttgtgtatccaactctggcaacaaatcctatgatccttctagtgctcacagccccacacatggaaacacctaaaaagaaaaaaaaaacacgagcggttggaggtgactaggccaacggcggaggctacaactaaatagccacaaaagatcaccaacactatactggattatgtcaaagaattgcttttcatagagccgttaaaatctccgtatgccagagccgcccagtcaccactcttattagcgatctccaatgtactcttatataagaaaaccccaaagaacgatatactatcaaaagaaaatgagaagatccaaggaagaaggaagaatctgaggtctcaccaacccaattttaaaccatcataccagagtgcattacacaagacatacactcaggagagagtcatgaagcaatagaaacaaattatgctgaggaggtcttctaccatgctccaatcagctcgcaaaccaactttcagtggccgtgtttgttaatgatgcttgcatcaagcatagaaagtcaagctatatcaaattacacccagttcaattttctttgatatccattagagagttagccccgaagaacaaagagatacagaatttgcatataagaataaccaagtaaaaaaaagcataaaaccaagtgatggactgacgacacaagtaaaaccaataatggtgaaactttaaatgaaaagcaaacaacaatgtgagatcttaaaagaaaagccaaatccatcaaaacaatgatcgatgaagacaaaatgaataattaaaagggaaaacagaacaacgagagcaagcaaagaacacgaatgctatttgtcacctgccatcacatgcgtccggtgatgatgacaagaaaggatgagtggtgtggggatctactcccaccgtcccatagaaaacgaatatagaatcgaatatgacacattctagcactttgaatatagatagatatatgtttagattcgtagtactaggatatgtcaaattcggtaatagatttattttttatgggacggagggagtactattttgtggaattgtttgccccctgatgacctattatttatcgtaacaatgagataaactagtaaaatcataaaaaaaatgttccaaaaaaatttagataacatattattaggagtttaggaccacacgaaaaatttatcaacaaccaggactatctagtatttcctttttcatcagaaaaactgatttatatcaattcatatatttttagttttctgtgtggaacccagtgccttcttaaaaaaagtatcactactttttttttattttcaaaaggaccattatgcccctccgcatgcccggagcagttttcccattcagcctttctcccgtccacgcgccatatctctctccccctcaacggcgacggccgccgccctcggatcccggcgagagacaaccttctaccttcctgcccccttctctccccttcgagttccaccccttgcagcgccgctggcccgcccccttccggcctcagatctgtcaggcacggctatgattgacgcgcgggcgatacaaggtcgtgggcgcggcggcggcggcggtggccgcagcggcggcgactcgaagctgtctacgcgagcttgccggaggtcgagattatcttggtcgtgggggacccagcttcagcgcgtcgcggcctccacctaccttccctaagattccctctcgtcttctcctcctacttggtttcttgggaccaagagaaattgtacgccatgctgcaagaattcacctcaagtttgctttgatttcttaatctgattcgccgtccacacacacgatgcgatcagctaggctcggccaccgcccgttttgggattcttttccccttccccgttgtacatattgtgattaattgcccttagttcagagcagtttatttagtatcgatgttgatgcacacgctgtggttagagattgttctgctggcttatacacgagcaacggaggattgggtacgaccaattcagagaattcgttagcttatgtactttcctcttaaccgaaacagcaattgtgcttgtaaattggtggcacggtggtgttgcctagttttatggtcctagacttgtcgatccatcagttgaaaaaatgtagtggaatcttacaagttgctacttgccagaactttgctttattatcgtagacgattaaaggaccataaccttctttagtatacataagtggcggacgtaggattttataaatgggtgtacgataaactaatctacttataaaaaaaataaactatctatttgttatacaatattatctctaaataaatataaagcccaatatatcataaaagttggactagaaataaactaaatcttatttttatctttaaatctcattctaatacatagacatgtaactagtaagactttgtttgcaaatgggatagagataaatattgtccatccattcatcacacctcatttaatcctagccattcatccatttctctttcccaatccctactctcataactcatttgccaacactacaacaaaaacattttgtagaggctcttttgtagagacaattttcaaaatacctctaagttttgaagctctatagtctagagacactttttagaggcatttttaaaatcacctaaaatatttatttttactatagagacactttagagacatttttaagatactttgttaaatttatcttttagagacatcttttcgacactttaaaatttgcctcatacgtaaaggcactttcttaaggcatttaaaataatgtaaagacatttttccaaatattaatatatatcaagtaactagatataagtaacacaaatcacatatttacatttaattatatgaggttgagatggttagtacattgaagataaaaaatgatcaactcaagaggtcatgagttcaaggattggtaagggataatatttttctttctttttcatattgatttgctatatttgccgtaaattctttctttttcatattgatttgctatagtgccgtaaaattcaccaaatggcacttataaaacactcttcaaaatgtctctataacatggtaaaggcatttaaaaatgtctttatagtattaggaaggcattttaaaaatgcatgtaaaggcgttttaaaaagacactcttcaaaatgtctctataacactgtaaagacattttaaaactgtctttatagtattaggaaggcattttaaaaatgtctctatagtattagtaaaatctctctacaaggtatatttgttgtagtgcaaacacatcctaattagaatatcatcactcacttcttgaacaatcctatcttcctatataaagcaaagcatgaaagaagccacatcatggcatgtaagaagccacatcatcaataattctaattcgtagagacaattcaccaaatggcacttatgagacactcttcaaaatgtctctataacactgtaaaggcattttaaaaatgtctctatagtattaggaaaatgtctcaacaatgtatatttgttgtagtgcaaacacattctaattagaatatcatcactcacttcttaaacaatcatatcttcctatataaagcaagtcatgcaagaaaccacgtcatggcatgcaagaagccacatcatcaataattctaagccgttggatcgcattagtacatagttatcagccgttggatcaagaagctactcatctagtcaccttcttttagattataagtaggcgtgacattgttatccattctgtacataatattatgttttctcctcccaagcaatccaagataatgcaaacttatcttctttatttaatatgaaattattatataagatatgaattttgttttgttataaacaattggataacatagagtaattaggcattattaatccaaacttatttttgaaataagcttgagataaagtaaagatgtgcaaactactctaattatgacggcatgtatattgtgcatgaaaataacttacgtatatcataacaatacacaatgacgttttaaaataataaaacatgaattgtattgtaatagcagaggctatatatgaagccacattatcatttattttgtttatatacagagttacatctaattatttaaaacattgattttatttgatgataaaactagcaaatcccgtggcaaggcgcatggtgccaactagtatatatagagcattattatcattggattctcaacaagtgtcgatctctaattcatctataaaaaattatatgattatttatagcattctagattatgtttaataaaaatatctttccacttcttagaaaactagttaggtaccttatataattacaatattattaacaaatatactaattattatttactcatgtaaaaacatagataatatatattacagagcacacacatatgagttagctactagtattcatgtgcaagtactagtgctgattgtagcaatattattataaaaaataaataagaatgagaaagcgagaagaagatggaacaacagaagaatataagattaaaactttagttttacaccgtattaagacgaagaacaattttgttaatattagtatattattgattaatgtgagtatataccataccatgaatgtgagtaactttttcccacgtgtgtttgagctaatgactaaacctcctttttttttcttaccttctttcgaagttctcctaatgtgttcggtaaaaaaatgttttgttttgaataaaataaagaaacattttttgactagattattttttaagagaatccactatgtgccgcttactttgtccttgtactataatatggcactgagtttgttaagttatacaatatgccatcgtattttgcttaacctctataatatacgtcaccgtccatttagacttcgttagtactgtataattttgttctaatgaccgaaatatccccgggacagaaattccaaaatttggctgaatattctgaaatatcatattataaacaaggcagagaagatattcatctcaaactttggaagttttacaatctgatatttggaatttttcgtcccatggctatttcggtcattatgataaaattatataatactaacagatgctaagtagacaacgatggtatgttatagaagttaaacaaagtgcgatggcatattagaacttgacaaacctagtgacatattatagaataaggacaaaatcaataacacacgatggattctctatatattttaggaaaaattagaaccatgccattataattttgcaaaatctgatatatgtcatcctgacccacatgtcattgactcatgtgggtcctacatgtcattgagataccgatggcatatctcaaattttgaaaaattataatggcatggttccaaattaccctatattttatggttgtttagttcattacctatctactatcgtgcaacatttttataaaaagttaaatcttatgctataagttcatatcatacacattaaattacatacacttataatataattttcaaattatacaatgccatcttcacattttataggagaaatatgaaaaatgatttattatctatttaattatgagaaaaagtattagtccaaattaatgtatatgtagaaaaaaataatatgaaagaattacggaaatacctacaatcgtatatcatgcagtaagaaaaggagaccacaatcgaatcccttattgttgagcaaaattgatggcattaattttatctttttttagctaaatctatctgactataattaatcagcccgtgttagtagaagtctgcatcttcatgcatcaatatatcataactcataactcataagactattagtaatagccaagtacactgacccaacaatacttaatatatcacaagactatcgggtaatggacaactcatctttgattgtatatcacaggagtatcggataacagacaactcatctttaattgtgctaaagaaaaaaaagtaaattatagttcgtactatgtattcttaaatgttttcatattatgtcagcctttaaccattcttttcatttacagaacaactaactttacatttcaatttggaccaacctatttcatccatctccaagtccaatgactctataaccacacactaactctctctttctctccattttattttcccccgatagttggggaaccgctagatccagcaagaaggagcctggatctagcgtctccactcttcatcgggtcgactcctgcctccgtgagtcgctacaatagtatgcatgacaagagggagaggaaaaaaagatggctcatggagtgcaactagagggtgcagttgcgcatgcaaagacagagaggagaaacgatggtggctcataaagaaagagtggtggtggcggtgcgtggagtaatagttagtggttactggtagtatgaagagtttgttgtcgactcaaatcgctaactgagtttgttaatttttagaatgtggaccactagtcattataaagaaatagtcattataaagaaatagctagtcttataaagtagtaaaatattgagatatcataaaggtgagagtactcgtctagagcttttaactttttaccatttttaaaatatggtaattaagaatttactactcacaatctataatacgtggatccttatgtgtatatgacacgagaatgctccttctcggtcgcgcgaggggaggggaaaaaatcggtcgctccacccttcccccatcacgtgcgcaccagcaatctctttgggcccccaccacatgtcccctgtccccacctgccacttgtccacacacacaactctattgcaacaaatcacccacatattttgaaaaccctatattaagggaatttggtttactttttgttccaccaaaaaagtttcacgtagtgtactcataatgtttcactatgtatagatctaatgttgcagtgaactaaaatattccattgcaacaaaaaaacccacatattttggaaaccccctattaagggaatttgatttattctttgttccaccgaaaaatgtttcacctagtgtacttataatgtttcactatatatggatcaaaagttgcagtgaactgaaacattctttcactatttgctgaaacattgtttttatataaggtaaaacaacacccaattgaaacgagtgaaatattttcgatctacttagtaaaacaattccgatatacctggtggaacatcgtgcaacatttaaaaataattcaataataaggtaaattttttttcgtcgaaatatatgcctgtgtggccttgttttgaagatttaattgcagcgaatttaatgatgcaatcggattatgatatggataagtaatttaagagaaaaatcagtttaaaatagtttttcacgtaaagcgtccgatttttctccaaaccgatcagacgcacgatccgtagactcgtccgtccgtatatacatgtgggaccagcggtaaattcttaataattcccaatagtaagagtctgagcgtcttccccttccctttgtggcgtaaaagaaagaaaagaaaatctcccgtctctttgtctcctccgctccttgcgccgccgagacgagtcgcggctgaacaggggaggggcggcgatctccatcggggcgagcagagcaggggagaggattcatggtgagcatccgcatcctctttctgattcatctctctctctcccatcgggactacttttgtctggaatttgcttgcgttcgttcgttcgttcgttaaccctagcttctcttctagatctggaagaagctcttcccttaatttcagagccttaaccttaatacaagtaacagtttgtttattccccgagaagtttgaacccccatgtcccaagttggatccgctcctgtacataatattggcagcttgtggcactcttgaatggaggtcttggaagatactttagtacctgttctattagattggtgtgttataggccctgtgtggaatacaagaattttgctcggttttcacctttaattttccttgtatttccaccttgttttgttagatcgctgttgctcacttgcttgcaatgtaccgttatctgaacatcatatgctttttttctacttgtggacaggtttatcactctagctttgttgatgacaccgggattaccaaagcatgcggctgtcctttgcttccactaaaaactcatataaggggcccagcgccagcattcgatcaaggtatactgacacggtgacaacataaaatacattgtgatatacttccgtggtttcactctgacagaaccatgccaagctgctgatttatgtcgtgctattacagacaaggctgacattgttgatgaagcaattacattcttccgagcaaatgtcttcttcaaaaacttcaatgtgaaaagcccagcagacaagttactgatctatctgacattttacatcaatattgccctgaaaaggctggaaggttgccgaacactggctgttgggacaaaggcaatcattaatctgggtttggagaaagttcctgtgcctggggaaccagggtttcccttccctggtcttttcactctaccccaatctcaggaggaagcaggtatatgacttcatccgccactaccacatttgtgtgcttgtattctcttttactccctccgggttgataatacttgtcgttttggacaagagcacgctttccaaaaaacaactttggccattatttttaattataatatgtataaaggtgttaacaaatatatgattttattaaagtactttttaagactaatctatacatgtagtcaccatattttaaaaatgattcataatcaaagattctaaaatttgacctcacccttgtctaaaacgataagtattatcagtccgaagggagtagtttctcaactgtgtgaaatcattgttgctttttattcctagagaaaagcttgccttatttctcgaatagttagtttttcttcttttcccccaattgtttatccatgctgcttttcttctataccatactatttgtcctggctagggaaaaaacaaaagaatgaagcctattggaaatttagcttttgtgagattacaaggggacctttccaaactacagcaatttatgtcttagatacttttattttggatttaactaaatctgtagtgaactccttatttgatgtcctgtatatatgttttttttttgtcaatttctatggtctaaactataagtctgctctgggtatagaagcaataagttgcttactgactattgacaactgtttttaggaacatccaagttgtaattgcatcagttttttttttacttctagggactaaataaaacagtaactttccatctctcatggaatgtgatctcaattaagcatttctctgttggattcagaactattgaggaattatctgaagcagataagggaggaaacaagtggaaggttgcttaactgcgcatacagagctaatggtactccaaacaaatggtggttggcttttgcaaagaggaaattcatgaacattgtcattctttgaagtataggtattttccgcgacatgtttgagcaattgagcagcttgtaggaatggtaattgcacttgcgtacttatttctgcgaatactttagagaattaaaggaacgacaatgattctacacctcgattgatggagccaaaggttctaatgaaacaatggatagaatgtcaacaatttgtttattgcaatggatgaacacaaggacacctttcagctgttatgttgaatttctatttttcatttttattgtactccgtccgtgcccttaaattgggcatgtatttttcagatgatgtttgaatagcgaatgttccgtgtaggacatttgtacagatttaatcaggtgtaatgagaatgtgaatatatattttcctgatccctcttttttgtatcattcgtgttaatcctttatctgtttttttttcaatatgattataagatatggagaaacctggacgtgcgcttccctgatcttgccaaacgttgggagtaaactgctgcttataaacacctcaagtgtgaattggcatggttaatttcattattcgatgaagcattctttgatacaaggtgcttataaacgatttgaatgcaaagcccattgcatcactgagacctgaggtgatattcaagctctatggcttgtcagtcaccatgtcattcgacacaaaggatatctaatgccaggtgttcatacatagattcagaaaaacaaaatatcattcgacacaaaggatatctaatgccaggtattcatacataggttcagaaaagcattattgaccaccaacgcaacgcccaacagaactgttacattgtgtaaatcctcttcgacaaaaaaaaaagaaaaaagaaaaaaaaaggagagagagagagagagagagagagagagagagagagagagatctcaacctgatcacagagttaaatcccatgacataaggacatcagaagactaaaatgtcgtttttagcgtgtttttaccatctaaaagttccatcatcctggcatgagcaaatccaacgtgttgcttcagcaatcttcatcagagtataataaactggctaattcaacaaccatctccgggtcttcctttctacatgtttgcccagcatagtaaataatatgttggtgttcaaaaacagctaggtttggaaattagcccagttacaagctttccagatagcattgcacaaagattctcaccagtaaatagccagttagttatggttctgcaaataaggcagaaaagggggctttacatgtgacacaaaaaacaggttcagtccatgcatttcttaccatattacatatatgaagatagctggctaaaagtaagacgaagcatgatatggttgaaagcatcaaattacttccacaaacactacacaggataagaagaggaaacctctttattgtttttaaacccagaccaaattttgcagcacacctcagatgaacatgtttccaaacctcccaggcaccttctcaaatgtgtggtcctgagatatttagtattagcatgaaataggtaccgtaatttttgttgggaatccatgctataattttctaaagaatgatgattatataagctaataaaaaggaacttgctcaaaaaccaagtaactaacaagagatattacccattgaatggatgagataatcaatcaaagtatcaaactaacgatgttgcaaagagcatgtatgataaaattgtcaggccatcacagttggtatgtgtcacacaatctcattggttgaatttgatttgaaaagttaaatttgtttgaaatggtaggcttgtagagatatggccaaagatatccacagctttcaatggaagttatctttagtccccagtcctctacaacacatctatctaccaaggattgtacaatggagataactggcaataagaagggctaccactcagcatacagatattagtctaaatcatttggacaaaattccgctgctaaagcaaattcattggttctagcacaaggccaaggctatggcatacagcatgtgatggagttctgtcagatgctatcgcataccttcatgttcaagagccgagcaaagaaaacatatgtgcaaggaataaaacaccatagtgatctgttaagactttaagaacaaaaaggaaaagaagccagtgccagtaggtttgggaattagcaatttatgattttgagtcacatgcagtaaagtacccacatcctaagtgactaagacactggacgaaaattaactcagagtctatgtatagaaacagttgttgaccacgctacaacatgggtatgatgctatttgtctgattttccaaatttaaacttgtcagtttcctatgctgctatgaagtgattattgaatctccaaatccaaagttggtcttgtttataaggatgtagaaataattccagaggtttttgaagatccatggaagaaataccatgcgtgcattctactatatgacccaaaacggcagctacatactcaaagacattggaagatcaaagcagggtttattccaaatatctttgaagatcaaagcagggtttattccaaatagcagtgcagttcacgtctgccagggatagccatagcattgctggcagatcctcctagagccatcagcctccatgccagagaactcatgctgtgattctcacagagcaatatagtacatgctacataagaaaaatattccatttgttatttaccttatgtccacactcttctttggccacaatcttttccttgttttgttttctaacttaccaggcatttatacataattacctatagcagagtcatagacacagacaagatatgcatatatacttctaaatcagcaagtgctatttagacttcatttacctttctaaaaaaatgaaccatataaaaataatgctcactattatcatctgattaaaaaaggtctagcttttttccacatatattattccctttagttctattggtagtgcaagtttgtaaaaataaatatcaataacaacacaaaatgataagttttcaaatcgagtcaatgtacatgcaactaactggtggaccacatgaatcatattctttatcatgtgaaaatgtccatgtatattatgctttgctatatggaacatccttgtggatattcttcctcatttcatgccctttcaaaactctggagaaacctgatacacaacttattctttggagaagtaccaaaagatgtgcggatcaagcagctcttgggcatcgaaaagccgcataacacttacgagatcaaatcgttagtgcaacattgaccggaacatgcttaccaacaaagtcaaagatttcagtttgcacaaccactgaacttctttgtcttagtgttctctccttccagaaggtctcgcatggctttacagttcctaaagaaaagtagcataactgattaataagcagaactgtccataaaacaaccaaatataagttcatcactgtaattatgatcacaaacatcttaaaatatgcttcataagtatgtctagtagtgtttcagtgaagaataacactttgtagaaacatgactcacttttcatcttgggctcttagctaattcattactatcagcatccctcttctgcccatgattgattcatcaaccagaactgttttgacacggctcagagtgctcccttttcatccagtgctagtcacgtagtgccccatatgaacctggctcagttggtatgccagttttaattgggatcactattaatatacagaaccataaaggttttaagtcatgtacacttcacccacctgcatatgtttggagctaattctactcttgaaggtgtaagcatacatttaaagcagatggagaaggcagtgcaaagattttaaattaacttgctgtattctgaactgctgggttacaatttcctattgtacttgtatgacaaaaatggcactttaatttgtactctgactcatttcaaatctaaggtttgtttttccaaacacatcctaggtggcataaacaaaatataaagtggaaaacgtccataaaacgaataaaacacacacacacacacacacacacacacagagagagagagagagagagagagagagagatttcttagattttgaatcattgctcatggccaaaccacatcaaagattgattgtaaagtttggaccttcggtggtggggtgtgtgggtgtgtgtgtgtgggtgtgggtgtgtgttggggctatggggggatgtggaaaaaatgagccaatttttaatacacctaacaacggtatgatgtttttactactgttgaaaatacaagttatatttatgttccatttcataactaacaagttctctttcatgtcactgcttgataatatcataataacattgtttcagatttcggcagtgatttgatctgatcaaaaccatatggcgagctcctcaggctgcatgtacaaagtattactttataaaagttgtcctttgctgtgaaagaatcagatgcagtaacggattcttcatatacagcttcaagagcacccagggggaagatccataagaatgtcccagaacagagcataatatcaggctatcagcaggatccacgaaatggaaaagaatatgatccagacatggcccatcgaattcaagctcatgttcaagactggttcccttttgtattagcaacagaaaccagaagggtacgggggtcagtcagttataagatgcaaacgcaaaagtgacagtttattagctgctcaagcattgtcagcttaggtagcatattccaaggcatatccagattttactcagtgatctttgtgctatatatacctgagttcaacaattaaaatacagagcaaggaaaatattggaagcaaagaatgacgagaggagcagtaatgggcagattgaataaattgtcagggtgagaatcacagtgcagttctcctctggcatggagggcaagaggagctgaatagctaatggatgataaactgctagcctttccctgccaaaggagagctgccctgccattcagtgaccctgaattcagcatgcgagcttcaagctgtgtgttctgttttcagtagaatgttgtgaagcacactgcatgaggtatgtgatcatgactctgtttttcatattctttgagcatcatccatgggtgaggccataacaacctcctgttttaatagtttatagttcatgaaactaatagttaaagagttaaggccttgagggtgtactacaaatggaaagatctagcaacaactctaagcgacacattcacataacatatccacagttaaagaaggtatcatgagtgtcaaatgacaattaagagaaaaatcactatatttaataataaaaacccaaagaaaagtaacaaaaatacatggatttaataagatatgaagtacctagatagggatgtatccgaggatttgaactggggttgtcagaccaagttggtggcatgcagccttgcaacagcaacggctatattcataaaaaaaaacagaagatgatggtaacaaaggttgttctacttcttcaccacagcatgccaccttgaagagcatcctgtccaccatcgaacctgccactgtttatagttagaactcatttatagttccatagctaacccagtcgctaatccaaatcaagcaccatagatatttggcatgttctaattaaccttcctatccaaacagtgggagcaatcatttgaaaatgtgaaccatccagtttcttgccaatcctatttaagttagacagaaaccctcatatacttaccctcaatattaagagcttcactaatcggattctccattaccacagaaaattagaattttggtacctaaattttccaattaatgaaatcatttgaaaataaaaacttaatagtggtacagcatttagcatgaggtagagcaagatttaagacatggaccaagctgtcacaagcaacagcattgctcagaaaaatgctctagaaaatcaacaaagctatcatgcatcatgatttcctaaaggattgcaattttattacttatagcaatgctactcgaaaatacaagcttcgatctaaattctatatgttagatttaaaataactcagtcttaatatgctacattatgcccgtcccagtgacagtccttatttttcttttaaaaatgtgctattatttagaaaaattctattatttagatctaacatattttaaaataactccgagctgtggccgttcagtggctgcagtgcttatttttcttttttgttataactatatttgttcagctctaatcttgtttaatttagtctaataataggaccttcccctagtatcttagtctaataataaggatccctccctccctccctccccctctctctctctctcttgatttggaggtgaatgattaatgtttatgcatgatactaataattattgttttttgcctgctctgctttttcttcttttcttagcaaaggttctcctgcttgctagctaggtggtaatagtcatggccggggacagagtcaaggccagggggagtataaatgtgcatctgtggttccacctagttctgtgactactgcagctaaactcttctttcatgatgcacgtaagagggtcaaagaacttgattttgggaacctgctcaatataaagctggagaaactgacaagtagagagcttgctgcacggctaacagatcaagctgaaattcaaacaaatcaagaccaaactgaactcaacaacaagcctggagagtcgctatgcatcacggtagaagtagtgcatctaattcttaccatgcggcgtggctctgttcaggagctcacgtcactgcctacaaatgaggcatcaaaagcattcatctcgatatacagtgtgttgaaggtcagggatgacaagttctcaaaagtaaaacccattgggatgctccttttgatgattgacactaaggtacttggtgttgtcatgtgttgtagttaacatttgtttgttcatggaattggcgcaaagtatcaaaggtgttcaaaaagagaaatagaaagagtacactaagtaacatacctaacaactggaaagaaaacattaatgaggaaaatatataatcgatgcagcaaatacgaagtaaatgatacacattgttgaaaaaatgagtttgcaatatttgacactggcacgtaaggaacacagcagaacagaaaattatgaaaatagctttctattttctaatatatagagagaaatgaagatttgtgggacaaccaggtaaaagtctaatttatagagagatgaagatttgtgggccaagcaggtaaaagtctgaaaaataatgatttagatgattgatacataatggcaactaagtggcatagctactatgcaagactgcagtccacataactactatggccattcctatatgcataaatctcattacaaaatgatcatgaaagatctatttgattcctaactaaacatatacttgcacataaagttagggccttgggggagacaaatagcatttgaaaaactagttaactacagcgcgtgaaggcaatgactacctgacatcgtgaaatgacacaatagtaccacaagggacaactaagccaccagaaaagaggtagaaaaaataccacaaaaaatttagtcaagcagttaaagcctaaagatgttatttggctgtcaatacaaaaggggcaagaacaacaaaaagcatctacaaacccaaaatacatggagagtcatccaacttgtttagatgtgtcatataggtcactctactttcaaaatgcacatttgagccatctaactatccacgtgagcacaccttgtacacctagcgtgccacataggattaaaaaaattggctgggtatccgcagccgctgtctcctaggattgcgcctccatctctgtttaagcttgtcgttgctgccacctaggattttgcctccattgctatttacattcatagcttgtcgccgcagccgccgtcaccatgtttgatggcaagcaagataaaggactgagaactagaagaactcatcaaaacaagcataagtgaaatgatttggtttccctaatttcgtgtatctccaagtgctagggttgtgagaaaggaaaaaaaaatacacatgcggttttctgcacatgtccgagagcatttttttcaattataggtggcatgccatgtgtacaaggtatgctcatgtggatagttagatgggcaaatgacttgcttaattcacattagtgacctatatgtgtattttgaaagtgaagtgacctacatgacacacctaaacaagttaggtgaccctccatgcattttactcatatatctagtactacccaccaaagaaatactgttaggcatttgcataagttatttttcatgacagaagtgtaagaactagaatccctggtttattttccaccgtaaatgacaaaagaaatgccgacataaatacattgtcggtggagtctaggagcaatatgccgaataacaggtacagcaaaggaaatacggaaccgaccggcatccaacattctataggattcaaatggtcaatatatccatcagtaaattcagtgtatcaaatgatttcagaacaacctttgtcaactaggtatttgttttatgcatctgaaaaaaaaacagtattagagaatggataaatcataccccgatgattgtcactgagagccttcaacttcatgtccaaagctcccatcatcacaaaccaaaggaagccaggccatacatatacggtctcctgaaatctctcctgaaacagtctctcaagcttcatgttctccaggcaaagtgagaagaattaagtagggggcatggccatcaggggagacctccactgttgccaagtacacataaccagccctaactcacacaactctcatgcccttgtaactgagatatgggtgtcaaagagaatatcttctgtgatgcccatctcgcaattccgttcctgacgactctagggatccagatgaggatgaggaagtctattgcatacacaatgcaaagccctcaatccttagtctccccagccataaaactgcaacccctgtgtcattaattcccatggtaattccaccctggagaattccatggccacggtgttcagcgtcattcaccatcgtaaggccagtaaatcgagccatccactagcacgccagcattgcctcatgttgctgtctccagcaaactcaacccatggatggcgatatggatgatccaattccaatcccatgggtctcggaggacgaaaagaccgcaagcacaaagcctgaattcatccctgtaaaccggaacagcgcggaagctccatgctcttcctgttccagctcgatgccaccgagcaacagcggggatgaagtacacgtcccagatcaaaggggtttaggatggcgagcctcctgtgggttcagcaggaggaggtcgccacgccacggcatgccaaccgtgggaggcgtagtcctccagctcgtggctccacggagggcgacggcggcggcggccgaagtccggggtgccggggaggatggtgaggccgccgtggtcggtgaagagcccgagggggcagggtccgggtgggtggagcaggcggcggaaccccggcgaaaagccgggcggcgcgggagcccacgagctgcaggcgaggaccgcgcggacgagagggcatggagggacgggagggcgaggaggatgtcgtcgttgagggaggcttacggtggtgctggtgctggtgctggggttcggttcggctccacggaggcggcgccgcccattgctcgaatcggaatggattgcgggggtgtgagcgcctgaacgagtggatggacggttgttgggttgtgtacaacggtatccattctctgtattagaaaaaaaagaagaagaaggtcaatcctagtcaaggtttgtaaggaatgtgtttttatggaaactccgttcgtaggactaccttgcatgacgccgttaatttttgtgtttgacgtttgaccattcgtcttatgtaaaaaatttatataattatcatttattttaatgtgacttgattcattaaatgttctttaagcatggcataaatatttttatatttacacaaaaattttgaataaaacaaatggtcaaacgttagtcgaaaagtcaacggtgtcatacattaaaatacggatggagtattgtcgacatttgatgtcgcgattccggtatttgcatagtatggggatcgttggtactaagatatacgcgagactgaggtaaaagagatggagacgatgatttttatacaggttcgggcccctgaattatcaggtaataaccctacatcctattggccgaagccggtcattgatcttattcatcataatcacaccagtacaatatttggggtagcctatctaactgttgtcaacgtggcggtctaaagatctgactcgtagtcgacaacagggtagccttcctcctcaaatctgcatccggcgagatcagagatagcgctagattcctctctttggttcccgtaggtaccatatcgggttttcctaggcttatgtctgatgtcgatatctagcagcttgtcttggcctatgtaggcttgtattggcttgtggctttgtggcgtctatgttgtccgtgtctgttggttgtgtctcctcttctcctagggggccttgtatttatacccataggtgtccccttgtccaagtagaactagggaaaccagtatggatacaatccgagtagtccttgtcgtttccatgtagaactctagtcattcttccttatgcggaactcctcctatatccgaaggttgtttccgtataagacatggtatgtggtgggtcctgccgagatttagtcgactactattaggtatgtggtatccataacactgacagtagcccctgacttcaatgcaaatgaacaaattcatattctcaaccgcagaccctggagtaactgttatcgagttcacgtgaccgttctcggtgagttcagagataacgttagacttcccttatcagcctcgtgcgggcacctatagggtttgtctgagtcaatctccggcgtcaaccaagaaaatacagagcatacgactaagtctcccgtcttgctataatcgagaatttggatggaagtcaagaaattttatctcggcgggtacaccatgtacaccatttcttcattccgtattccttgtcgagatccaccaaccgttctcgagtggtcgagaaggcacagagcttgcgacgaagccttgtcaacatctgttgtactcgccttagtcgatcttagtgtagaaccatagagacatggagttttcaacaatgtcgaatagaatttccttaaatcaatactcagaaaaggatattagatagaaatagcccccgagcaaacgctcaaagggtgacatgttataatgtgcatggaaaactgaaaatgaattaaatttacagaccaatgttttgtgtatgagcgtcttctcttttaccgacttcgatcagtcagtttgttgagtcatacactctccctaacccccagccttttcatcggagaatcgttctcggaggataagtctcttggacccttgacctgccttggttgaaaaagcgctgaccctagcccccagtcgtgaagttggaaaactcaatttccgattacacggcttggttaatacgcacggcgagaactcttacatgaccagatcttacatggccgtttgtctctataggatccgacaaggccttatccgctctgggcgtccctagccaaagttcccttaggtttctcagaggccttgtcaggacggcgtaaagggacatgaggataggtttcaactctaggtgtcgtcgtggtaagggatctctgggtaaaacacttggcgatattgtgtacctgatatcaactttgttggagtagaggtagtgggagaatcgttatacctctggtcgaggaccaggtagtagtcgtaactcgaccacttgaagtagaaatagtgggagaatcgctacaccgctggtcgaggaccaggtagtagtcataacttgaccacttgaagtagaaatagtgggagaatcgctacactgctggttgaggaccaggtagtagtcgtaactcgaccactagaagtaaatgtacgagagatcgctacgattgactggttgagaaccagtgagtaggtgtctctcgaccatttggagttgtgatacgaggaccgctacgttgccggttgaagaccagtcgtagatgttcctcaaccatctgaagtcatctgaattcgtggtgcgaggaccgctacgctattaccgtagttgtacctcgaccatctaaagttaaagcgcgagagattgctacaatttactggttcaaaaagcagcgagtagaattatctctcgaacgccaacggaggttgtagtgcgagagattgctacggtttactggttcgagaaccagcgagcgagtagaattatctctcgaacaccaatggtagttgcggtgtgagagattgctacggtttactggttcgagaaccagcgagcgagtagaattatctctcgaacaccaatggaagttgcggtgcgagagattgctactgtttactggttcgagaaccagtgagcgagtaaaattatctctcgaacaccaatgggagttgcggtgcgagagattgctacggtttactggttcgagaaccagcgagcgagtagaattatctctcgaacaccaatggaggcgctagagttggtttattacatgtgcatctcatgtgggcagcatgactcacatacccaactcgtagcatatccggatgtccgcctgcgatcatttcgggtgatcaagccgacatcgtttgcgagcaattatccgttaacaacccttttctcaaatagcctagccaaagccggcgctatgagataggtcgtcggtcttcgttggtaggttgggtgcgacagctctgcatttgccgagaacgttctcgataatgtatgtgcttgaccacaacctactcgagtgctcacttattcctgaaaaatattttctagaaggcaagatatatagcagagaatatcgagtatatactcaaaaaactgcatggatcttctagtattatcagaatataacgagcagatgtaaacatcatgcattatgtaaaccataaagaagcatgatttatacagaagaaaatagagcgagcccccagcgttagactgtagtcagcctaacaccggaaacactcgcataatagatattgtataaaagacatgctctaggtaaacataataaattatagatctgacaatactgtatgatctgaataggtatgataaattacatataaaatattgcgtacctttgtagatacatgccggatgtatctatgaaattagtagattaatttaaaaaaccaatctaccaattaacttgtcgcgtactcgttcgacatcatatgatctgacgtcttttggtacgccgcttatcttgaggcctggtcgatctcgagagatcaagttgttgatgatgatggttccgatctcgtcgggagacatactccggtcgggttggatctccccacagcgaagtcgtcgagtagcttgttgtcggagaatctatctcttgaacccatctcgtcgaaatcctgaagcaccaaaatcaccctacctggcgcgccactatcgacgtttgatgtcgcgattctggtatttgcatagtatgaggattgttggtactaagatatacgtgagactgaggtaaaagagatagagacgaggatttttatacaggttcgggcccctgaattatcaggtaataaccctacatcctgttggccgaagccggtcgttgatcttattcatcataatcacaccagtacaatatttggggtagcctatctaactgttgtcgacgtggcggcctgaagatctgactcgtagtcgacaacagggtagccttcctcctcaaatccgcatccagcgagatcagagatagcgctagattcctctctttggttcccgtaggtaccatatcgggttttcctaggcttatctctgatgtcgatatctagcagcttgtcttggcctatgtaggcttgtattggcttgtggctttgtggcgtctatgttgtccgtgtctgttggttgtgtcccctcttcttctagggggccttgtatttatacctatagatgtccctttgtccaagtagaactagggaaaccagtatggatacaatccgagtagtccttgtcatttccatgtagaactctagtcattcttccttatgcggaactcctcctatatccgaaggttgtttccgtataagacatggtatgtggtgggtcctgccgagatttagtcgactactattaggtatgtggtattcataaccctgacaagtataatataagagattttgattttttttacttgcactatttgatcattcgtcttattcaaaaatttttggaattattatttattttatttgtgacttactccctccgtcccataatataagggattttaagtttttgcttgtaacgtttgatcactcgtcttattcaaatttttttaaaatt

SEQ ID NO: 6447 - DNA, 830 bp, Oryza sativa
ctataaaatttcaagagctgaagcacatccacctgcacgagctgccctctctgcaacgcatctgcgggcataggattgtggcccccaagctcgagaccatcaaaatccgaggctgctggagcctcacccgcctaccggctgttggtcttgacagtacccgcaagcccaagggggattgcgagaaggaatggtgggatggcctgcagtgggatgggttggagaacggacaccatccttccctctatgtgcccacccactcacgctactacaagaagaaactgcccagaggttccatgctcaggtatgtacatatgtctgtgtgcatacatgattgttacttgggtatcattccttgcgcgcacatacatacatacgtagaaacttatatagctcagtactttagttactccatcatatatatatatatatatatatgatcgagcttttcccttttttttttaattttgtctgacttggcgtgctttcttttcttcttaaattcaggtgatcgatatatacgtccatacactacatatttgatactgtaatcatctacgtatcattccctttccctcatccagtggctcatcaagttcttcagctctatctctattatatatgtccttatttggggctggtgttcaaagtgctcgctcatttcatcatatcatttgcaacggcaacaatatctaatgcatgatgagtaagtacatctccggccggcatccagacgctcgtcatctgcttgttactagcttggattctgttcatttctgcttcttttgttctgtgtgaaaattaataaatggacgctcaggggctgcaggaat

SEQ ID NO: 6448 - DNA, 11574 bp, Oryza sativa
accttatgcggaattctcgtacaacaacagttatcaagctagtcttcagatggctccttacgaagcactgtatggtcggaagtgccgcactccgcttttatgggatcaaacgggagaacgtcaggttttcgggacggatatcctgagggaagcagaagaaaaggtgaaaatcattcaagaaagattgtgtgtggcccagtctcgtcataagagttatgccgacaatcgccgcagagatttgagtttcgacgaaggagattatgtgtatcttcgtgtcacgccttttcgaggagttcatcgttttcacaccaaaggaaaattggcaccgcgttttgtgggaccttataagattgtcagtagaagagcaaaggttgcttatcagttggaattacctcaatctttggcaggagtccataatgtgttccatgtgtcgcaattgaagaagtgtttaagagtacctaccgaagaagctaatcttgaacagatagaagtccaagaggatctgacctatgtggagaaaccaatccgtatcttggaaatagatgagagaagaaccagaaatcgagttatccgtttttgcaaagtccaatggagtaatcactcggaagaagaatcaacttgggaacgagaagatgaattgaagtcagcccatccgcatctgttcgccagttcttccgaatctcgaggacgagattctgtttaaggggggtaggtttgtcacatcctaaaaatcctaaatttataaattgttgtttaattggaattattagaatttattttaaaagcctagaagagaagatctaattttaattaataaattccaatataaaatggggccagataaaatttcattaaataacttgcttaattctataattcctagatttttctgggatttatttgagctaaggaagtatttttaataaatggaattgcatttcatgaataatttaaattgaaaaaggtctttaaaagtctcttttggctttgggccgaaagtcggcccaaaacccctttctctctctccctcggcccagtcggcccagtccagcagcagccgccgctcgcgcgcgcgcgtccgtccgctgacaggtggggcccacctgtcagtcttcgtctacctccggtcgccgccgccagaaaccctagcgccgcgccgccgccgccgctttccaaattcggccgcgtctttcccgatccggtgaaatcgattgaggggaaacgatcttcgggatctcctctaccttttctcttttggaatcatcggctaaaatcgtttggaaattcgtggattcgaggtcgaatcggatcggtctctttcctccgaaccccaaagtttccttctcgtcgccggtcgccgtgggccttcgccgccgcctccttgcccctataaaaggaaccccggtgtctccgctacccgccgccaccctcgccttcgtctctcgccgtcggaagcgccctagccccgtgtaacctcgtgccgccgtcgtcgccgccgctccagccgtgcgtcgccgccgttccggtcgtcgtcgtcgctcggggaggtcgccatcgtggtcgccgtcgcgtcgccgtcctcgtccgcctcttcgccgtcgctgtagaccgccgtcgtcaagccgaaggtctccgccacttcgatctcgtcgccgccgccgtccgttcatcttccgccgacgttttggtcatcggtgagttcgccgcgtcgcgctctacgtcctggtatcctccgttcgcgtcgtcgcgccgtcattcgccggcgagcttgcacgctgtcacaccctaaaaatcctaaatatataaattattgtttaaatggaattttttttagaaattattttaaaagtctagaagagaagatctaatttttaattaataaattccgatataaaatggggccagataaaatttcattaaatactttgcttaattctataattcctagatttttctaggatttatttgagctaaggaagtatttttaataaatggaattgcattttatgaataatttaaattgaaaaaggtttttaaaagtcttcttttggctttgggcggcccaaaaccctctctctctctccccggcccaagtcggcccagttcacagccgccactcgcgcgcgcgttcccgtcgctgacaggtggggctcgcctgtcggagtcgtcttcctcctccggccgccgccgcccgaaaccctagcgccgcgccgccgtcgtctccttccaaattcggccgcgcctttccttctccggtgaaatcaattgtggggaaacaatcttcgggatctcctctaccttttctcttttggaatcatcggctaaaatcgtttggaaattcgtggattcgaggtcgaatcggatcggtctctttcctccgaaccccgatgtttccttcgcgtcgccggtcgccgtgggccttcgccgccgccctccaacccctatataagaacccccggtgtctcctctacccgccgccaccctcgccttcgtctctcgccgtcggaagagctctagcgccgtgtgacctagcgccgccgtcgtcgccgtcgctccagccgtgcttcgccgtcgttccggtcgtcgtcgtcgctcggggagatcgccatcatggtcgccgtcgcgtcgccgtcctcgtccgccacttcgccgtcgctgaagaccgccggagcaccgccgtcgtcgtcaagccgaagaccgtcgccaccgccgtccgttgcttctccgccgcttctttggtcaccggtgagttcgccgcgtcgcgctctacgtcctggtgccttccgttcgcctcctcgcgccgtcgttcgccggcgagcttgcgccgtccgagctgccgagccgccgagccgccgccggtggtgacgtcatcgccgacgtcatcggggccgtctgccgtgagccgccgtagacccgatcgatctcggccgttcgttttggataagatcgatctcggccgtccgttcccgtgaaccgctgccgtgcacccggtcgaccgctaaccctagccgctgacgcaataattcccttttccttttcaaaaataattcattattgcgtcataattcaattaaaatccatataagtgttttaatccgatttaatctttacaaattcataactaattcatcttagctcggatttagttggttcaagtctctaaatttttctaaaattgagatctacatgttaaaaatatccacatgtactgttcatgcctgtttatgtgctgttttggtgtttttgctcttttctgtttagattccgacgtttccggagagtccgttttcgcagaagaagaatttgaagagttccaaggccagcaaggcaagtcacacagatcccaaacaaccctttgagcatgttgatcccgtttaaagctactgtttctagtcaactattgcatttattttcgaatgtcattgggtggaattaacctattgtttgttatagccctttttgattttgattactttattccttgataccttgggttattataacttgactagttgggctatatatatattggttcaactagatattagatatgattgcttagccatgcttagaaacattagcacactattgggataactcatgattcactattaattaattaatgatggcttaatgatagttcacgatggtcaatcgtgattggttaattaattacttgccaactaaaacctgataatggtgggttgtgagcacatggttttgagagtcgtgctcatgacaattaaggaccggttcacgagtttcggttgtgaaacattaaccgtgccaaccacaagccagcgtgggcaacggctttaccttttgtatagtacagtttattgcggggcaccagactgaaaagtggcggagataagcccacggggccagactgagaagtggcagagataagcccacgggggtcgctggggagtccatgccttgttataagggggtgattatgatgcaggaatggtgcgctgcggtggattgtgttaagcaaggggtattgtcacatctcctttccgaggtaccgtggtggtattgaggcacatggtgacatgatgtggggctgtgtcttgtgggtacagtggtacacttctgatcagagtaaaactattcgaatagccgtgcccgcggttatgggcgggtctgacaatgtctttcgtgattagtctcacacctctcatcataataaaagatgctataactggtaataatttgtttagctcctagtttggaatggtatattcctggtttggagatagatctgtacagccgggtatggttgttcagaatggttgggcctatacaacagggtatgttgtatagcgttggattaatattgtttaaatattacttaactgttttattaaattctcaaatgtttgctaaatgctgtttatgcaaatggaaccctattatgccatcctttgttatcctgtgcacttgcatatttgctgcgtgacttgctgagtatgtcatatactcaccttgcaatcattcatcagaggaagagttctacaatgatgctgatggtatggaggattaggtgtagccctggtcaagctgcctgtggagtggagtcgtttgcgccgtttatctttttttttccgctgcttagatctttattgattgagaggaactatctacctctgtaatgacattttattcgctttttaattagagtaataattgtactctattatcaatttgttattgtgtgcctcggttgatttctggacgagggttcacacacatgtaagcgtttggaattttggatagaaattcagggcgtgacacgcgcccgagccgccgagccgccgccggaggtgacgtcaccgctgacgtcatcgtggccgtctgtcgtgagccgccgtagacccgatcgatctcggccctccgttttggatggatcgatctcggcagttcgtttccgtgaaccgctgccgtgcgcccggtccaccgcaaaccctagccgctgacgcaatagaccccttttccttttcaaaaataattcattattgcgtcataattcaattaaaattcatataagtgttttaatccgatttaatctttaaaaattcataactaattcatcttagcacggatttagttggttcaagtctctaaatttttctaaaattgagatctacatgttaaaaatatctacatgtactgttcatgcttatttatgtgctgtttggtgattttgctcttttctgtttagattccgacgtttccggagagtccgttttcgcagcagattcaggatttgttcccaatggcgagtttgaagtatggtctacctcttctggatcaagggtgttatggattatagtccaagtgactatttggcgcacattgattttatcatcatgaggttgtttagaggttgaagatttttatgctacaagggaaattcgtctcaagatggagattgttaaatatgtgatctgaattttgggcccacaatatattcggattagttatctaataggactctactttatagaattagtttcctattaggactcctagatttctcctatatatatcacttgtaagccgcacggagagggtacgacagcccaatgtatcccctgcgtttgtatccaattcctctataatgatcattgccggtcggtgcccgtggttttttcccgcaagggttttccatgtctccgttgtgcatctattttcataacacgaccgatagcccggccttaatttaccgtatcgatgatccgttctctaaaggaagttacagtgatgaggcggtttctactggtatttttatatataaaagggcattttatctttaggataaacagggatacaattgctttcgctcagaatagcttgggtcaccctggaggcctggactgacaggcatattagcttagatgaagcaaacaacactcctttcgctttatatctttttctttatgcatgctctttaattaaggagggcccagcagcgatcagtggcagtccaagcaacgaatctgatgattattgatggagcgcacagcttgggagatagtatatcgatttgggacacttttgccgaaaagcacattaccaaagcaaacggaaggaataatagaccaagcatgtaatgcacgcattctatgtaggcttctgctagctccatcagctctccccaaacatcatcttgcattcagttcttcgatcgtttcattttgtatgctcccatgatgcgtgcaagcatggcttagtttgttcactcccggccgcccagttttctcaacatcgtgatcaaggtaagctacatgaatgcagcttgctttctcaacatccatagttttatatatgtacaaataatcaacacagtgatatataagagtcttatatatctctctggagttttggttctcaacgagctagcaagggacattcttgaatgcatgtttcaatatactccagttaatttgtatttagttttatatcatcaatttatattcatatagaatcattgattaattaaattaaaagaacatattctagattttgtaacgtacgtgcgattcaaagaacatcgactgatcaagatatgatggagctgctcgcctagactgtaattcaacaattgaagatccagctagctagcaagagatccaggcaacagatcgactcatcatgccagcggatgaggtatatatttcactccgtgccaatgtgccattatatttttttctcttttcattttgaatggaaattattcagcgaccatgcatgcaaaatttggcattccctctgtttcatattataagactttctagcattgctcacattcatatatataaatgctaatgaatctaaacacatatatatgtctagatttattagcatatatatgaatattgacaatgttagaaagtcttataatatgaaacggagaaaagtatatattagctaggcaggcatgtatgcatccaatttggatgctattaatttgttcaaacacactttcattaattcattacatatatatggggtatattttaatttagacccaggagtgtcattaatttattcagtttggtggtcttctctataacttcactggttttcaaatagaagtccggcaaaatctttttgtattttcgattacatatatatgacttatagtacataactcaaaatatatttactagcttatatagccacacacccccacgcaggccatatataacaaacttgcccatatctaactccacgacccaaactaaactttcagctgcatggacacacatgcacacttgctaattactacctccgtattttaatttatgacgccgttgacttttttatccatcgtttgaccatttgtcttattcaaaagaattatgtaattatcatttattttattgtgacttgattcatcatcaaatgttctttaaatataacatctactgacacacttcacgccacgagactcacttcacttgacacatctactgcatgcaggcacttacatacaactcatggctttcactgatatcacactaattaactcacacatgcacgcactgtcgtgctcctagcacacacgcacacgagacttagtatatataactcaaaccaaaagatcacttaaacaacaacgagattaaaccataacactagctaattaactatactatagtacgtatcattaatttgaaagttttccaccaaaaaactgtcagaagtacggtgatctatttcaaggccggaggatatggattggggtcatccgccgtcctcaaagaggtggccaaacgactgagatggtcgtctgtaccggagaagctgaagctggggttggacaagatcatccacgttgattgctctctgtggcagagcaagagggccctgcagaaggccatcgcccaggagctgaagcttcctcggtgggtgatggccgtgtttgatcagcgtgacgaggaggatgatttcgatggcgtggagcacggtgccagaggggtgataccagatgtcactgaggcgattcttaatgagcttgccggtcacacatgcctagtgatcttccacaacgggagcggcggctacatagatgtgcaggagtgcggtgttcctgcaataatgggactctcgagcaaaagggtactgtggacatcccaggtcaggtttgggccctggatcgggtccgatttgcagaagattgccggattgagcgatgtcgctatgtttgctaatccttttaatgttcaacccctgctgcatgaagaggctgaggaggttgctaggtccactggtgtcccaaaacctggcatgagccctgagattgtcaaggagtgcatcatgtactacaaggtggtgagactgttagatggaaaccatggtattgactaggccacccacgcggctaactactgggtatgcagcgggatcatacgatccgctggtaatacgtcagcatgggagattgcccaagctttgcataccaacctgagattggattggaatgacaatcagaataataatgaaagaaaactagctacactacaagtgccatgtgattctgtaaaggcatcattcttctggatggaagcaaccggaagatgtaaagaatcactagaggatggaatgtcccaacattcatctgtagacaggttgcgtgtgataaatctctcccagtgtacatttagttttacatctccgcccttcctcggttgtagcagcctaagattcctcctacttgaccgttgcaaagacaaagacaagctctgctcaggctcaacaccaaatagtactagtgctggagatactgacaaggagactggtattagtagtggagcatgtttccagaagctatgggtgcttgacctgagttacacagattggtattggctgctatcagtagaggcacaagatctgatggttgagcttagggagctaaatgtgaagggggtcaagcattggagcataaaccatctactccgtgatggtaacaattctagtgctggtgtcggaagcagcaccaagccccttgggctactcaaccttgtcaagctccaagtcacaaccgaaccaataactgaagatcaacatcagtcacaagtatggaaggaagatcaggtagcagcaacattattcccgaacctgtctagctgcaaaatcgtaaagacgatcattcttgatggttgttttgagttgacgcgaattgaccctcatgacctaccgccatcactcgagtcatttagcttctctagcagcagcaatgacaatgatgttgatgtcacagccaagatagagagcatctccttccgaggatgcacccagttgaagagtgtgcttttgagaggagtgtttgagaggctcaagcaactcgacgtctcaggcacttgtattaaaaccctcgacctacgttcaatgcgaggcaactggtctctcaaggagctcctactgcttggatgcaaggagcttcgtgcaatactatggccaacacaagatgtatcattggaggttctgcacatcgacactagtagcacagaacttgatcatgctacaggtgtagaagaatcatcatcattctcacctgttgaatttaaatggtatatttcagtgagggacagaaggctccttcgctcgctaaatgatacaaaatatcccttggatgcaccatgcatcgagatctcgtcccctcctgctagtgttgctactgctactactgatggttctgaattaggcggaacaataagcaagagaaggcccattgccgttagcagggctgaacaacgttggttgatgtcgaccaaaagccgacgaccagctgctgacaacaagaagttatatgcggatgtcgactccacgatccagcacttgcaactacaagcaaccatgaacggcaactggatgtggccatgtaaatcggagggcagcacctctcactacattagcttacaagatgataagaggatgcagacgaaaccattgtcgtcgccatctttgccaggttccatctgtgaaagagcttcaggcctgcacgtgcatgacagcttgtctatcgcaagtatcacaagccattcagataaggcacggagatggaataacctagagtggtgcagagtggagagatgccctaacattgaaggcgttgtattcactccacctagtaccggtagtgacacaattttctgtcttctgaggacattctgggcatcccaactagcaagggcgcgccacatctgggactggggcacaaggggccagctgcattttgagcctgaagatgggtcattcgacctgcaggtgctacacctagattgctgccccaggttgatatatgtgcttcccttatattacaacagtctttcctatgcatactgtgtgttggaaacccttgagattgtgtgctgtggtgacctcaaggatgtcttccgagtggatgataataatcaagagcttctggtggcaactatagaattctcagagctgaagcacatccacctgcacgagctgccctctctacaacgcatctgcgggcataggattgtggcgcccaagctggagaccatcaaaatccgaggctgctggagcctcacccgcctaccggctgttggtctcgacagtacccacaagcccaaggtggattgtgagaaggaatggtgggatggactggagtgggacgggttggagaacggacaccatccttccctctttgagcccacccactcacgctactacaagaagaacctgcctagaggttccatgctcaggtacgtacgtatgtgatatgtctgtatggatgaataattattacttgggtttcattccttgcacgcacatacatacattcatagaaacacataaagctcattactttacttactccatcatgtatatatatgatcgagcattttcctttttcttaattttgtctgacttggcgtgctttcttttcttgctaattttaggtgatcgatatatacgtccatacactacatatttgatacagtaatcatctacgtgtcattccctttccatcatccaatggctcaaaatcttcagatcgatctatctctattatatatgtccttacttgggctggtgttcaatgtgctcgctcatttcatcatatcatttgcaacggcagcaatatctaatgcatgatgagtaagtacatctcccgccggcgaccagacgctcgtcatctgcttgttactagcttggattttgttcatttctgcttcttgtttttttgtgtgaaaattaataaatggatgctcagctggtgtgtgagctcatctatctgctaagttattttctccatacatgcttgctttccgtttggtcggttggtcgatctgcttgttcgaccgatccatccatcggattactacgtatgcttcatctttccggatagatgatcatacatgcatatgaaaactttgatctctagctccatttctggtgtggtgtgctagctagagatcgacgaataaatcatcagcttcagcggcatgagcagattcattgggtgatcctcatgcagtcgagttgctgttgtgcacttgtttgtgggtgcgtgtgtgttcgtgtgatttg

SEQ ID NO: 6449 - DNA, 1036 bp, Oryza sativa
gatgaaattgaatcctgaaaagtgcaccttcggagtaccgtcagggaagctgcttggttttatggtgtctcataggggcatccaagccaacccggagaaagttactgctatcctcaacatgaaaccgccaagcacccagaaagatgttcagaagctgactggatgcatggcggcgctcagccgattcgtttcaagacttggcgagcgggggatgcccttcttcaagctactgaagaaaacagataatttccaatggggacccgaagcacagaaggctttcgaagatttcaagcaactcctcaccaagccaccggtcttagcttcaccacacccgcaggagccgttgttgctgtatgtatcagccacctcccaggtcgtgagcacagtcttggttgtcgagcgtgaggaagaaggccatgtccagaaagttcagcgaccaatctacttcgtcagcgaggtcctgaccgactccaaaacgaggtaccctcaggttcagaagctgttatatggtattttaattactaccaggaagctgtctcattactttcaaggtcactcggtaacggtggtcacatcatttccactcggcgatgtactgcacaaccgcgaagcaaatgggcggattgctaagtgggctttggagttgatgtctttggacatatcattcaagccccgcacttcaatcaagtctcaagcgttagctgattttgtcgccgagtggaccgagtgccaagaggatacccccgtggagaaaatagagcactggaccatgcattttgacgggtcaaaaagactttcaggcactggagctggagtggttttaatttccccgactggagaaagactaagttatgtactttggatacatttttcggcgtctcacaacgtcgccgagtatgaggcgctccttcatgggctacggattgcgatttccctagggataaagcgtctaattgttcgaggtgattcacagctggttgttaaccaagttatgaaagagtggtcctgcattgacgacaacatgatggcatatcga

SEQ ID NO: 6450 - DNA, 16973 bp, Oryza sativa
atttgaaaactttcaactcgaaattttgaattttttaagtcaaattttgaaaactttcaacttttcatctcaattttgaaaactttcaacccagatttgaaaactttcaactcgagatttgaaaactttcaactcagagttgaaaacttccaactcaagatttgaaaactttcatctcaaatttcaaaaactttcaacccagatttaaaaactttcaactcgagatttgaaaactttcaagtctaaatttgaaaactttcaagttaagatttaaaaattttcaagtcatgatttaaaaagttataacacaaaatatttaaaagcacttgtgctgaaatttttaaaaagaataataaaaaagagcaaaatgaaaagaaaaaaatcgccaaaaaaaaggaaaaacgcacagaaaaaatcgctaaaaaaaagagacccgtggcagcgggtggagggcgctcgcgctagatacggatctggcgcgcgcaccaattagcaaaagcccatgcatgtaaggttgcactaaggacggagatggtgacacaatcaaggtcattgttgacaaagatgttagacattgatggtgatgctgccaaagctgttgaggaatgacttgggagcgcaatgcgtggcatggaggggaaaatgctgctgtggtccactggctcttgtcttagaaggatgaatatagttggtgaagaaggtgatggtgctagcgatgaggtggggtggacgaacgaagcaatggctaaaaagtaaaaacagcatggagtagtttttgattaaaaaaatgatttccctggtttgtggaaactcagttttcattattcatgggtttatttatttaaaacatgattaaggtaaatcagttttataaaatatgagatgacaacacctaatagaagagactatggttcagaacatctgatccatgctatgtaattgaatgatgaaagttttgtaatatacatgcaacattagtgatggagggggaaacattacttaaaaaaattaattattggcatatcacactagatgtttgatgaaccatttgtaactgaaatgtgaaacatcatttaaaacaatgcacaatattagccaaacggaaagttatgcataatctctaaaaataattagtgaaaaataaaaacaagagagtttaatagtcgaatgcagtgagtgcaccaaataaagaaaaggaagcaacacaaagatgttgaggccgccatgcctgtgccacctcgttgcggggaggattgccgctgtgacgatcacctcgttttttatggcgaggggcgagagcgaggatgaagagaggaaaaaatggcctgggcggcggcaatcacggatattatggtggcggaattggtggaggtagcgcgtgcggggaagcaaaattggaagagatacgtgcatgaggattgagcggatctcgtccgttctcctgaccgttccatgaagtatgatgtctgtaggatgtagggtagatcacttggtagattatagggtagatcacttggtgaattatagggtagaaagatagatgtatatctcctatctctttcttattgaccttttttttacttatatgttaaattacactagtatatttttctaaaggatttaagtagacaatcaactgtttttaccaaattcttctatgcagtgagtactagaaaaaaaatacagtgcatatctgaaatttacagtgtaagttttaaaaggtgcgctataaatgtcccaattagccctgggtgttgtgtgtgggtcagtggggatgtcctgtgcagcattcatcagggtgtagaatcttggtcatatttttttgactgaaaacatacaccgtgcagtagaacatgcctcatgcttactcatggatacaacaacacatgtcatttattattatgctggtgtcaagagttgacaaacgaatgtccatgtgttgctgcaatctgttcccgtgtttctgtttcatgcaccgaaaagcgagaagtcaccaagaaagcctcatctgttgcttaaggattggcaatcaataccatctgccatgtgtgctaagcacgctgttagagaggtagagagggagggattatttcatttaggcatacttcaccattcataaaatccttctgtagggaatgcgtgctatatcgtcccaatttgatcccaagaaaaggaatttgcagccaatggatcggaagtacagcagagatttaggtagttttggaagggaccggatacttccacagaaatcaaaatataactccttaagtgcggtgaggttctccaagttgttgggtaagctgttccaatggcaggaagtaaacccaaggtaagctagtgaagtcaagtgctctaggatccactctcccctcagttccaccgagtgttcgagcgcaagccatttcagtgatggatatgcccctcttgacaaaagcttgggtacaagggacatgtcatcgacggttagccgaggaactgcgtgtgctttgccggctactttcaagtccataaggctgggacacttgatgatggtaaggtgctccaggctatcaagatggttcaggccttccaagcgaactaattgcttacagccaccgatgtagagatccctaagcctcactagagacctcattgtctcagaaggtatctctgtgaaagagtcaatttgacttagtttcaggctacccaggacagtgcatcctctcaatgaatcgcgcaggacagtgtcttcgacagtgcatcctgtcaagtggagacattctagggatgcaggaaacaacctttggtcatccatggatgtcacctccaaacgcctgcagccgctgatttccaggctcttcagcatgcctggaagtcttgggagccttgtcagattgggaagaacattgagcctaagcttgcgaaggtcagtgaagagcttggcgatctcagggagagtttccaggttgtaacactccctgagttcgaggaattgcaggttactgacgcccccatgttcccttgacagccaacttggtgttgtgcgacccaggtagtggcagatgttgaggcatgtaagttgctctggtggttggaggccgtcgagtatctccacttggaggctgtagatccttgtcagctttgacataggatgcgtgataagcatgccattcaagtgacaatgttgtgaggcacttcttctcggtcagattggcttctagagctttctccttgctctcaacactctcaaggccactgattttcaagctgccacgaaggttattttgcttcatcagctgctttaaccgatacgcttcctccttcctgaccttgaagtgacttagctcttgcagttgctttaaatcctccacgtaaggaattcccaaatcaacataaggagatgaaatagaccgcaagttaatcagctggctgctcatccttttgacattggaacagtttaaatctaaataatatgaaagagggaactctaggttctgcaaagggtagagtttgccaaattctgttggcaacttcacctgtcttatatgggatcccaaaaggctgagaaaacgtaaatgctttaagccacaggctactccgggacaatcactctatcttgatccagatatgtttgcaccacacgtaactcttcaatctttcagcattcgctcaagaacttgttctgttatccccctcgatccatcagcgctaatgattaatgtccggagtttcttcattttgtagatatcatgtttatacttcattgcattgctggaagtaataaacagatggcggacatcggaacggaacacttccacctcatcccccagaactcgtaagcaatcatttccggcaaccatctctgccaattcgtgcagcatatcaggtatagtaaaccactcatcgtcactgtcagcaagctttccttctgattttataaatgaccatgactttaggtcttcaaagtatttttcacctatatcttccattttctgtccattgctagtcttgataaacccttcagccatccacagcttaaccaatgcattgcgtttgaaccggtagttccgtggaaacatactacagtaagcaaagcatcgccggacctgttcgttaagtttctggtagctccgccactgttcttgtatgatgtcagtacacggtacttcattatctctaattttttgccaagagctggcatctaaatttttgcatagcctgtctcctactcgccttgctgcaaccggtaatcttcttagcttatttgcgatccctctgccaatcgaatgtagtttttgaagtttttggctatcaagtactctcacaccatcaagtgcataatgcatgaatagatcaaggaaatcattatcatccatctcagaaatttcaacggggctcttggcacctagggacatggctgtaacgccccgattttcgttcgggaataaaaatcaattaataatacattttctagaaattaaataaaagttaaatcaacttaatcaagtgaattattgagggaattaaaaatttcctttaaaaatcattagctgagaatattttgtaatattctttgtgccctaaaatactctccggatttttccgcaaattttcggagctcaagaaataattttaaagtcacaaagatcatttaaccaattaaataaaaagaaaacaaataaaattctccttccttcccttttgggcttggcccaagccttcccctcctctcccgcgggccgcgcgcctcctctctctctcggccggcccgcgccttgcgaaagtctgctttacgtcccccagtttccctcctctctctccatccggccgacaggtgggaccgtgggccccacctgtcagctcctcctcctacctctcgccggccaaccccaaccgccattgccgcccacgtcgccgcaaaatccggcgccctcccgcacccgagctcgcatccaacgacgtgggcacgatcccctccacgtcctccaccattttccccgctcgtcccacaaaaaccggcgccggccgagccaccaccaccccccgtcggcgccccacttccccgccggttgccgcccctctcggccctgtttccgccgctccgaccctataaaaacgaaccccgaagcatcctctctcttttcctctcctcacccgagccagccgcgctctctctccccctccccacgccgctcccgcgcaccgccgcttttcggcgagctccggccgcccgccaccgctgctccacccaccgccgcgccaatccgccaccaccgtcggcttcgcggcgccgtgccgcagcccggcctctactccacttcccctctccgcctccggaacaccgccgcctcgtgcaccaccgcctaccgcctccggccgcctctagccgccatcctcaaccacctcaagccgcgccactgcctcggttagatccaccaccgcaagggcaagcccagccgcccatccatttttcccctccactaccagaaccacctccccaccacgccaccctaccggccattttttttccgtctccggtcgccgttcgccatcaccccggctgccgccgcgacacgccggccgcattgcctccttcgccgcgtcccgctcttccccgtccgccgcccggtcgccgccttccgccgccgggagcccctcctcattgtcgacctgtggagcgccgccgcctccctccgccggctgctctcgccgtcgccgtgcccctcggtgagctccgccacctccctctccctcactgcccccgtttcctctcgccgcttcccgcgctgcgcgccgcagctccctgcgacgcccggcccgtgtgccgccgtcgctttggtcctggccgccgccgccgccagccttgtgtgcgcgctggccaggccgcgccgcccggccgtccccagccgtccgatcggccttggccgatctagatcgtcgggtgcgcggccgcgtggccgatcgccaccgtggactcggtccacggtgggccgtgccgctgacgtgtggggcctgccccctttgtggacgtggtccgcgcctcaccccttgctgacgtcagcgaggaccatttcctttgtaaaaataaataataattgcgcaataaatcgagtttaattctagaaattcatttaaatggcttagaacttctaaaattcatacctaattcattcgaactccgaattgagccattcaacttgcaaaattcatctaaaattaagctctacatgtttgtttagtttttatgtactgttttcttggtttttattagagtttttcctcgttttgcgtgccagcgtgtagttcccgtcgtttcggaagatcgtgttcgcaaggataagagttcagaagatccaagtgaagaagcaaggcaagtcacacattccccttgagcatgttgatcccaatttacaaatgttttactgtttgcaaataaatatgcatgttttgctaattacatggggtcagggttttacctatctgctcgcttgtgccatgtttacttgatatctgtcctttgtcaaccatgggtaataaatcgcctagctggtgttactttgatgacctagctagaactatatgcttagccatgcttaattaccactagctcagtcgatgggataattgcagtattagacattttagtatcttggtgagctgcgtgctcgagacatctggccatgcttcatggtcgtaattattcaactaaaatgcgactgaatggtgggctgtgggtgcatggttttgctggtcgcatccatggcagttaaggaccggttcgcgggatgccttggaagaatttatcgtacttaccacaagccagcgtgggcaacggctgggcttgtagcgtagctttcctctagccgacgcatccaggcaagggtgggcgtgatggagtttggatgggccctgcgacggcctatgcggcttccggattcacctaggcacgagaggggactgcccgctgccttgcgaggagtgggggtgaaacctgaggtgtggtgtgcttggttagagggggttatgcgaagggtcctgtcacggcctctttccggtatgtcgtggtggcatgtcggcgcacggaaacgtgtcgtggggctgtgtcttgtgggtacagttgtacacctctgatcagagtaaaactattcgaatagccgtgcccgcggttatgggcagtcgaccagattcaccgtgattagtctcacacttaataaatcgacccaatacactgtagtttaggtgggttggttgggcctgttcaacgtggtgtagcgttgatcagtggagatttaatgttactttaattactcaacagttttactgttttgctcaataaaatgttttacaaccgcctttatgcaaatagacacaaaccatccttgtatccccttgcacgtctgcatcgttggtgtggcttgctgagtacggtggttgtactcagccttgctattattcccccttttcagaagtgtagtgcttctgagctgaagatggagttaaaggaccaaggctcagaccccagttgagttttgcctgtggagtggagctgaagccccgctaggatcgttttttttttccgctgctgcttttgtttcggtgtgaggactaagtgcctcttctgtaagtattttacgcttattttacgtttggaactgtatattacttgtcgttttgtgtaccctgactggtcctagacagggatttaatacgcaaaatagtctggaaatttgggttaaatttctgggcgtgacaatggctgcatctttggacaaagctgtaactaggatcttacttccccgcttcccaaaattcagtgtattacgtacttggtcccgttcttgctgagcaacatccgactggagaccatccagcgccagcaagaaccttttgtctctcaattccgcttttagcttattttctagggcatcaagattttggtacttataggatggtcgcccaatggctccttcgagcatctgtctgtaaattttatccacactgaaactttgagaaacatcaacccacatgacaggtgaaaaatggccatcctctttttcatactcacagacatattgtgcaaggattgtcttcccggatccagcaatgccatagatgccaattgttgttgaataacacgggttgttgctggagcctggttcaccgtcccctgctgcttcgcgcaacatatttactatctttgtacgatctacatctcttccaaatactcgccccgtagctgaggaagtagtgcccgacatcgtctcctcgatagttgtctccgtcattaataattctcgattcacaagcccgcccttagttagtttttgtagcttctctaggcttttcttcagcttactggttgtgtagcttcttctggcttttcttcagcagctcacgtaaccatgagtcggtattagagggagagctgacctgcattaagtttaggcatggcagagtcatgtaacatgaaacgtgcttattggcccaaaggaaaattttagtagcatataagttttttttttttggacttgtagttttatggctccttcagaacgcatggatgggcacatgaatcatttctttctatataagtacaatccactaagtacagttatggcaataaagttctataagtgagccatcggaagacgactcacgcgtcgcctcctctcgggcgacacgggaggcgcccagctcgccgtcgcccgccgctccctcccttctcctccttcgcctcaccgctgcccgagcggccggcagcaaagtcgcgcggccgcaaggacggcggcgacggggcttcgctcagtctcaccgcacaagggcaggggggactgccggcatcgggaggcggaaaccgcccagatccgtgccgaccggctggacctggcgcggcggttgctggtggcggggtacttcgttcgggcggtagcatttggcgggggtggcggcggagtttggaggcgctggtggtggaggacgaggctgccagatccgtgccggatctggcggatctggcggggaggcatccggcggcgcccgacgctggcgggaggatgtcggcgtctgctgggggacggtggagccggacgacgattggcgacgggggcagcttcttgtccgatgacagagggtgcggctagcggcgacgggcgcgacgacgaggaggccgcgacggtagcggaggggcacgaggccgcgcctgcagatctggccacccggcgaccagatcgggcgggcgagcttgcggcggtggaggcggagctcgcggcgaagggtcggcagcagcgggcgagcgacagctgcgacggggcttcgctccgtctcaccgcacaagggcagggggtactgccggcgtcgggaggaggaaaccgcccagatccgtgccgaccggccggacctggcggggcggttgccggcggtggggtactgcgttcgggtggcgacgtttggcgggggtggcggcggagtttggaggcgctggcggcggaggacgaggctgccagatccgtgccggatttggcggggaggcatccggcggtgcccggcgccggtgggaggatgtcggcgtttgctgggggacggtggagccggacgatgactggtgacagcggcagcttcttgtccagtgacggagggtgcggctggtagcgacgggcgcgacgacgcggaggccgcgacggtggcggaggggcacgaggccgcgcctgcggagttggccacccgacgaacagatcgggcgggcgagcttgcggcggtggcggcggagctcgcggcgatgggtcggcggcagcgggtgagcgacggcggctacggcggtgcgcggctggtgatgacgacgacagcggtggctgaggcagccgcgacagcgcccgtggtggccggcgcgaggctctcggtggcgacagcggcgcgcggctggtcacggcagcagcggtggttgacggcgcggtggctatggtatctattactctagcgggtgaatatcaattttcgcaagcgggactagatttatggtattatctgtagctattttttgcaaatggtgatttttcatagtccgactggaaaaataaatggtgacattgggaaaaatcgtttttctggtagtgaaaagtatttgcaagttactctagcgccatcaccattggtggaggttttgcacatctcaacatcatatgtcggagttttacttaagattttaattatttctatctagaagattattcttcgttatgaatttctaaataatatttattggctttgtggttacatgtaaagctacacacaatgaattcgaaaacctcatctcatcgtcccttatttaaaatttgggtttatccagaaggacatttgtctatctttttcttcggacgagtttacgggtcggacgtccgatcggtttagagaaaaatcgggcgccgatgttagtgcccgatttacgtgcaaaactattttaaactgatttttctcttaaattacttatccaaatcatgatccgattgcaccattaaatttgttacaattaaatcttcaaaacaaaaccacacatggatatattccgacgaaaaattttttaagcttattattgaattatttttaaatgttgcacgatgttccattagatatatcggaattgtttcactaagtagattgaaaatgtttcactcgtttgaatcgggtgtcgtttcaccttatataaaaacaatgtttcagcaaatagcgaaagaatgtttcaattcactgcaacatttgatccatacatagtgaaacattataagtacactaggtgaaacatttttcggtggaacaaaaaatgaaatgaattctcttaatagggggtttccaaaatatgtgggttttttttgttgcaatggaatatttcagtgcactgcaacattagatctatacatagtgaaatattgtgagtacactagatcggggggaacgcccgattggctccacccccgtcgggctcccgagccctgtcattctctttttcttttcatgctttagaatgcatcacatccaacaatttatttttatctattcgacaacaatgcgtaggttgtcttctagcaatagccaataaggcttttgatgggaatctatgagtaaaacagatgattggaaaatataggtaaaatacaaaattaaccacttggataaaccacgtgaattttaggggagaattctaaaaaatccccttgtcttgaaccattccaaataaatttcatatgatttttggaagttctaaatttcaatcttttgttccaaactgatcaaatactcggtagaatatttactgtatgattcaaacactaaatttcttccaaatgagccttaaaaattcctttctacgatgttttcaagcaactttgtactaaagcttcagcgtttaatcttgaaaattaaatgaaaaaacaactgtcacgtgtttgaactaaccatgtgcttaaaaaaatggcaaaatttgcaagctggatttcaccgtcatgtcacaattaattacttatatattattcccatgcatacccactctagtctccaggccattctgaatacctaagcaaaattgtaaaaatggtactccctccgtttctaaatatttgacgccgttgacttttttaaatatgtttgaccgtttgtcttattcaaaaattttaaataattattaattcttttcatatcatttgattcattgttaaatatacttatatgtatacatatacttttacttatttcacaaaagtttttgaataagacgaacggtcaaacatgtgataaaaagttaacggtgtcaaaaatatttagagacggaaggagtactacttttatctcccccagtcctgaaacttcttgtggtgaaggtggaggagggggctagaaggtgtaaagtatactaccattgtggactaacaagtttatctgagcaaggtccaaaatagagttgctaatgatggaacaatctccgaattcagttgatatatcttatcatcctcaagcttgccggtcttttgccatttgatttggccacgtgccatggttaatctatactttctgtaaagttataacccactaactctaaagtttcacatgcaaccataccacatcatcacccactaacaataattacatattcaacctcatgcaaacatgcaagagcatccacaatctatttaattctacaaattagcacgcaagcatattcaatcaccacatctcacatcatttccacaatagttttacaaatctctattatttttataatatttaatatatacttataaacatgttctacattaaagtgcgaatttcatttgtttcttgataaatatcgataagccctgagatttgattttttttctttttactcctacctgaattgtaacgaaaaataatattgaaaattacttagtaattcccacagcaaacacggggaatcccctagtttttaagataaatcatggccatgggaattatgggcttgtttggtttagtgctctacgaatactagtattggtagtgcaatgtatcaattcttttttattattatacggatagtaaatcagaatttttattatagtaccaaattagttttaatatatctaatattgaacgtattttgatattttatttttttataaatatggttagtaatttgaattagaagggggaaaaaaaggtcacttggtttggtttgcagccaaagcgacaaagctgcatgtggagggcgaggttaaggtaatcgtggatgtccacgatgtcctctgcgtcgtagaaggcagatctgaggctctgcacccacttgtccagatacggcatggatgtcatgtgttccatctgcctacgcagctgcggctcaagacatgccaccaggttgcgcagctgggcttcttggtcgcagttgagcaggtcgatgcctttgttcaccgccttggtggtcatgggcgacacgatccatccgatcgtcctgatcgcccacccaaccgccacaacctccaacgccatgacgatcgagactcaaagtaaatgctgcttgttggttaattgaacgatcgatcaatataatcgtctctcgtcgacggagttggagcacaatgcaagactatatatgcttggtgccggccggatttatggaacgaggacctagctatagcttaactcaagtcaagtcaaccccggccggtgcaccatcagtgaggctatctgtggaaattaatctaaaggaaaatcaacccacgtggggtttgggttgttcccccaccttatttttttgaaaagtactcattttattatatagaaaagacagagattagggaaagaatccccagtacaaattgatcatacaccaaaccatcctttctaaagatgagacagactgaactaagggaaacaaattcctgatgtagccatacagtgataatggatgagatcgacaggagtagcggcgttgccgtgacgactacatccatgggccttcattgacgtgcacaccgcttgacaaaccgataatcccctttggttgcctccacgggaacggcacaaattgaaggtttgttgttgagtcgtagattttggtgtgagcttcaccggactttaacagttgatttccacggagtttatcattgaatctgaggagcactgacttgcaatcctgcgaaacaagattgctcggacggtctgccctcaacccgaacgacgaacccagcatgggtaccactgcatagaaacatcaagaaagaggtccccaaactccggccaaccttagtcaagaactaggatggcattgattgatctgctgtctttctacttcagcttggagctcaacaaaggaggatgaggagaaattaacctggtggccagctgcaattccttgatgagcaactatcatccccagcccatctaccaacagatcatgcaagcaccaatccgaccagcaccaacgcagcattctcgagaagcacaggctgccaaatattttgttacctgctgtccttgaatccgagagctgtcgccaccccaacaaacaccgtcgccgccccaacatctggagggggagaggccggagacggagagggtgggtcatggtgtccggggacaaggcagccaacgccgcaactgtcgttgcgtgccggccagatgcagggagggggcagcgccaccaaacttgtgctggatctgacaggttgaagaagttcctttgaccgatctgccttcccctcattgcaactcctcctctgtttttccaaactaaaccctcggcgactaaaagcgactccttccgtcgccgggacgacggtgccgaactccggcgatccatcgacttgaacaaacgggaagaacccgacgacaggaagacccgactacgagagaagaccaacacctaagctaatagattactaaagggacgaaaatcccgccccctcccctcacgccggcgatcggagggtcgccggagatggaagggaaggggccgggagaaaaggggattttttttttctccggaaacgcctgtttcaggttgttcccccacctgacacccaatccctccctgtgaatccccctctcgtccacttgcgcgggtggttggtgggattattagcagatattatccctgggtttggatagagggggattagaagggatcactaccattcaaaataattcagaaatgataagaaaaaaaattgatcatgaaaacagaaaaaaaatcaatgtgcaaaataattgtaaaaagcccccaaaaatagaaaaacgtagatttaccacagacgaattctgaaaaatagtccagaattttttttaaaaaatcataattttggatagattaaattctacaagcagtaaaacatccaaaataatcatatgttttccatagatatgctagtcacagacaagagattgagttgtcatactagtatagcaatagattggaaattaagcgcatatatcgtcttccacattcggccctgcatatactgatctgttgaaacagtacaattacagactcctaaatctgcagttctgctaattgaattaccattctactacgaataacagttctgcaggcaaaccccaaaagaactgacgaaactaaaactagtttatcatcaagcccttgaaaacaaacttttccttgtctccgaatttttcccaaaaataaagagagttcggcaactaccaccatcagcttccaaatccatcaaaagtcatgtctcttaatcttaaaaacctgaaaaacaaacaggaaacattatggacacctgaatagtcatatgaaaatttgtttggaaagtgacaattattctgtgttaatttggaaaactaaaataagaagtgagttatcatctacaattctggaacaaaaatatttttaagacaaggaagaaggtcaggcacgattaagcccagtacatatactcacaattttcagcttttaagcactcaaccatacttgctatagaaaacaaggactatttggacagataaagtacttaccctgatatacatcatctctacttgtctttgtctgaacggaccagaaagccagcgtctcatttttcatattgttcttccctgaaaggttaatccttgaatataagcacagaacttgcaatgccaacagttgcaatatcaacacaaatgagttatatgtcgatttgtccgtactccgtagttctgcactacatatagtaataattgagctagtcaatgatattcatgtttttgtcatatctgtgagaccatgggcagtggcagcactgctgaatgtggtaaattcatcagatatatcatataattattaattatgttcgtgatagagcaggtagctccttggaaaaagaaaagtatgcataatacctgttatatttgtgtttcttggagtatcaaccaataatgtaggacctgtccagcaaagaggaaatcggtcaactttaaatatctataactacctgacaaattttcactcaagtttcatttgcaatttcctttggaatgtattacattacagagagtgcacttctaaagaattgttgaataggcatttcacacttttcacagctattatctcacaacatttcttcagctaaactgttaattttgttgatcgaatcatatcaggtgaaccttcaatgttggaacaaagccaacgaaaaaattgatctttgcaagcagcaggacaagaagctgtgctctgcacctctgcatgagagaagcaactggaacaatgacaggctaatactagcacctaacactgaaatggagctgtctaatttcacttgatcctgtcaactgtcagtatacaaagggagatcgtgcaaaatcagaaagactggtttggcttctactcgctcatcttaatgattggtgggagaaaggacagacaccgagcaccaactaggttagaaatatgactaatacttcaatccatacagccactcaatacatcaactagcaacaaattcatccactagaaaagtcacaaaatcttttcatagtaggaaaagaggagatcaagaatcagacctgcttcttgatgtccgggctgttgccctcgaccttgccctctcccgcaaccggtgaatccgaagcgaggaaggagagatggcgagcggcggcggctgtagcgggatggagaccggcggtgaccgagggcgggaaggagaccagtggtggctggagatatgctgctcccggacctcgcgccgcctccaaacctagcgccgtgaggagtcgaggaagatgagcgccgtgtatgctcgggaagaaaaaaatcgtctccgagacgatttttctgtaccgggggtttggcatggatcgggtggagaatttcccccaccccacctcgggccaggcgaacgcgtacatgcaccacggaagaaaattagatctggccgggatggcacacggggatttcggcccattccccccaaacctagcctataagaacgaggcctgagagatctattcttaaatcatttgtgttgatcagg

SEQ ID NO: 6451 - DNA, 1117 bp, Oryza sativa
cattattcccgaacctgtctagctgcaaaatcatcaagacaatcattctggatggttgttttgagttgacgcgaattgaccctcatgacctaccgccatcactcgagtcatttagcttctctagcagcagcaatgacaatgatgttgatgtcacagccaagatagagagcatctccttccgaggatgcacccagttgaagagtgtgcttttgagaggagtgtttgagaggctcaagcaactcgacgtctcaggcacttgtattaaaaccctcgacctacgttcaatgcgaggcaactggtctctcaaggagctcctactgcttggatgcaaggagcttcgtgcaatactatggccaaaacaagatgtatcattggaggttctgcacatcgacactagtagcactgaacttggtcatgctacaggtgtagttgaatcatcatcattctcacccgttgaatttaaatggtatatttcagtgagggacagaagactccttcgctcgctaaatgatacaaaatatcccttggatgcaccatgcatcgagatctcatcccctcctgctagtgttgctactgctactactgatagttctgaattaggcggaacaataagcaagagaaggcccattgccattagcagggctgaacaacgttggttgatgtcaaccaaaagccgacgaccaactgctgaccacaagaagttatatgcggatgtcgactccacgatccagcacttgcaactacaagcaaccatgaacggcaactggatgtggccatgtaaatcggagggcagcacctctcactacattagcttacaagatgataagaggatgcagacgaaaccattgtcgtcgccatctttgccaggttccatctgtgaaagagcttcaggcctgcacgtgcatgacagcttgtctgtcgcaagtatcacaagccattcaaatgaggcacggagatggtataacctagagtggtgcagagtggagagatgccctaacattgaaggcgttgtattcactccacctagtactggtagtaacagcattttctggtacctaaagacattctgggcatcccaactagcaagggcgcgccacatctgggactggagcacaac

SEQ ID NO: 6452 - DNA, 13932 bp, Oryza sativa
ccgagatcctattttgctaatgatgctatactgctaatgtgatctacttatatttatatatatttctatacaaatagttcccttctgacgtcgattgttcaaggaaatgctcttctactgatgtatatttcctccctgtaattctgctactttttatactatagttctattcatagcatggattaatgcctaatgcagagcactgacgataactcatttttcactcgcagcaggtaatggagctactgatagccttgcagtaatgccttctgctcttgcacttacggagaatttggatttttgggactcttactttctgtttgtatgaaatgaatgtaattagttttcagtggcttatcctagctgattgtggtgatgaatatgatgtttaaatgagtaaatcatgtattgtgaatgggtgactgattgtggtgactgaatggatatgatgcaagcaatttttagaacattctatgcggtattcagaattttcataatctttttaggcaatcttcagaatttcttattttctccagaaattttagttttttatttacaatatttcaaattttcggtaatgctatttttaaatttcaagactatctgtttagttttcttggtattttcagtgatatgaaatttaaatatcagtgttgaatgttgtttggcctgagttaatgtctgaagtgaacgttaaccttccccaccatttgcattccgaatgaccaagggaaccagatccctggggtggaggggattgggtgatgggaggggattcatccaatacccccctggtggcgtttctcccagggaaaatgcttaccacgtgccgaacaaacccaatggtgttttagcctcgaagctagaagttgtcaaatagtgtgtgcgaagctcacgacctagtcgctatgtgctatttgcaaaaattttgctacaggacactccgacttcgtggttttagctatgggacaccgcccgaactcacttttggggaaaacgcttcataaacgtggtaatttgccaatggacactgcgctgattaaaataataatttacgattggagaggagagaagaatcacgtgaaatgtcaaaaatgcccttgggcccacatgtcagctctcatatctctcttctcttctctctctctatcttctctcccagaggggcacgaggcggcgtcggtcaccggggctcgagctcattgtggcggaggagatggtgaggacggcgggagcggccgccgtggagttcgcggcggaggacgccgaggaggagagccgcatcgtcgccgccaactgcggccactaccacggcggaggacggcgacgatggcgggaatggccgccgcggcgctcgcggtgggagcggcagaggacggcgaggacgcggcgaagcggcacgggataatgattatttataggatattgtaataatgtattaattttatagcattaatatatttatttgcagggattaaactatttacttataatgtgccgacaaaattcttaaagtattcatgctgttccaaatgtttctagttttcacttaaaaaagtatagactaatttatcctaatatgttgctaggtccaccctgtcatatgcacacggatttttctttcgttccttgtatctcgctctttgacctgagtaggcaaacaaccagaacaaaattcccctgatctgccgcaccaccacagcccttacgccgccgtccaccaggcgctgtccgccagcaccgctgcaccggttccgaggccgcaccgtgcagagctgctccatcgagccgctcccaagaacggcgttccccatatcctgctgatgctctgcccaagggcggctggcatcttccctgttctctctactgcatcttcatcagctattttggttgtgcccaaagacctctcatctgcaagtgcaaactacgccaggttaggagcactctgttttttatgcacaccaggtgttcgatccttgacctgtatagacacacctctatctattacttgtttgtttcagtgcaaacgaaatatttcatcgtttttgttttatcttccatcctattatatctggcatttatttgttcagatcgtaggtaaaggctgtatatctagagtatcagagctccagttagctaatcacagggacatatttgtagtgcacaaatgttctaaaatttatatttgtaggtcctgttatctcctctgctcctaatcaagattgacatgcaaactgttcttgtggaactgtattttcagttttcaattgtcatgtaatgtccttatcatgtggctgttcatgttgcctcagattactttcatttatccagagtgcttttttcaggcccaacctcttcaccgatgcctgatctacccatctgctgctccgcaatatgtccaatatagccgccgtatgtactggatcacaacgtcaggagtccaggtgcggttaacctcacatcatatatatattctgtagacagactaattttgagttgaacttaaaattatatcaaaaaaatttagtgggtggttgtcaaattaggaacactgatgtactaaccatatttcttatcccatcacagaaaaccgatggatttaaatgctattaagaagttactgctttcccctagaccaagtgatgagtaccttgctggaatagagggttttcttgagtttgcatatagggaaaagaatcctaatgataagatccggtgtccgtgcaagaaatgtgttaataagtggttactaaggcgtgatgaagtgtatgatcatttagggagtgttcgttaggtggagataggagagattgtgtctcgttttccgcgcgcacgcttttcaaactactaaacggtgcgttttttgcaaaaaatttcaataggaaagttgctttaaaaaatcatattaatccatttttgaaatttaaaatagttaatactcaattaatcatgagctaatggctcacctcgttttgcgtatcttcccaatctcctcaatccccttctcttcaaacactcccttagtgtacaatggaatgttacttggttataatccttggggttgtcatggtgaaactgcatcattcatctctgctaacagtgaaataaaatcacaaaatagaattgataataatatgcaacagctagttcaagatgcttttggaaacacaggcagcagccctccagtgaatgattatgatgcaccaacttcttctaacagtgggccagactctgaaacaaaagcgttctatgatttactccgagatgctcatgaacctttatgggaagggtgtgaacttacaaggctttcgtttcttgtagtcttgttttacataaaatccattaacaagtggagtaataaatctttaaatgatttgctagcgatcctgcaacaagcaattccaaatggtaagagtttacctagaacatttgttgaggccaggaagataatgggaaagcttggacttaattatgtcaagattcatgtttgtccaaaaaaactgtcaactttacaggaaagacaaggcaaatgatgacttttgttcaaaatgtggaacttcaaggtggaaaaacaaagaagataaaactactttaacaaagaaggaaagaagaagggcaaccccaagaaaagttttacgatacttcccaattaagccaaggcttaagaggttatttatgcataaggaatcagctacagcagtgaggtggcatgatgagggtcgcacaaaggatgatgcattgcgtcatccagctgattcaaaggcttggaaagacattgattctagatatcctacctttgcatcagattctcgaaatatcaggtttgcaatggctagtgatgggtttaattcagttggaacgatgagttcgacctacagttgttggccggtcgtcttagttccctataaccttcctccatggttttgcatgacagcatccttacttatgcttgctctcataattccagggccatcttaccctggaaaggattttcatgtatttatggagccggtttatgaagagttgattgatttgtttaaggttggaacccccacatatgatgcatcccaagatgagatgtttcaactccgtgctatattattgttcgcaatcagtgactaccatggaattgggatctttgcaggttatagcgtaaatggtgaatttgcatgtattacatgtcatgatgaaacatgttctaaacgtttgatacatggtcgcaagtattctttcatgggacatcgtcgttttctacccctagaccatgagttccgttacaatcgaatttcttttgatggaattgaagaacatagaccagagcctattgcattttctgaaactgcaattcttagtaaaataaaggcaattaatgattttgagaagtcaaaaacatggaactgtgttagtgggctattttctttgccttattgggagtccaatttactacgccacaatcttgatgtaatgcatatagagaagaatgtttgtgataatatatatgggacacttctaagactggaaggcaaatcaaaggataatttacaggcacgactagacctgcaagaaatgaatataaggctaggattgcatcctaaaaaaaaagctaacaataagtattacttgcctcctgctacctatacaatgtctaaaaatgagaagcaacaattttgcaaagttctccatgatattaaagttccggatggctactcaggaaacatatcaagatgtgtaaatgttggtcaggcaaaaatttcaggacttaaaagtcatgactaccatattctaatccaacaacttcttcctgttgctttgcgaggtgtgcttccagacaatgttacatccgtattatttgaactatgtggttattttagagaattaagtgcaaaagtcctatacatagatgtgcttcggaagttggatgaacaaattaaaatgacattatgccgtatggagatgatatttcctcctagattttttactgttatggtgcatttagttgctcatttagcaacagaggctgaaataggaggtcctgtgtgttaccgatcgatgtactttgtggaaaggtatgtttatattacaaatacaattgaatttgttatccaatatatatttcttaacttttttttctcatttccatgtttatgtagatatttgagtgtgttgaagtcatatgtgcgtaataaagcgcatcctgagggatgtatagctgaagcatatttggcagatgagtgtatgacattttgttctaagatatattgaaggttttgagacaaagcacaacctactgtaacgccccgattttcgttcgggattaaaaatcatttaataatgtattttctagaaattaaataaaagttaaagcaaattaatcaagtgaattattgagggaattaaaaatttcctttaaaaatcactggccgagaatattttgtaatattctttgtgccctaaaataatctctgaaatttcccgcgaattttcgaagctcgagaaatagttttaatagcacaaagatcattgaatcaattaaaataaaaagaaaacaaataaaaccccccttcctttctttgggccattttcggcccaagtcttcattctctcccgcggcccgcgcgccccctttctctccctctcgggccggcgtcctccctcggcccgctcggctctctctctcactcaagtccgttccgcctccccagccggcctctccctccctctctctccgacaggtgggacccgtggaccccacctgtcatccccttcctccagctccaactgctgccatggccgcccgagccgccccacgacgccgccgtttccacccacctcctccaccccgcgcgcgcgcgctcgtccgtgggacctcgccgcccacgtcctcctcgttcccccacctctccccgcgaaaaccgccgccaccccgagcccactcaaccacgtcgccggcgcccctttctcccttcaaatccgccgccaaccggcctccccgtcgactcttgaggctataaaaagcatcctcggcctcccctcttccatttccccatttttcccgagctccccgcgcctccctaacgccctccccacgccgctcccgtgcaccaccgctttccggcgagctccgtccggccgattccgccgctccacccaccgccgcgccaatccgccaccactgtcggcttcgcggcgccgtgccgcagcccggcctctactccatttcccctctccgcctctggaacaccgccgcctcgtgcaccacctctctcccccgccgcgccgccttcagccggccgctgctgccgcgttagtcgtcgccgcacctcgccgtttgcgtcgtcggcaacgccgtgccaagctctaccccggcctctgctccgtttccccatttcatcgccgcaaccacctttccaccgtcgacccgagctctaccaccgccgttcactgcctccagccgtcccgtcccgctgctccggtcgttgccaacccgcgccgtcgcctccttcggctccgcagggacgaggggaacctcggccacctcttcccatcgccggagactcacgggacgtccgctattccgtgcgccggtgagcccttcctcccttcttttcctctccggccggccatgtcgttgccccgtcctccctaacagttccccttccatcctgtggcgcagctgccgctcgtccgcctgttcccgagctcagctcgtcaccggagcgtcgtcgtctccgtccgccccgagctccgccgtcgccgcctcccgttgccatctcgccgccggccgcatccttcggccgtgtgccgctcggtgagctcccctcccctttcccgctaccctccgccgctcacccgcgcgtgctgccgcgccggtggtcgtcgccagtgaccatcgggccgcgcgtcaccgctcctggccggtcggtcggcgagctggctcctgcccgcccgtggccgcccgattcaccccgggtgaatctgggccgtccacgtggccgctcggcgccgccccgcgtcggtgccctcgtgtcgccacgccggcgccaccgctgccgctcgtccgccgtggccgtccacgtggtgcgcccgcgcacgtgccgcgatggactgagtccaccgtgcgccctccccttgtgccgttgacgtgtgggacccgcctatcggcgtcggcccctctcttgctgacgtcagcgacagtccttttcctttaagaaattaattattaattgcgcaataaatcgttaaaaattctagaaattcatttaaatggctcaaaacttctaaaattcatatctaattgattcgaactccgaattgagccattcaacttgcaaaattcatataaaattgagctctacatgtttgtttagtttttatgtactatttccttggtttttattagagtttttcctcattttgcgtgcctgcgtgtagaatccgtcgtttcggaagtccgcggtcgcgaggaaaagtgttcggaagattgtttgaagaagcaaggcaagtcacacattccccttgagcattttgatcctaatttacaaatgttttaccgtttgcaaataaaattgcatgtcttgctaattacatgggattagggtttacctatctgctcgcttgtgccatgtttacttgatatctgtccttcgtcaacattgggtaataaatcgactagctcatgttacttatgtgacctagctagaactatatgcttagccatgcttaattaccactagctcagttgatgggataattacagtattagaccttttttagtatcagaatgagctgcgtgctcgagacatctggccatgcttcatggtcgtaattatccaactaaaatgcgattacatggtgggctgtgggtgcatggttttgctagtcgcacccatggcaattaaggaccggttcgcgggaaaccctggaagaatttatcgtgcttaccacaagccagcgtgggcaacggctgggcttgtagtgtagctttcctctagccgacgcatccaggcaagggtgggcgtgatggagtttggatgggccctgcgacggcctatgcgacttctggattcacctaggcacgagaggggactgcccgctgccttgcgaggagtgggggtgaaacctgaggtgtggtgtgcttggttagagggggttatgcgaagggtcctgtcacggcctctttccagtatgtcgtggtggcatgtcagcgcacggaaacgtgtcgtggggctgtgtcttgtgggtacagttgtacacctctgatcagagtaaaactattcgaatagccgtgcccgcggttatgggcggtcgaccagattcaccgtgattagtcccaccttaataaatcgactcaatgcactgtagttcaggtgggttggttgggcctgttcaacgtggtgtagcgttgataagtggagatttaatgttactttaattactcatcagttttactgttttgctcaatgaaatattttacaatcgcctttatgcaaatagccacaagccttccttgtgtcaccttgcacgtctgcatcgttggtgtggcttgctgagtacggtggttgtactcagccttgctattattccccattttcagaagtgtagtgcttctgagctgaagacgaagttagaagaccaaggctcagaccccagttgagttttgcctgtggagtggagctgaagccccgctaggatcgcctttttccgctactgtcgttctcttttggtgtgaggcctaagtgcctcttctgtaagtattttacgctttatttacatttggatctgtttattacttgtcgttttgtgtaccctggctggtcctggacagggatttaatacacaaaatagtctggaaatttgggctaaatttctgggcgtgacacctaccttcacgaaatgatgataacgacgagtccattgcttctcttgatgatgaaaatcaaacaaatctttttcctcgtgctggaaaacctcttggcaagcctagaagttatgtgttataaggggtttggctaaaatccaggcacatagatatgtgcctttcgattgcccagatgtcaatccataccttctgtattatctcaaattcatatacactgttagcataactctttttgcaatgagcattcattacattattttctttttgtagaatgcatgctgaggagattacaaaaacatatcggcgcggccgtatcaccccaaatattatcgagcgtacacaaaatgagaaggaggctccctccagggccaaagggccaaaaggctccctccggtggaacagcagtcaggaagggagttacaatctgttttgttcaggaggcaagggtagctcttccacggcggtcgggcaggtagtctcggcggttctgatggcttctgtggaggcctttgtggggagcagcgaagcagccgttgggcttctcgttccggctggtgagtggccaagatttgtctcttggatctcagctagtccacacagtgagctgatgttgttgctctgatttatgtttacatgtggttcggtggtggaatatgtacatgtgtttcttttgcctgttggttcccatctaggcgtgctttttttttttgaaacgtgttgtttatgtgattaattaacatgagaaggatctgttagaaactagaggaaaaaactatggcagaagaacgaagtataggagctcgagaaaacatgcatagtagtagtcccgaaccacattttcgttgatctcatagttagtctgttcatgggttcaattttttatccttcgatctacgattgcgtattgcttagttttgaggatatcattattcttgtaggtgttttaagtcctatgcgtatgatagattttggcgctcaaattttgtagtaagactgaatttgaacattttcatgttggggcatagggtcagggctagaaggtttgcattataatgatgcatatttgtttgctccgtgttagctgtcattagaaaagtggagaacattggggagtcatttcatatataactgaaaattgagaacttaggtgctaaaaaaggtggcaggtgtattgtctttttgcttgttggtacctagttttgacgcttgccgacaagcttactgattctgtgcctttttaattttagcttttatgcagcttgtgatagtttgtagtaggtgattatttcaggaaggctctgtgatttatgttataatatgttttgacacttgacaagcttattgattctgtgctttttttaattttagcttttatgcagtttgtgatagcttgtagtaggtgcttttttcaagaaggctctatgatttacgttacaatacacatagttcaaagtagataggacttttgcttttgtcaccgatggactatgttttgagtgcaagctcctgagagaagtaatcttttagttctagtgcatgcttctacttgaagtttataacacatctatgaattttttgtttatacttaattagtttgttagccattaatttggtcatccaccaaagttaattttacaacctactaaactagttattttttaattgaattataccagaaagtagttttggaacatattaaatttgtttctactaatagtacttaggtcagtaagcacattttagtcaaacagtgattagttttgttagaaactttcagtcaagagagattagttttgtctactaatttcattcattaaagatgagctttattaattaccactgagcatgtgctaaccgtggggctgatgcattttttggaaagaaaacatcccacgtctagttaagcacacacacgtttaactagcacgcacatcccaacgaggctcactggagccacgtaatggtttcggaacacagctccctccagggccaaagggccaccgcgacggtcttcagtgcgatatccaatgtgtagacgcgcgtactagtacgcagatcttttgcctcattgctgctccacgttccaccctcctgcacggatatcatgagggcacaggacacgaccctccacttgatgaccagctcgtggagctcgccgacgtcggcgccggactcccaaccttccaggatgacgtcatggaacgggcgattgccagggctcgaccgacgtagccgacgtcggcggagtccctgggcacgaagctggcgacgagttcgacggcttcaaggatggtctgcttgctgacgcgaacccccgccagattcctcgacccgccgaccagaccagggtagtcgtcggcgagccggaagaccgtcgccaccgggatgagctcccgcggcctattgctgaagatgtaccacaggccgctaccgtcggtgaagccggtgatgtagaggttgtcccggcgaatcgcgagcatgattttgttgtcgccggcgccgacaagctcgaggatgaaccacttgaagggcttcctgttgacggcctgctggtgcaagacccaaacgacggtgttgtccgggccccacattttgttgctgctgtcttgtatcagaagggtgtaaatgtacgacatgagttctccgtagtcgtctgtggccacattgaagctgatcaggtcgtaaggtccctgcatgcagtacgtagatcgagcaattaatatctataattaattaattaattaaccagcagaaaagaaaattcatcacgcaacatatcgatccatccagtggattctctaattatttattttacacaggatgcatgaatcggacgatcgagctagtagtacgtacggaatttttttgagaattaatattatttttatggaaaatcgcaaaagtggtggccaaccggggaaaatcgcgaaagtaggtccctgtcgaacggatgcaattcgatagggcacctatcgaacgacgggcagccgacaaagccctgtcgaacggctggcgttcgacacgctcacctgtcgaacggagggagttcgacagggcccaccacccggcgccgcgaggcctgtcgaaccgggggcgttcgacggggccctccaccgaccctgtcgaacaatgggcgttcgacaggccggtttaaagccccgtccaccaaggccgcgagttcgatttgtttgaggaccacatcgccagccgccgccgagagtcgccacatcgtcgccgtgagcgccggagggagcgaggggaggggatagcaggccggagaggaggccgaggaggcgccggtcgggagaaaagggttggcgacgccctccagcagtaaagttaaggtatacattagtaatccctaagtacaatgcatatgaaagtttaataaaaaattggtttaagagttgttaattgtttcgcattgttcgatgttagtatgtatggttagcacatatttgttattgctaaatgttggtagaggtatttaagtaattgtacggttaaattagttcttagttagtacatattattgatatgttgtgtgttaaaataggtacaaaggtgttatattttatttggattattaaactagttgtttgttactaatagttgtaaattagtacacggcaatgtagtataagttgtaatagggtaattatcgaatgattaaatgattaaacgtgagactatttgtcatgttttatcaggatgtcaggtgatatgcccattcgtctgtattatggcgatgcttctatacaaatatgtgatagcggggtggatttaactgtatatgccttccatgatactagtctgaatgcaccggagcatatgggtttgaacgacgtgttagggtggttgtataatatgtttggggtagatctagtgcacgataaatttgtcataaatgccgtgtggccagtgaggggtcaacatggatggcagtggagagtagtggaggttgcgtcaactgggagttggaggaagtttgttagtaaagtaagggagaaaggctatagcttggcaatagtggtgcagaagacaacatgtgttgatcgatcgggggagtcaagtcatgccgtggtggaagaaactccgttggaaggtggacaagctgaaaatgtttggcagactgagcaaggtcgaggggaagaagtagtagagggtaatacataaggagaggtccttgttcgtggtactaatcgtgaggccaacgactcggacgatgaagaaccggattcgcctatgcgtgttgatgcagcggaggagaatgaggcggtagtggatcagatggaagtggaaaacgaggaataccttgcgcttgtagtggaaggagaagatacaacactgtgggacaacgaaactaacatacccgatgattggacgaccatatcaatgagtcgtatgaaggtaaacgatggtttagatgcccactggtgttatgatagtaagcaggtgaaagttggacagatgtttcatgacaaaggtcacttacaagatgcggtgaagaggtgggcatttgtccagaagcgtgagttcagggtgaaggtttcaaataggacgacgtatgacttgaagtgcatacagggtggatgtccttggagagtgcatggttacaagccacaacatgacactttatgggtagcttcgagggttgagcaacatatgtgtttgttggagaatacccgtctggtgcacaaaaacctgacagcggcatttgtggcacaaatggtatattcaaaggtggttagaaaaacatctttgtcccctttcaccataatgcatgacgttgagaaagagtacggatatgagatatcgtacgacaaggcttggagggtgtagcgcccgttccgtcgtggcgcctagcgggaaaattatctcttaaaaacactaattgcgaaatttgcttcttcgcttgtcatctagtgtccgtgccatctcaagatctcaatccccgatccatcgttgagttcaaatccgaatccgaatccaaatccttccaaatcaaattcctccgcaaaagtctattttgcctcccccggggtcgatgggcc

SEQ ID NO: 6453 - DNA, 2680 bp, Oryza sativa
ttggctttttcaaacataagcttgactgtcctgggtggcttacgcccgaacttgccgaccaattcttcgtggcgaatccctttggtgaatgcggcgatgataacgtcgtcggtgatatcggagatcttgttacgttgttcagaaaatcgccggatgtaatctcgaagggattctccggacttctgaataacgttgtagaggtcgtattgtgtgccgggacgctcgaaggtgccttggaagttggcgatgaagtggtcgcgtaattcagcccaagatccaattgtaccacggggcaatccatggagccaagatcgggcggaatccgctaaagccactggtaaatagttcgccatggccttgctgtctcctcctgctgcgcggattgcgagaccgtagacggtaagccacgattctgggttagtggtaccgtcgtacttctctattccagtcggcttgaagccggctggccaatccactcgacgcaggtcgtcggtgaaggctgctactccgtcaaggtcgtcgtcgtggcggtccggcgagtgatgatagcctcgagctgcattggctcgctccacctgtccattgctcatggggtgtgccactgaggcatagcaaatcttaattccaaagtcctcacaaaagtctttaaaaactccgccagtgaattgtgtgccattatccgtgatgatccgattgggcactccaaatctatgtacaatgttgatgaagaagtctcgagcgttatctgctgttattgtggcaaccggtttagcttcaatccacttggaaaatttatcaatggccacaaagagatgcgtgtaaccgccgactgcctttttaaacgggccaaccatgtcgagcccccaaaccgcaaacggccaagacagcgggatggtctgcaactcttgagctggtagatgaatttgtctggcgaaaaattggcaaccttcgcatgtgcgcacaatcttgtcggcgtcggacactgcagtaggccagaaaaaacctgccggtaagctttgccgacaatggtgcgtgcagcagcatggtttccgcatatcccggaatgtatgtcgttcagcaattgtctcccttcctctaaagatacgcagcgttgcagaattcctgaagggcttttcttgtataactcagcttcatgcataacataaagtttgctccgccttgaaatccgctcggcttcatctttgtcttgggggagttcttgagaagtcaaaaatcgtatgaggggctctcgccagtcggcttcaaccatagctacgtcatgagtgcccgcgacttgagtagtatctttgggaggtactgtcggcgtgtaaaggtgttcgacgaaaacatcagagggcaccacctcgcgcttggatccaaagttggcaagtctgtcagcggcttcattgttgtgtcgaagaacatgactgagctcgagtccatcgaacttgtcttctaatttgcgtacctcctgtcgatatgccatcatgttgtcgtcaaggcaggaccactctttcataacttggttgacaaccaactgtgaatcgcctcgaactattagacgctttatccctagggaaattgcaatccggagcccatgaaggagggcctcatactcggcgacgttgtgggacgccgaaaaatgtatccaaagtacatagcttaatctttctccagttggtgaaattagaaccactcctgctccagtgcccgaaagtctttttgacccgtcaaaatgcatggtccagtgctccatcttctccgcgggggtatcctcctggcactcggtccattcggcgacaaaatcagctaacgcttgggacttgattgaaattcggggcttgaatgatatgtccaaagacatcaactccaaagcccactttgcaatccgtccgtttgcttcgcggttgtgcagtatatcaccgagtggaaatgatgtgaccaccgttaccgagtgaccttgaaagtagtgagatagcttcctggtagtgattaaaataccatataacagcttctgaacctgagggtacctcattttggagtcggctaggacctcgctgacaaagtagatcggtcgctgaactttctggacatggccttcttcctcacgctcgacaaccaagactgtgctcacgacctgggaggtggctgatacatacagcaacaacggctcctgcgggtgtggtgaagctaagaccggtggcttggtgaggagttgcttgaaatcttcgaaagccttctgtgcttcgggtccccattggaaattatctgttttcttcagtagcttgaagaagggcatcccccgctcgccaagtcttgaaacgaatcggctgagcgccgccatgcatccagtcagcttctgaacatctttctgggtgcttggcggtttcatgttgaggatagcagtaactttctccgggttggcttggatgcccctatgagacaccataaaaccaagcagcttccctgacggtactccgaaggtgcacttttcaggattcaatttcatcctgaaagcacggatgcttgcaaaggtttcttctagatccgagatcaaatcatccttttgcttggtcttgacgactacatcatccacataggcttcaacgttgcggccgatctgcgttgagaagcatctttggatcatacgttgataagttgctcctgcgttttttaatcc

SEQ ID NO: 6454 - DNA, 15277 bp, Oryza sativa
tccccctctcccccggccctctcccttccctcccggcgctctctctctccctttctctctctcgctctctctctccctcctctccctccgccccgctccgcccgcgcgctgcacgcgcgagcgcgtgagccgcccgcgccgagccgagccctcctttccgctccctcgctgccgctccccacgcgtcgttcgcgcgcgcgcgcccgcggggttgccgtccgtgccgcgccttctgcgccgtccgcgtcgcccggccccgctgccctgccacgccagcgcgcgtgcccgagccgcgccactccatccgccgcgcctcccgttgcaagccgcgcgcgcgtgccgtggtggccgaccgtctggtcgccgccgccgtcaccctctgccgcgccaacccgcgcctgtcgcccgtgtcgtcgcaccgcttcaaaccgccccgccgtcatcgccgtcgtcatcgcctcggccccgccactccgcgcgcaagccgccaagggacggaggccgagccctcctccctctgccgcgacgcccccgctcccctcctcctttttcccaaatcggcaagggggcaagcccctttctccccctctttttccccttttcctcccgccggcgtcatcctccctccctcctgtcgccgttttggccgctagccggagcgccagctcgcgccttgaccgccaaagtcggtttccaaaccgacattgccgccccctataaacccaggcgccctcccttccccttttcccctcccaatcttccctgtttctcgcccgcgccattgccgtccttctggccgaccgcagccgtcgcgtgtgtgccggaggagccggtgcgcactaggacgcggaaggggactccaggcgcgtcctctccttcctcttccccggcccgaggccggagagatcactcccgcgccgtcggcctctcgtcacagcgcccctcctcatctcggtgatgcctccctccgttcttcctcctctctctatctcccccccttagtttttggtagtagcacgagtagcctccccgtagctagccggcgccgccccgaccgttgtcgtcgctcgccgtggctcgccgcccgagctccgtagcacccgctcgtcaccggcctcgctcggtgtagctccgcccaatccgacgctagcaacggattcccgtggccgcgtagatgctctcaccgctgggaattggcccctcgtgacctcgtcgccgttttcccctttgctctccgccggttgccgccgccgaaatctgccgccgacggactccctccggcgaatccaagccgttggctcgctccctctccttcttcctcgtcgtctcggtgtacgccccgtcgcccctcatcgtcgcaaggcgccccggagaaaccaccgccgcccgccttccattcacggccgggccttcgtcttcctcccgccatcccacgtggcagccacgtaggcgccacgtcggcgccagctcagccgaggtcgggtcgggccgaccccggttagcccctcccgtgcgcgcgttccaccgcgagccgtgaggctgcgcgtgggcccgccgcatccgttcctccgcagaccgcgcgcgtgcaccgcgtccttcccccgcccgcgcgcgttcgccgcatactccctccgcacggtgagccgagccgctgacaagcgggtcccacccgggaccgcgcacggtgagcccggtccaccggctctctctcctccctcccgcgcgcgcgaccgtcttgggccgccttgtgccggccggcccatttagctcggccggaccgccctaattctcttgggccacgccctagccgcccgaggaaaagtctaatttccatccctcttttctttcttttcttttctttttcaaaaaggatttaattaaatccttttcctttagaccaaaaatccaataatcttagaaattcaatatcttcccaaccgtaaatccgtttgactccgttcgacttccaaaattcctcaaatctcgagatctatctaatggcacgcttagaggtcattaatagggctttattttcaccgtttgttgagttgtcccgtttcgcgtgtagtttcggagcccgaagacccgcagtgcgaggatttcgaggatcaagctccagatctcgagcaaggcaagccacctttgaacatcttgagcctatatttgaaatttaattatattgcttgcaaaatattatgcattgataggatcgcacttaatctgtttgtcccgtctgcaaggcagattggcggacttacctaatttgttgcatttgatccttcccttgttaattgttacatcatgtccccttgtaaccacctagttgcgtctcaatattcgtgcaccctgtgcgagtatcgacggacgccttcaaacttaaatctgaataacaacttgggtaaaacttgggtttacaaaagacttggaaaacccgacacctgggtcggtgcttgcgaactaaatgaatttccaaaaccgcggaccgggggacgtaccgggtgtacggtttcccgctctcgcacttaaggaccgattccttggaatttcatccaaacataagacaagtacgaccacatgggtggaatgggacacccctggctgagtaactagcttatcaggggagccttgatgccgagagacatgtggattcgtcggggtggtgtcggggaggacccctgggcttcctggcacagtatggtctgggacctaacctgttgttggtctgggacccctctcgtcggcatatggtaaacctgtgtcggcttggaaatgccttgtcatgaaagcttggaggtctcccgacgtggctgatccccacgggctgggtgatccgggttagtaatgtcgtgtgggtaaagtgtaccccctctgcagaggttaacaaattgttcgaacagccgtgcccacggtcatgggcggatgtgaggtgattcctagcgtagttttgtttgactactgattgtgaaattgctgttgtgaaaaggggttcgatgtttgaaaaaaatctgcagctgatgggatcagctaggcccgggtggccgtttgaaaagctgttggccgggtgccaaccttgcttcaatcctaaagactgatacattgcacaaactccgaccggacgagacgcactgtctcatccgtgtcgtttgagaagcactcacttagttgtttttagaaaagagttcaaataaaatcaattgcaaaaacatcagcctttctttgaagcctgcattaaacacttaattcccatggcttgctgagtactcccgtactcacccttgctctatataaataattctccccccagttgctgaagaagatgaagcggatcctgctgatgcggagttctttcaggagcaagccggctacgatgagttttagggtttctgcctagttcccaagtcacgcctgtgttgtttggtccatgtcctgcttccgtttcccttttgtaatgcagttgtgagctcgggatctgtccgcagcccaacatgactgtacctctactctataataaagagacctctgttgctgtgatattctatctccctgtgataccagcactgtttcctgggactggtatcgattaacaggttaatttggagcgtcacgggctagttccggtcgggactagttcggggcgtgacagagggcaaaacagaaagcattggagatgaggtttggaacttatgaggattcttatcacaatcttcccccactattggaggtgatgcaggcaagaaacccgggcacacacatggctattctcgatgaggtgaatgaatatggggagaatgttcttcgtcgggctttctggtcatttgggtgcatgatagaggcctttagaaattgcattcctttgctctgtgttgatggcactttcatgacaggcaagtacagaggaacaattctaaccgcgatcggagtcgacgcggatagccatgtcgttcctgttgtttttgcatttgttgaaagcgagaacacatcaagctggctatggtttttgcggcacattaaaatgtgtgttgttgaaaacagaccaaatgtgtgtgttctgcatgaccgacacgccggtttgctatcagcgatacagaagcttcaagaagatgtcacacagtccgtgccatggccagatttatatagcagatggtgcatgcgacattttggggctaatttttatagacaattcaggagtaagagattgatggacctgttcaagaagttatgcaagcagaatcaacaaagaaagtttgatgccatatgggatcaactggatcgtttgaccactacacacatggaagaggttaggaaaaaacctatagttgccagacaggaggagccggaggaacttgaacccattcctaatgaagcaccaagtattactcggcgcaggaagcgtggaagggccacgaagtgcttcacggagtgggtagaatttgagccaagggagaaatggtcgttgttgtacgatacagatggatcgaggtatggtgtgatgacaacaaatcttgctgaagtgtataactgggttatgaagaatacacgacctctaccacttgttgctatcctagagggcatcacgaggggtacacagaagtatctctgtaaaaggtattccatggctagtctgaacctcagcaaacccagtgttaagtatagccccgctattacacagtacatggatgagaaaagtaagaagggaggaatccacagagtatggcctgctgggaatagagagttgttatttgagatacgacttcgtgacaagagtggtgtcggcattgggactactgacatcacattggaatgcacgttgtggccagagtatcacgcttgcaaatgcaattgcaacaagccttacctgttacatcggccatgttcccatgttcttgctgcttccgcaaaagggggtgttgatggaaacatttttgtttctccctactttagaaaggaatcgtgggaggcaacttggcgtggtgaattgcgtggttggcgtgccgtgtgcgatttcactcgtcctcctccagggcaagccaattgggttcctgactcaaatttattagttgatactaagggtcgtcgccagtcgcgcaggatcaaaaaccttatggatgaagctgaagtgaaagatcgttctcgtcgtaagaaagcttgcattctttgcggggagaaccattcccgtaaagattgcaacatgtacaatgtagggcaagatgccacaggcgctgatgttcgtcgcgttccaaaggggaagtcgaagaagaaaaataatccttagttcgctattatccttggtggactccctactttgaagatcgttatcgttcaatttatgtttagtgcatctgtaattttaatttgaactttcttgcacttttattacccgaatctatttgtaatggccttgtaattttcattttgaactgcactgcacttttaatatcgtcatgtatttgtattggaattgtaatttaaatttcgaactgcactgcacttgtaatatcataatatatgtgtcgtgggcttgtaattttaaattgaaatgtactgaactgttcttatctgtatctatgtgtgctggtactgtaattttaaattgaaatggcatgcaaatttgttacttgaattatgttgcatacatttactgtactgttaccatacgtgcattgtactaatatggttttcgatccgcaggtatggctgatcaatatgatgggcagctgatagacaaggagatcgataggaaccatcgatcgcgacgtcttagtacaggaactttctgcaatgtgctaaagatgagaggaccggatcaatattggcgtattgatcctcgttgggtttcaaggtgtgtgaaaatatattgtttttactaatacaaggtgtttatattttcatgtattaataacttgcgctctgtcatgttgtaggctgagagtagctgggtctttgacgtttgcacggttggtcgagccttcacgtgcaaggtccgaacgaatccacattgacgcggcgcttctgagtgctcttgtggatagatggaggcctgagacccatactttccacctcacagttggagagatggtgcccactctgcaggatgtgtcttatttgttggggctgccgatagctgggccaacagttggcccaacaatggtgaatgctggatgggcggatgaccttctggccagttttggtggtgtgctgcctgttgcactggaggatctcacagatgggcacgggcctacgaaaagttggttgaatcagtttcgataggatgtcttccctgatgaccaggaggagtggattgtgcagcggcacttagtcgcttacctgttgtggttgtttggatgggtgatgttcacgggaactcacgctgactccgtggacaagcacttcatccactttgcggagcagattgcagagttacctatcgcggagattccacagtacagttgggggtcggcggtacttgcggcgacatatgccggactgtgtgatgcttgcgtgaggaacagcaagcaaagttcactccctggatgcccgttgctaattatgttgtgggcgcacgagcgcttcgacattgggaggcctcagcttgactcgtacgcaaactacagtttgcgagagatgtataggtctggtgttgatgacatcgacgatcgtcccactatgggatccttgtggacacaccgtgaggtatttttcgttaaattcgttgatgttatcattatgaatactagttcacaaactttccttatatgactaatgaaaactactacttgttacagccgcagtgggttagcgggacgacacgtcgtgtgtacactcagtttgtagctgactttgatcagcttacgcctgaccgtgttcggtggactccctacactcagcacgatgtcaatgatcgtgcaccgcacggtctcgcggatctttgcacgcgagatatgcaactctggatgacgacttgtcacctcatggtgaacgtgcacgtcgagccacacaatgtccacagggttctcaaacagttgggcatgtatcaggacttccctccgagagatggtcgtcctttggctgatagtcttcataggttagttcacatcacagttgtttaatcctacattttttaaaataaatcactgcacaacattttttctgatgtgtgaatttgttgttgtgcaggtactccagaaaggggctcgggctttcctacgagctagttattgtgaccacagttcagctgacggtacaagagtgggagcacgcagctgataacttggcacttcagacacctccagacgatgggagttattatggagcttaccttcgttggtaccgcagtgttacacgatggaggtgttttcctccacaaagagatagcaccgtcccccaccaggcagcgattactgacacttttacccctcagcctagatcagcttacaactcaatggtatgtgtttatttgtggaatttgagcaactagttcaatatttttaaaaagttagcaagtagttcagtatgtctaataaatgtgcaattggttcaactagttccttttcttacataaatgtggaactagttcagtatttataaatgatgtgcaactggttcattatttctaacaaatgtgcatcttgttaaatactcttaataaatgtgcaactggttaaataattttaattgccttgattatttgtggaacaggcggaatttgttgagcacgttcacgtggagtccgacaccctgctgcaaagactagaggcaagacctccagtcgtcaggcctgacgacgtggcgagcatccttcgcaacttccgtgcacgtgctgccgcactactacgtcgtgtctcctgtcggagcgcggcagatgtggtgtagacgtcgggccgatggccatcaccaccactaccccgacgttccagcgtggatcggagtggtccatcctcttcacgtcgcgggtacgaagcggcccacacatctcacggtcgtccttcctttcagcacaccccagcaccggagtacaccagggggtcagccggatcaggggtacccacgtcgagcacggcaccaccacgtccgcaggtattccaaactccgccttatgttcacccctcgcagggagcatctgggtcggcacacttcccttacatgccaacgggggacaacgtgttgaacacaccagcatagggacttcatatcactccgcgtgcgccagagcagggccacacacagcacacatgtaagtcattttaaacaataacacgctttagtttctaattatatgtatcgttactaactacgccatattttttggtttctccctcttgtgcaaacagacgatgagtacggttcggcgtcgacgcatcacggaatgcctgcttactcccctcgcacagcattcattgaggacttcttttccactgatcctccccagggggaagtagggatggattactggcacgcaacacctcaggtcacacagccgacgcaggagacggaggccggtcaggggccagacgtgacaccacagcaggtagctagagataggcacccccctgataatttgacatatcccactgaacagattaggcgtaggaagaagggaggacctagcaagcgtgcgaaaggcactgatcgtccttgacttatctatttgtattaaacttttagtcatttaagttctgtccgtattatttgagaaacactttacgattaacttagtactatcagtactatttcataaacttcttcggataattactcagtagcatacccttcgaatgaatcatgacaaattatcattcaaatatacaaataatgaaactaaataattcaaatattttaaccaacaaataaatactacaatttctgaccaaacattatcaaaaccctaaatcatatacatataacattacaaaaatattttcctttcttacacactaaaataaattacaaattattaaaaaaaataacttattacaaataaatggagaacgcgaccctgtcgaactgtgccagttcggcggatatcctgtcgaacaggggcagttcgacagccctgcctgtcgaacgggggctgttcgacaggtcctgtcgaacggcagccttccgatctcctcgccagtcgcgctctgaccgttcgataggcgccctatcgaactgcacccgttcgacagggacctactttcgcgattttccccggttgaccactacttttgcgattttccataaaaataatattaattctcaaaaaaattcgtgaatatggagcactctgccactggagagatcgataaggaattaaggatgcaatggttcgtgctgccatagacatggtctatggaccattgacgcatcgaagctcagagctgtcaaaccggagggcccattgcatgcaaccgtgaaaagctaagagaacacacatatgttcgtctctccctcactttgatttttttttttttactactacttgaccgtgatcagttcacgtacacgtaggtccatcggctatgctccatccaaggagctaagacagaattaggttacgagaccaccgatgttgtgtgcttgtgtgcgtgctatcggtttgcctattcctatctcagacacagataggatcgatattttggaaattgcagtaattttggtttgaattaatttaaaatcttaaacaaaatttggtcacatctattctttttctaaattcattttttttgtgaaatattctaaaagtaatcaggagaaatagtttcctatcggaagagggtgacaaaatccaaaacctcgatggtttaaatcatgttggctagtgggaatcaaccatacagtttaggaatacatgaaaatgccaaacaatttgaatttgtaagttgttatccaataagtgaagaatatgttttctcttttttaaaataaactataattattgttataacattagtttttcttgttgcatagacggatattttttctagtataaatcaagttcttgtcattaataaactcccaaaaaaaaaaaggagaaaaaccaattcttgtccgagtcggatcatcgatcgaccaatctaagcatgcaacactagcaccgatatataaatgctggtgatttcggccaagttcgcattggttgatcgatccatcggtcctcacgtaggtaatttcacggaacaatctcctcgcgatcgtttacggcttgattgtccatcatgattgtatgattgtgaacggacatccaatatacttataatttggttaaaaaatatatgtgaagtcatgctgatcacataagatgcacacctagtaaccgactcaagcatctctaagagtggtcgaggtacgactacacacctagtcctcgatcagcgtgatagtgatcccaccacttctacaaatggtcgagatatgattacatacctggttctttaccagcgtgattacgatcctccgactatctctacaagtggtcgagctacgacatacacacctaatcctcaatcagcgtggtagcgatcatcaccgcttctactagtggtcgtggtagcgatatctcccccccccagcaccgctaagatggagtgagagcgggagaggggatcggaggtggtggtcgtacgatctctcttgtctcaactagttgtgctgggcctgcacgggattatattaagctccatgtggcccacttatgttgtgccagaatgtgttggttcggcccaagctgctcagggctttagccatcatacagttacgctacgctgtagttacaattattatatagtgtagttgcattataattaatactataatacttcctccatcccattataagcgcggccatgaatttatgagtccaattttaattatccgtcttatttgaaatttttttcatgattagtatttttgttgttattagatgataaaacatgactactttatgcgtgacttattattttggttattttcaaaaagttttcaaataagacagacgatcaaaattggacacgtaaattcattactacgcttataatgtgacagagggagtactatatataaatttacatttgaaaatattttacttaaataagtttgtacaaattttgttttttttagcaaaactgaaaaagaaaaactcgaatttggaaaagaaaaggaaaacgaaaaggaaaagaaaacagttctggtccgaatctgatcatcgatcaagctaagaagtatagatggccatgtgggccgcccggcatggcacggcccaggcccggccgtgcctaggccgaggcttgtcgggccggcacggcccgaccgacgcaccgggccgtgccgtgccagcccacgtgccgcactcacagcccaggcacggcccaacacgcttcgggccgtgccgggccggcccgaagacacgatgggccatcgtgcttttcctcagaataagtctaaattttctccctcctattgggctgtgacattgtatagctaaaaaaagtctattttacctccctcttctttgtgctgtggtatataaatagctaaaataagtctatttaaggttcctattctttagacattgacatttatatgtctattttcagtccctatactttgtgtaccgggtctggcctgccagcccatcgtgccgggccggcccgaccgtgccaggccagcccagcgtgctggtagggaggcccaggcacggcccgacggtcgggccgggccggcatgggcccaacccaagtcgggccgtgccgtgcttgggccgggccaaaaaggcatgccgtgggccgggccttcgggcctcgggccttatggccaactataataagaagcagcactaccaccgatatataaacgctggtgattccggcgaagttctcattggtggatcgatccatcgatcacgtaggtacgtaggtaatttcttggcgtcatcgcaacaatggcgggcgggccggggagctgcgtgatgtgcgcgtcctgttgcaccctcctgctcttactggtcgccgcgctgctgatcctctcgtacggcgtcgtcttcaacgtcggcgtcacggtggaggacgcgtccctgacacgcctcgacctcgccggcgccaacggcaccgacctggcctacggcatctcgctcaccgtcgccgtgcacaaccccaacatggccgtccgcgccgagtacacccggccgctcgccgccgagctccgcctcgccaccagggaggagctcctccacgccgtccatctcgcggacgccgggcagagggtggaggcggccgagacggacaggttcggcgtgaccgacgagggcgtggcggctcatctcggcggcgcggcgttgacggagctggtgaaggagatgggcgcgcgcgggggaggaggtgtcgtcgctggagctgaagatcaccggcgaggtgaggttccggccggtgcacgccggccggacgaggagggtggacgcgacgtgcccgctgaggctgtaccgaccggggacgaacaccacgcaggtcaaccacagggtcatcaaatgccactagactagaagccgagctaattatataggactcgtgaaaaccttgtatctcgttagctccctcggttcgttgcagtttgtaggatcgaacgcgaataaccaagcctatcaggaggggggtgaatggcaaggaaaaccaaaaccccaaaagcttttaccgaaaataaaagttaccctcaaatcgatggaaatctcgacgtagttctattgccgccggtcgaaccactcgcacgcagccggtctaaccgccgccttgtcgccggttgaaccgtctccctgccgcgggtgtgaccgccagtggttagactgcagacttgcctccggtccaaccgtcaggatccagaaaaacacgtatcgacgaaacacttgaaagtatatcaactttattgcatcaatatatgtttacaaagtgtacctaaaacactcccctctcaactcacgaactaggattgaaacctcgaagtaaaccctaatttttctctctcaaaagtcgatatccttctagcctcaacccttcccattgcgaagatctcatccatacagtattcatccaccgtatgccatcttgtatccaacttcgtcacccggtatccttgaccgtctggatctcaactcctccctgagtctagtcccgatccccaccgttgaccgaagttgacctccaagaatcctgactttagtcatcttctcacatggtatcccgaccgcactagacctctgtttttccctgaacataatcccggtcctcaccattgaccaaggctgacctcaagtcacctgcacacaatcagataaagcaaacatttctgggcacaaatatcacaacctgacccacattagtcacacgcactcacactaacatccacacatcttttcaaactaattctttgattaaatcatttgcatagccaattgttcatcacaaatattaaccatgataatgatttcacgttctcccccttgatgaacacattggcaacatcttcaaaatgcaattttgtgtttttgaaaaatgaaaacaaaaatctcaaaagtgaaaaagaaaaactctccccctttttaaaagaaagaatttctcccatcaatttgcaatcaaagcacaaaatcgactatttttaaaattgaaacaattcaattctccctctttcaagaagcatgcattttgtatatttctcctcctttaacaatgatttcatcaagaatgcaaaagagaataataaccaatgaagcacatatgcaatgatgtcatgatcgccacttggaataaccattttatattttatattttatatttctttcgagagctttgaagtgtacctaaaacaattcatgatcatgtattgcaagacaagagagataaattcattaactagttaacaaacatgcactatattataaacatgaatcaaagatattataattaagctcgaattagcaataaggattcatgatttcaaatgatttataatgcaatatattcacaagcacataggttgaaaaataaacactatacatatatacctattgcatttatcactctttctcaaattagctttagcacaaaacaaacaagataattttttaaacttttatttgagccattttactcactttttttctctcaattattccatgtacgtcacatacctggtgtacagcgttggcaacctaccctaggatacctaggaaaggtgtttgcactatgctactactgacaatatgagagatatggatagagctcttgacaatatctctcattacgaaaataaaggaggagaccaaaacttgggccctagtagaagcaaaatgccttgcacatatcaatccttagtttttttagaaaatactttctagtttccttttctttttcttttgtaacgctcttcttcctatacagtttttccctcccagtatactcaatgaaattggcgcacctaaataccgatttattataaaaaaaaaagctcgattaggtggttcagccgttgcgtacgtgcatcgtagcgcagcagatactaccatccagcatatcacgtggcatgtggcacagaagttgcgagttcgtgaatgcatatacatgcagtaggccagtataggaagaagagaagagaaacggtacagatcgatcaagatatttctgtacagaaattaaccagagtacgaaaagttagtaattttgaattgatgaatcatatatatttcgaccaaaactcacaaatttggacttacagatcaatgtatactacaggagcaattttacggtccttaaagaggtgtcacgaggcactacttttttttagtaaactagtaaggtagcccgcgcagttgcgcgggcctcttatttaaaatatcattttttgttgttattacgattttttatattatgactttgtctctcggtgaaaaaatttatggttgaaaaacttcttatgcataacaattgtcaatacaaaaggtccacacacatagaaattgtgtcgtatatatgtacacgtgcattagattaggaataagttttttttttcttatacaccgttgtacgtacacgaagaagtttagcaattgaatggtttagttttaaaggatctaagataatgggctcacggatttaaatcatgtgataatgtagagtgtttgtagcgtgtcatctggtgatttattaggagcgtctgtaaaacaaaagattgaaaagagcatatatttagatgaagcacagaaaaacacaggaatgttaattacaatttattaagacatctagatgaaataatcatt

SEQ ID NO: 6455 - DNA, 6276 bp, Oryza sativa
tatattaaaataacgcttctgatagatattggaagatttccagatcaattggtgaaaaaactgatgcataagctagccatgatcgcaattattattattatttttacaatctgaaagaaatctgatcatttcagaagtgaaactatctctctcaaaaagaaaagaaaatacagaggagagaggttgagcttccccatcacaccacaggatgagggagttgctaagtactaaattagtatgctattctcagttgcttacctgcctcaagtaggttaactgccctctcacttcatccatgtcctcatgtccctttctcttccttgctataatctctctctctctctacgattagttaatgtcaggatcatctaccatatatgtgtcttctctcaaatttggagttattggatgcaacattagagtttcttggcaataatttggattgaaaagattcagatgttagcaacaccacatggcgacgaaatgtcaggactccttgtgaccttgtccatgaatacaagcatactatatttgcaaatgtaaactacttaaataagatgtgatgcctttagaattcatacaagagcaacaaaacatgccctacgtggattatcgccaatgatcaaactttattcttcaaccaatgaaccaaagcaacctagcatcttaattaccaactgaactataggtagttgcattacatcacatctaggctgaaactaatacgatgcttgcttcaaaacagaatatacagattatttctgaaatgctgacatgctagtgacaagcatggtatggtaacatgggagagctaatgctagtgagatatacataagatgcttgagctttctggccaaccatgcatgctaccattttgtctggttttccttcctatttttatgagctgaaagcaacagcgaagagggaggagtccgtggtaggtatgaggcatcttcagggtgagctagcagctggtttgcatggcaccaattttctcacaacaaatccccaaccaaaatgcatccaaggaagaaaagggaaaggaaataaaagtaaggaggacatgaaaattgtaccaatggttgttgattatctgatcagcctgctaacctcttctagaaatgggttcagaacctgtacttctgagagggaaaatgacaacaaattccaataattgaattggattgggttatttgttaggacaaatgcatggtgatgtttgcatctgatcagcatctgacatgcttgcactgcacgcactgacttgctctgcaaatgttggcgcagagcagcagcagatctgtgcattaacttgtggagatgtgaggagtaaaggtagtacaggcaggtgatccacatgtatgtgagtaactctgatgatctgatctctgaagcccattgcagtaatatgcagctgttctatggatcacagatccatggatccagccaactgctccatcgtgggctccattaacaagctgtttgcactttgattaccctgaactttattctatccataaaactgagattgtcttcaggaaaaaaaaaggaactaatctaattccagatactacaagacaatgaaaaacaaccggcggtttcgttaagtgttcaactgttcatacaccaaggcaaggaaccagctacagttgaatagtgccctcaaggacaagctttctagaaattttgccagacatgatccagaccacgagttacccagatgcaatcccaggtctgaattgaaaggtactaaataaaagccaacacaataatacaaaggtgtcccatgggctttgtctgagcccttaagacagaatgtacgaatcaaaagttccatatccagcatgtgtaggggaaactgagttactgttccaatgtaccctcgactccatacaattaacatttcaacatttcatgttcatatgagaacgcaggagatgccaccatccacatcaggattaaagagcgtgacaagatcatggcatggcatgttcccaaaattaattctcttctacaggaccatttccttcagtgcaatcactcttgggcgggcaaagatcatgattcttcgtcactttcattgccaaaaaccgatgacatttttgtagcaaccttaggtttcttgcttacattgccaactggagcctgtccgtgcaaaagagtagccaagttaacaattagatactgctgcaaaaaataaccgataaaacagtgtttttttcttaaaaaaacaacctaacgtttggagctcccatgacactacagtataatggagtttggtggtgcacaaagccacaaagacgacccggttgacatgtcgaaaggatagtagtatatgcattatattctcactttaggccaaataagttaatgtgtcaaaagcttctagaagagcacatatgctgagaggaaattacagtttaacaaaaaagcctaagaaagtttcaacttaacggcaaactagagcaatgaaaaaagaatggagaatatagaaaagataaaacaaattcacagagttccatgcaagcacacaactactttacttccataaatggtcatatcagtttaacaaaatatgttgttcagatgtggggtaccttggaaggagccattttggagaagccaaacttcaaggttttacgctgatcctgatttgaagggttaggcaagttcttcattgtaattctctctgatgagctctctgatggttcttgcttctgctgctgctgctttctatgagcatcagcactgaagtcccattaaggaaattgcaagttcaataaacattcagcacatttgttcatagttagcacatcattgagttatcattgttattgactaaaacatgggatggatacagttgagcaaattttgccagctccttctcttctcgttgctgctcacgtttctgcctgtcatcacggctgctgctgctgctgctttgcatttctttcatttccttgaacctctgttgtaaccacagtgaacttatcagaaatatagtcctgaacaattaatatgtaagagtgaagggggaatatatgtatgtgcacccatacttcacaaaagaaaaggcagtagaagagaagttcgctgcaccaagtaaacacattaccttcctatgattgtggtcgtatgagctcaaatgagactcaaattcatgcgccaatttgtactgcttgttacagagactgcaaaagaacaccttctgtatctccttgacctcactacgtattttctgctcgcgttctgctatgacctggattgtcatgatttgcaccaagcaggaaaaagaaccaccaaataaaaaatgcccaaaatgctcaaggatcatgagggctgatgctagcaactcttgcatgaataagatacaaatatcaatatgtaatgccaacagctagatataagatttcaaagtgcaagcatcaaccctgaagaaatagaatattaaggaatcagtgttcgattgcacacctcgcgcttctttatatgttcttcagtctcctcaagctctatgtttaatttcctcctttgcacattatcttctgatgtgaagaagtcatcttgctcttgcttccccacacccaattttgcatctctgataccagcttttattggctctgttatacctatataacattaaagagaaaagggcattgtcgtgaaggtgccagaattttagcagaaaatattaaagcgatgactgttttttttttaatcaatgatagtaactagttagaaaaatagagagaactcaacataatgatagttaaaaattttgaatagacataaagggataactaacaaaagaggttaaatcatatagttcagtcaagtcgttatgccacagacatggtgattagttatgactagtcttgtactgctcaaacagaaggtgcagagagaaagggggaaggttcagagaagaatgaggaaggagcaaggattgatcaacaaaacaaaatagaggaaaacagagtaaagtaacatcaccaagaacaaaaggttgcattgataggaactacagcaagtcattgcattgatagattttcctagtttacacctataaaactagcctgttgaaagaccagatattccaatctagtgcctcccaacagagcaaccttcacaaacaacaacgtgataattacggaaaatgaagcataacagattggcagtcaatcatctcataaaattgctcaactaaccttaacctaatgctatactccctctgtcccaaaagaagccaacctaggaggggtcgcatcctagtaccacgaatctggatagccctttggccagatccgttgtactaggaggggtcgtaagcctagaactagaatacctagaactagaacacgacagaagcaagaaccgccaacatccctttaaatctcctatcccttgccaattcagttattctccattcgtagccatgcataccataatatgttatgcatgaagaaattaaacctgaacttagcctaagacaagattttattagagatgcatgcaaatgtagtgacagttactacgctcacaaaccacaactacaaaactaaggaattcaataaggattgtggaaactggtaagcttaagatggcagagccaagtgttgaaacattaagctgttgctgacagtgtagtttgaaaagttaggggtgtactgcaatggaggtaaacaagatggagaaagcaagtgagcgaggtagagaagatgaagttttataccttgctcgttcttgccgagccccttgcccttccaccccatcttctggagcagcctgaatccgacgttggaggaggtgagctgcgtgtcaacggacgcctgctccagcccctccgtctcgaggttctccgtggggcggtggctcatgggcagccggaactcatcaaaatcatcctccagctcctcctcctcttccaccggagctccatgaggattcctgctgctgcttccgccgccgcgatctcgcctctcctgaacaacagaaatcggtcagatggatctggagcagatcggaacggagaggtgggagtggttgctactcaccatggcttcgtagacagacgcgaggtggggggagggatgctagggttttcgtcggagacgcctcgccgccgccgccgccgccgagacggagtgaggagaggggatcggaggtggttgccgtacggttgggcctgaacgggcttatattgtgctccgtgcggcccactaatattgggccgtaacgtgttggttcggcccacgttgaccacggctcccgccagaactcgactttggtggacttccaaaaaaactcgaatttggaaaatgaaaagaaaaaagaaaagaaaagcatttcttgtccgagtcgaatcagcagcagcagcagcatgtacaataacaaataaagctgagaatgtacaataactattttcagttttttttacaaattataaaagttgaatttggtattgcatgtttgtggagtgatatatttcatataaatctatgttgtcaatttttttcgaatattttgataactatttagtggttacaagagtctcagtagcaccttaggtcctggttggactcctcgtgggagcgaattttccaggatttaacggctttgtgttttcagtggtaggcgatgtacccgtcgacagcgaggcgcctgtggtgatttcgtcaatctccaagatggatttgccggctcagttttcgaagatgctcgtaggggtagggtttgcgtgtgttcataggggtgagtggatgtgcgttgtgagtatctgcgttgtactgtgtaatttaaaaaaaacgaaggggtgtcctcttgaggaatgaaaatccacatccacattagtcgcatggtgatttgagggtatgccgacacgtctgaagtggaacttggtgaagaaggtgaggtcttcatgatctcacccgagtggtttgacgccaactcaagggagaaaactttagggtaggtctctgccgtatttgataaaccaaacggagtggagtggttgtctcctaccgactggtttgaatccgagctaagaaaagagatcttgccgaaattgtcggtgatgaagtcaaggctgccaaagcgatacacctgctcttgggggaaggcgaagtcgtcgatgcctgatgtagatcccatcgcactagtcggcgagaaaacttgacgctgcccctacctagcgcgccaactgtcaaaactatatttcagcaatactaaaaggggtagcgaacaagtaggaaagtagatgggttatgagataaaaaa

SEQ ID NO: 6456 - DNA, 45855 bp, Oryza sativa
gcaacatgtaggctgcaccctgcattttctttcataagtgatggttgatgcaatgcaaatcctagtcttgctaggagattacaggaaagctaggtgatctgatctgagcaaattcgcacagttttgccagccatttgttgcattagttagagatccatctgatccatatacgcattacgattaattgtgttacagaacgtatttaaaaatactgatcgatgcatgtgtcctactagtatatatgtacggcaagacaaaagcatgcaggatcatgagttggacaaggagcaggtgaaccgacattatttacctttttctttgcgggtgggccccacgcagcagcctatgttgctcgctgagctgttaaatttacattgtgtgtccaatgccattgttaaacatctacttccttcgtcccaaaataaaacaacttttatatatatatatatatacacaaattcatgcataaatgttaatttgtttaagtttggaaaggaataccctcaaaaaagtttagaaaggattgagaagatcgctagagtaaaatgcaaacatgagagtgcagcgagattatacaaattatatatggtggtactattgaataaactttttgttgtaattgttaaacttccatgtggaactataaagattgctttgggaaaaaaatgcgaatattaggaaggaccaaatatcaaataaatagaagggatgagtcttcgaactcaggccggctagctcaccaccatgtggagctggccggagtacccctgggcttttctctaaagattgctttggttctaaagataaatgcagaaatgtatgaaataagctctttttatgttttctaaagaagagggaaataatatcatatcattggttaaaaaatgttaagagacacaaagaaaaataaataagattagctagaatcggaataattaacatatcataattgtagttctattttagaagagagaaggaacctcacactattgtgtaacaaaactgtataatataacaagcccccttgagtaatatttaacaaatacagcatgtataccaactcaaaagaggacatgtgtataattaatataacatgatatatatagttgaagacaccatcagaaatgctaagcctagatatatactactctagctaggctctagctagctcatatatatcaattaatataaaaatattatattaaagatatatagttaatttgcaagcatatgcatgacgcaaatggcacgtttaattaatactatttgtcaaaactgcatcaagtggaaacaatagtgcacatgattccatttgaaacttagccatgtcttcatgtttggcagtgctaaccgagaacacaacaatgcatcttctacatatttcacctaataattaacacactgacaacttcatgaagctttcaccgaaaatatttgagatagatcacgtgtcacaggccggctcaataacatggtacaacttagattgggagtataattaaaatgggcatagctaggaaggcaacagcatagaacattgacaacataatgatcatgcatgtattaagacattgacccactctggcaaaatctagtctaataaaaaactcacaaggttaattagaacattcagagatggatctcatcatgtcctgatggtatacttgtaaatgcaagtcgctttaatcatacaaggatggattttaaaaaaataaactcttccaaaacttatttctaaacatgaaccttttggcatggcgagacaacaataccatgtgcaacccatcatggcgtgacagtgttgtttcacctaagtggggtggtgtgaccaaaaggtttggattggaaataagttttggaatagtttacttttgaaatgaaaaaataaaaggttcaaaagaaataataaagaatcaaaaggatgtgataagaaaataactcaaatcaattaattagttgctctttatttatgctacattgaaagaaatgagttttttttaaaggaaaacaaataaaacagatgaaaatgtgttataaatttagggaagaatttaaaagcaaagatgacgacttattttcagttagcaactactccactatagctctaggtgaattggagagctactagctagggatctttgacttttgccttctgtttggttaatttcaactttcaagtatcatcattgcgggacgttgactttctaatcctagtgagcaatcaaactttgataatcgtgtcacattaactaaatgagacccatttaagtttaacaaacaagcgttttgacatagtaaagtaattgctgattatcaatggcaaccccttctcatgtaacatccacgattttcagagctcaaggatttgtctcagcaagggatggcaattgtggagattatgggtatcccatatctacacggcgatggtattcgaactgggtacaggatacctaatgtagatagaatatcttatctgtatctcgggtttgtttcttaacttgtgtatcaaggaaacaccctgagacttagtcggttacgactgtatcttacttatattttcgtattccgttagggatatagattatcttttgtaacccggactccttccccatatataaggggggtccgggcgcctctaggggcatatgctgatttttcccgaatcatacaatcaataatacactcggcggattcatccccggacaggagtagggtattacttcttttataagaaggcctgaacctgtataaatcttttgtctccaaacccatacactttcctagcttgatagccacccccttttattattgccgaaatctagtttcgacagttggcgcgccaggtaggggtagcgtcaagcttttcgccgatcagtgcaatgggttccgtctccggcatagacgacctcgtcttctcacccgggcagacgtttcggttcggtagcctcgacttcatcaccaacaacttcggcaagatttctctcctcgactcggaatcagaccagtcgggagagaaccggctttcggtcccgtttggattcccgaacgcggctgaaagctacttcaagaccatctcaaccgagtcggcttcagaccactcggccgagatcgcatcttctccaacgataccagatcaagatgatggggcttacccaccggtcctgatgaagctccccgacgatttagcggccgtcttcaccacgacagcgtcttcatcccgtaggcctaggcggaagtcggcttcaacaccgatttcgcctagcttcagggaagtcggcgtcatcctccaaccactcggcacggtttcgacagatcagctggatgactacaacagctctcccaccgtcgactcacgtcctactgacatcgtggagtacgacgaatttagttctcgatacaacgacttcaacgacttcgacgacttcgacggaagcctagatgacaactacacccctctctactttggcgttttcatggccaataatgagacggaggagcaacgccaagcccgggagaccgaggaacgacgccgactggaggaggagcatcaagcacaagaacaagaacggctacggcgcgagcagcaggaccgtgagcggactgcgaaggaggctgaagatcgacgtcagcgagctttggaagcagggcgccgagcgcgtgatctcatcggccagcaagatgtcgaagggacaccggttttccgcacccctcaacagaatgcggttgccgcgatcacccttctcgacaccctcctcaaccaaaacgagctcaatcaatccgaccacgtcgtcaacatcttgaatcagacgaagaccatgattgcggcgacggtcccagttaactccgaaagcgtccacacgccgactggcagccgggtcccccacttccgatctcatgactaccgtcatccaagcctcagcatcactggagcaggatccaatcgcaggagcaggggccacgacgagcggtctgttcactcgcctcccgaacttcatagggagcgccgagtggaacggcctcgctcaccacctcgtcgccgccccatcgatcttcgcgacacaatcatacagcgccgagcagctcgaggctaccatcactcgccggatcgccgcgacgacgaccttgacggagttgcagccttcaccgacgacctgcgtcgagtggattggccagccggcttcaaaccgactggaatagagaagtacgacggtaccactaatccagaatcgtggcttaccgtctacggtctcgcaatccgcgcagcaggaggagataacaaggccatggcgaactatttaccggtggctttagcagattccgcccgatcttggctccatggattgccccgtggtacaattggatcttgggccgaactacgcgaccacttcatcgccaacttccaaggcaccttcgagcgtcccggcacacaatatgatctctacaacgtcattcagaagtccggagaatcccttcgggattacatccggcgattttctgaacaacgtaacaagatctccgacatcaccgacgacgtcatcatcgccgcgttcaccaaagggattcgccacgaagaactagtcggcaagtttgggcgtaagcctcccaggacagtcaagctcatgtttgaaaaagccaacgagtacgccaaagccgaagatgccgtcaccgcatcgaagcagtcgggtcccagttggaggccgaaaaatacgccggctacgggaggaggtggaagtaacaatcataaggaccgcaagcgtaagcctgaggaacttgttgcaaccgccgctcactcttctcgacagcgttcgcgcgtcaacaccttcgacaagatcatgaactcccaatgcccgcatcatccaaactccaaccacgtggccaaagagtgcttcatctacaagcagttcgcggagcagtacaccaagactgcacggaagaactctgacgaagaacaaagcacgtcgaggaagaaggacgacggcgacaccccggcaggttttcaagatcaccgtaaggagctcaaccatatcttcggcggccccctggcttatgagtctaaacggaagcagaagttgactgaacgggagatcaatgctgttcagcccgacacaccccagtatcttcgatggtcagagattgcaatcaagtttgaccgctcggatcatcctgaccgagtggtccacccggggcggtaccccctggtactagacccagtggtccgtaatgtcaagcttcgcagaaccctcattgatggtggcagtgcactcaatatcctcttcgccaagactttggatgatatgcagatccctcgctccgagttaaaaccaagcaatgcgccttttcatggagtaattccaggattatccgcaactccactcggccagatcactctcccggtcacttttggcactcgggaaaacttccgcacagagaatatcagctttgaagttgccgatttcgagacagcataccatgccatactcggacgcccggcgttagccaagttcatggccgtcccgcactacacatacatgatgatgaagatgcctggtccccgaggagtcctaaccctacggagcgacatcaagcaagctgtcacatgcgacaaggagagttgcgacatggcccaaacccgcgagatggcgtctgcccgagaggaaatccgactggctgcaaccacggtgagcgaaggagaagtgcccgctgccaagatttcaaaaagtggggaaaccgaagccgagactaaaaagattcccttagatccttctgatcctaccaaaactgctgtaataggcgccgagttagattgtaaataggaaagcgcgctcatcacctttcttcaaaataataaagatatctttgcgtggaaaccttcggatatgcccggtattcccagagaggtgattgagcactccttacatgtcaaagaagacgccaagcctattaaacaacgactccgccgatttgcacaagacaggaaggacgcgatcaaggaggaattgaccaagctgttagcagcaggcttcatcaaagaagtccttcatcccgactggctggctaacccagtcctggttcggaaaaagacagggcaatggcgcatgtgtgtcgattacactgaccttaacaaatcttgcccaaaagatcctttcgggttgcctcgcattgaccaggtagttgactcaaccgccggctgcgagcttctcagttttctggattgctactcggggtatcatcagatccgactgaaggaatccgactgcttgaagacttcattcatcacgccctttggggcatactgctacgtcaccatgccgtttggattaaaaaacgcaggagcaacttatcaacgtatgatccaaagatgcttctcaacgcagatcggccgcaacgttgaagcctatgtggatgatgtagtcgtcaagaccaagcaaaaggatgatttgatctcggatctagaagaaacctttgcaagcatccgtgctttcaggatgaaattgaaccctgaaaagtgcaccttcggagtaccgtcagggaagctgcttggctttatggtgtctcataggggcatccaagccaacccggagaaagttactgctatcctcaacatgaaaccgccaagtacccagaaagatgttcagaagctgactggatgcatggcggcgctcagccgatttgtttcacgacttggcgagcgggggatgcccttctttaagctgctgaagaaaacagatagcttccggtggggacccgaagcacagaaggccttcgaagatttcaaaaaactcctcaccgagccgccagtcttagcctcaccacacccgcaggagccgttgttactgtacgtatcagccacctcccaggttgtgagcacagtcttggtcgttgagcgcgaggaagaaggccatgtccagaaagtccagcgaccgatttactttgtcagcgaggtcctagccgactccaaaacgaggtaccctcaggttcagaagctgttatatggtattttaattactaccaggaagctatctcattactttcaaggtcactcggtaacggtggtcacatcatttccactcggcgatgtactgcacaaccgcgaagcaaatgggcggattgctaagtgggctttggagttgatgtctttggacatatcattcaagccccgcacttcaatcaagtctcaagcgttagctgattttgtcgccgagtggaccgagtgccaagaggatacccccgtggagaaaatagagcactggaccatgcattttgacgggtcaaaaagactttcaggcactggagctggagtggttttaatttccccgactggagaaagactaagttatgtactttggatacatttttcggcgtctcacaacgtcgccgagtatgaggcgctccttcatgggctacggattgcgatttccctagggataaagcgtctaattgttcgaggtgattcacagctggttgttaaccaagttatgaaagagtggtcctgcattgacgacaacatgatggcatatcgacaagaggtacgcaaactagaggataagttcgatggacttgagctcagccatgttcttcgacacaacaatgaagctgccgatagacttgcgaactttggatccaagcgcgaggcagcgccatctgatgttttcgtcgaacacctttattcgccgacagtacctcacaaagatgctactcaagttgcggacactcatgacatagctatggttgaagccgactggcgagagcccctcatacgatttttgacttctcaagaactccctcaagacaaagatgaggccgagcggatttcaaggcggagcaaactttatgttatgcatgaatccgagctatacaagagaagcccttcaggaattctgcaacgctgcgtatctttagaggaagggagacaattgctgaaagacatacattctgggatatgcggaaaccatgctgcagcgcgcaccattgttggcaaagcttaccggcagggttttttctggcctactgcagtgtccgacgccgacaaaattgtgcgcacatgtgaaggttgccaattttttgccagacaaattcatctaccagctcaagagttgcagactatcccgctgtcttggccgtttgcggtttgggggctcgacatggttggcccgtttaaaaaggcagtcggcggttacacgcacctcttcgtggccattgacaaattttccaagtggatcgaagctaagcctgttgtcacgattacagcagataatgctcgcgatttcttcatcaacattgtgcacagattcggagtacccaatcggatcatcaccgataatggcacacaattcaccggcggagttttcaaagacttttgtgaagactttggaatcaagatttgctatgcctcagttgcacacccaatgagcaatggacaggtggagcgagctaatggcatgatacttcaagggattaaagcgcgtgtctttgaccggctaaaaccctatgccggcaaatgggtgcaacaactgccatcggtactttggtccttacgaactactcccagtcgggccacaggccagtcaccttttttccttgtctacggggcagaggcaatgttgccgagtgaagtcgaatttgagtctttgcgctttcgtaatttccgtgaagaacgctacgaagaagatcgagtggatgacttgcaccgattggaagaggtccgcgaagcagctttaattcagtcagctcggtacttacaagggttgcgacgttatcataatcgcaatgttcgatctcgtgcctttctagtcggcgacctggttttacggaaaattcaaaccacgcgagatcggcacaagttatctcctctatgggaagggccatttattatctctgaagttacccggccaggttcatatcgactcaagcgcgaagacggcactctcgtcgacaactcttggaacattgaacatcttcgtcgtttctacgcttaactttatcattatattttcctattttgactgtcaaacatcaagttttctccttgaagttgtcagtcgggggctatcatcataataatggagtgtgattttttatcaattcagtttgcttacctggtttatcattgccttgtttggtttttctacttagtttgcgaggactgaaagtttttaatagcttctttgggttttaggctcaacaaagcttagcaaaaacttttaagaaatcaaaaaacttcgcaagaatcatcaagcacagcataaatacaccagtattgtacaaattgagcctccatgtattacattcaaactcagtcagaatcagtcctttcatcatcagagtcttcattactcggttggaggtcgttgttgcgaaattgctctacaacatcactcgcaattttgtcagctgcattttgcgcactgctgataagatcaagggcagcttcttcacttgtcccgtctgcaaatccatcaatggtgtcgacttcaattctcgggtacaaggattttgtcatcgccaaggccatgccagctcccatacttccagctttcttgatattcttgaaatatacttccggagcaacactcagcttgtcaaatatttcggttgcgtcgagtgcactcggaccaccattattgaggaacatggcttggataattggtgcagcggcattggcgacgttatcccttgctccttcaagcctcttgatcttaccaaccaggacgtcaaactgagcttgagatttgatcttgcgatctgcaaaacacatttatgatgagcatctgttgcattataaggagagaagctcagattgttagctggcgttaccttcgacttccttcaaggatgagtccctttgcgcagccagttctgtcttgtctctctccagggcttcaatttgcttcgccatctgttccatcctggcggcttgcgctgtttgaaatccagatggttgaggatgcaattatgacagcataaatcaatggaacagatctggatgattaccttttgatgaaccacttagttcgaagtttgcgtcctggagctgggcgattcggtcccttaactctttctctgtttttttggcgcactccttggcctcatgcagctggtccctaactgcttctagagttcccaaatgaggaaccagcttttccaaagttgtagtcttggcctcattgcgaagatggattctctgcatgatggatcagggttcagttctgctaaaaagaaaacaaagttaccgaaggacgtcactcggaagacttacatttacaatacgagtggcttctccgagcgctttcttcagctggcacacttcttcatcttctttttgacggtttatgactatgccggcggcttgtgagttctcgtcccaccatttgatcaagataggaggacgagagtcgtcggtcgcctttatgcgagggatttcttctccgtcatcacctgatggtcctgatgtgtttccaagacattagacggatacactgaggttatttaaatcgccattgtttgagaagacaactaacctgaagatgtacctagctgagcgtgaggtgatctttgttctttacctgaagacccagctatcgagtcgttaccagcttctggtccttgcgaagtcgtcgtctgcgcttctacttcggggatctcttgatcagggcctgcgtccgactggtttccagtcgggggctcttgagttgttgccgtttcagttgttgccgactggtttccagtcggcggcaggtcactcggattggccctatcgcccgaagcatgggcgccagtcggctggctttcagcgatcggctggttttcagcagtcggctcggggtccttggatatattttgctctgtcatggcaggatcggggtcttttccagatggatctatatcagatggtttcctgcagagtgttctttcagtatttagcattatcttcatcggaaaacatgccgaagcggaaatcataccgagagatctaatacctggaagatgttctgatctttggcattgcacggccagccagttttttcctgggcatggtgcgctttgggggtttattaggcgagcccttatccccagatttatcatcgtcgccttcatcatcatcaagtaccagctttctcttgcgaggacctgtttgaccagtcaatttggaggtctgaggttgcggatctggtctgatcgttggccctccacctccctgagcggtgtgttggcgaggagaccggcgctgagtgactggtggatctgacttcatcaatgcatattcctgaacaagatgcttccatagttagtcaactcagcatgaagataaaattatgttctgatcacggtttgagggtttccgatgcatacctgtggaggcggattgaatgcattatatggcacaactggcagttgatgagagtagctgaccacaattgcatttgagaagattttatacatcctctccttcatgattttgaaatccagggaatccggttcttcacggttgggatcatgtttgccgtcgaactcgaatgctgtgcgggatctttccttgattggcgccagtcggcatttgatgaagtgccgagtgatctgctctccctgtaagccttgttctttaagatttaacatacgatccaacaactccaaggcttgtactgcttcatctccgattggaagagagttccaagtatcttggtacactggaggaagacaagagtacccgggaagagcaggctcgggattctgaacatagaaccagtttgcatgccatcctttgttcgaagtcttgaagggcatcgagaaatatttttggctcagagttccccttagttggaatcctgcccccccgactacacacggtttgttcttgtttggttggggcttgaggaagaagatccggcggaatagggcaaagtgaggtttgatccccaaaaaggcttcacaagcatggacgaaattggcgatatgcactatggaattcgggtttaggtgatgcaagctgattccatagaaattcaagatcccgcggaaaaattttgaggtcggaagagcaaagccgccgtagaagaaatgcgagaagaccacaatctcatgagtatccggagacgggaaagcctcaccgtgcgctggtcgccacccgatgatctccttggcagggagaacgccgtgctccaccatctccttaagattctcctccgttacgtcggatgacgcccattggccttcgaagctttctctctcttccgccatcggtttcactcaaatgtgctgatttgattcgagggatggcttgggagaggtgagggattgaggcggtggatcacgggaaggattttgatgcacttttcggaggtggatttggccggagttgtgaaccctagttcgccggcgcagctttgcactgtagcagggagtggggaaaatggcgagagttccggcggggaagacgaagcgccgcttggatatcggatttttcagttaagggtatcggaggtgctaatgggcctaggcctgaacagtacttcagcccaatacttttaacagcgtggcccattgtgttccttagggacttaggcatattttgctttggcaatattatgcgcacaacagtgttgcccaatgctgatcaaatcctttttatgcggtcatataattctttggaattattgcaatgcaaattaaaaaggtgcccgacagaaaggcgttatgctgtttttgcaagcttttttaggctacaaaagctgtttgggttaactaggaatgacttgtttttattatagttatttccttggcgtgttatatgcctgttttcatggtaaatagtcatggcctaggctatttgacttatttattaccataatctttataatacttgatgggtaatctttagagtttttatattcggatgcctgtcgagtgtgttcattcgtgaaccttttagagtgtaaaccactcggatttcttttattgtggttaaaaagcagtcggctagcatgcttatttaggcaccgcgtacgcttttgtcatataatgcacaattgtgttattattttgtctttcaactatatgtttagtttgttaactaatcacatagttgggggctacacctaattaggtgcatctattcgatgcaccatattctttatcttttcgccctttacagtccactcggcaggttttggcttgaagagtttgaagtactcggattatcatctttgagagggctacgatggtcgactgcaaaggactcgggggctactgtggagattatgggtatcccatatctacacggcgatggtattcgaactgggtacaggatacctaatgtagatagaatatcttatctgtatttcgggtttgtttcttaacttgtgtatcaaggaaacaccctgagacttagtcggttacgactgtatcttacttatattttcgtattccgttagggatatagattatcttttgtaacccggactccttccccatatataaggggggtccgggcgcctctaggggcatatgctgatttttcccgaatcatacaatcaataatacactcggcggattcatccccggataggagtagggtattacttcttttataagaaggcctgaacctgtataaatcttttgtctccaaacccatacactttcctagcttgatagccacccccttttattattgccgaaatctagtttcgacagcaatttcccccgtggggccgggtcccctacgggggcgggggcgggttcagtttttgacccgcgggggatgtggggccgggggcccgcatttttgtggggaggggacaggtgaggcatttcacccgtggggtgccgaagggtgtatattaaatctcaaaatgtaacccatagaagatctaaaagagccacaaaattttaagtaatagccttatcctctccactctccccatctcccctcccctcactctcactccatattaacttggagcgtcacaggctagttccggtcgggactagttcggggcgtgacattttttttatctattcgattgatttttctggtaggttgatttttcacatggaaacttttttttgggtgggtaattttttaaggcaacatggatttttcacgtgatggaagaagtgtgatggtgggagaagaggagaacgacgaccgcttttacagttgaaaagaaaagatgggaactgttttaatcacccggatggatgtccatccatttattacatgtcatttaaatggttatgaaaaaaatttaaaaacaattaacaagatagatcaatacgtaatatatcacttcacaaatattaaagttaaaattcaacttctacaaattgtaagaaaaataacaaacaaaactcaaattactatacgtatatttatagttaaatttgttatttttcttacaattggtagaagttgaaatttaaacttgcaagtttgtggaatgatatattacatattaatctatattattattatttttgaattttttaataaccatttagttgacatgcaataaacaggtggcgtctacagaatccatctcaaaaaagaggaatttatgttgttccatcaatattgggccacatttaggacaactctcttgaaaccggtgaagcaagcacagttaggctcttaattccgtggcccttgcctacgtttgtcgagcaaacggccggtttggcccattagcatgcccaggagacgaggaaaaaagagaacttatctgctaggctaacattatcaatttttggatatatatatatatatatatatattaaaatgcaacatacatgttatacatattgtgaaccaatctactcctaattatcttttctccctatagtaagcattcatttagttaaggttagatacattttgcagcacgaatcttgaaacacatcaacggtgtagattgtaggtacatatgaatccgagtgcaaatctgcattttcatatatatatatatatatatatatatatatatatatatatatatatatatatggaagggcaattgtattctttcccctattttaatttgtagatatgagttttgtaaaatatgttctttttgcttttttaaaccgaaactttgctcctagtctattggctatgtatatgagttcctaattcatctctctcgttttctgctctttcggcgcgcacgcttttcaaaccattaaatggtgtgtgttttgtaaaaagtttttataggaaagttgcttaaaaaaatcatattaatttatttttcaagttttttataacttaaacttaattaatcatgcgttaatctatcgctccgttttccgttttgagttaatcagcctagtcgtttcaatggcgttgcaatttccctctacttttgtataaaacagctgtgctgttgttcatttgtggcatatgtgtacttctgaatgcagcggtactaacatatgccatgacacaagggatcctctccaaactaaacaaatcaacttaaagctcatatgcacttcaatacccaatatttcatgagcatagaccttgtatacgtcaagaagggaaaaagaaccgaaaacataaccaaaaaatcatataatccccaaatcaacgcatgtaacacaatataaaaaaccattttagacaacacccactattacaggcggacttaaaaaaatatacttgtaaaaatatattaagtgtttttttacagctagctcgcatgcaaaaaaaatcaaatttttatataggtggccctcaggtcttaggttttcgtccgcaaaaatcatatctgtgtaggcaaactgttaggagcaccgcctgaaaaattgacaaccgaccacttgctaccgcactaaaaagctactatggctgtgttcgggaggtgaggttgagaattcaccttccgcgcacgcaaaatggagcgatgtattttcttacgattaattaggtatttactattttttttgaaaaatagattaatatgattctttaaagcaactttcgtatagaaactttttgcaaaatacatattgtttagcggtttgaaaagcgtacacgcggaacacgatggaggtgagttgggaaaaatgggggaagaacacaacctaagtcttaaactctcctccacggctcctctatcgagaaccactcattctctccctctcctatcttctctgtctcactagatccacacacgagctctccttatccttcacttgccaccgtttctcctcgtgtagaagcaaccacacggcttgccttggcttggcaacggcgacttcgaacacatggcattggatgagcagtgaaggggaaggggtgggtcggcattatcgaacgagggccagagcttgggaccagcgacaacaatggcgactgcggcaaggacagggtggtggtggcaaataatgggctgagctcaggatctgtggtgaacgaacatctatgtgggttgtttacaacaacgttgtggccctagatctgttggagtgaaggctagatccaccatcggggaggtcagatctggatggtggctattacctctctcgatgccgccgccagtgggcagatccaagccatcatgcttcatgtctgctgcggcgggtggcggtagatcggggtactgggatggtggttcactactagagaaatgcacttcggtgccggttgggaagaccccttagatgccggttttcccaaccagcaccatgaaggcggcactgattaccggcaccaatgtcattttaaaaaccgacaccaatatggaatcaacgagcaaaaaaaaaaaaaagccagccggctctagccgattaactcccacatgaacccacatgaataacaaacaaatgatgaacagattccacatcaacagatgaacaagagcgacacaaaatctcacaccaattatcatagcaacaaatgaactcttgcatgaacaagaacgtatctcaaacaaatcacaaagtgggagggagggggagagatggatccgctggccgccgatgccgtcgcacctccagatccgacgcgggccacctctgtcccgccaccgcacgccacctcccgctgccaaggggcgcggactgcctccgtcccgttgccgcacgccgccgcacttcgcctaccaccgccgagtggcgcggaccacctccgtcccgccgccgcatgccgcctccggttgccgaggggcacgggctgcctccttcccgccgccgcacaccgccgatcttgctgccgaggggcatgcaagacgacagtgagaaggctagatccagctgctgggaccccgtgaactccggtggtggtggaacctccctggcttcttagggatagcgacaacaacttcaacgtcgaccacatgattttcgcatgccttataattgtaagcggggcggctgggcgcccatgaaaaatcatttttttctgcctgcgaatacccatcttgtactggtgctagattagcaaacctgttttttcctttttttttttggggggggggggggttgaactatggtggcttaggtagcctacatgccaatcaaagttttaaatttagtttaactccaagggagaatgtattctatcgaatttagaaaaaaatgtcaaaattcatgatttatttaattgtttgtggaattatgtttgaaattttgtaatttaagttaccccgaaatgtttatgcattatgagatagttaaccctatactccctccggttctatattaattgacgttttgaataaggttgaggccaaacttttataactttgaccatcaataactttaaaaatatttaatttaaagaaaattgaataacatatataaatttttctttcaaagcactataataaaagtaaacatgcatttatttattgtatatattataatagaaaaataagatcaaagatatatcttgtagaccgtatcattgtccaaaacgtcaactaaaatgaaactgagggagtatagggtatcacattctaaccttggggttaacaagacacagttgcttttgtatcctggattgacgacgtacatcccttttgctttatcttttgctttttgcactttaatcaaggaggcgaagcaaagaatccgacgattagccaactactaactccaaattatctatagccaatttaatagtcgatttatacaacaattatttacaatactattaatatgtgatcccacctgtcatagaagcatatattatgtcttgaagtccgtgctacagcttctacagatctgtagcccactgcttctctctacttttttatctctttaaaatatatatgtttatagctggcttacagtctgctattgtacctcctctcagatctgagatgcattcatcctctcagatgatgcattcaggtacagcttaggacgtacatatagcatatcgatttgcggctttgcagcaaatgcaaagcaaagaaaaatactaaagcaaacatatcgatcgtacgcaaggaataatagatcgacgaaggcttctagacgacagtacgtttttacaaggcttctgctagctctagcccagaacatcgatctatcgatcatattgcatccagtttgatcgtttcaatttatgctcgccctcgcaccaacaatggcttagctaatccccatgtactcgatctctgtcggcaaacatcgtgattaaggtaaactagctacatcatatcgtgcagtttaattgcgctctctctctctccccctatgtgtgtgtgttgatgcatcaggagtgggctggagaaatcgatccatcaggcatctatatatcatgggttaattaattacagggcttgcttcaacatatatatgtattctctgctgtcgatccatttctaattaaggagcgtttaatcaactgaaagaagatcgattgagattatatgatcgatgaagctgcccgcaattcaacactaattgaagagagccgggctacgcagatcaactcaacatgccaccagcgaaggaggtaattaaatcagatcggtgatattgtttttatttttgaatgaaagttatttcacgaccacgcacgtgaattaaacaagacactttactgctattttagatttccaatttggacgcaattttttgaaacacgctttcattgtcatatttggctttagaagtgtttttttttctaacatctcatttgcaaacaatcctctcggagcaaacttcttctatttgtggaagaaataaattgcaaaaaggataattttaccaaccttagaacataacatgaggtaccatattttatactataaattttggcacatcaagtattatgtatctcaatgtataaaagaaataattttagtgtaaacttttgataataacaagtaattggtcaagaaccgtaaaatttctcacactccacctgttcaaaattcaatgctatgtttggctagttgcagagagaaaaaatattgtcgaaactagatttcggcaataataaaagggggtggctatcaagctaggaaagtgtatgggtttggagaccaaggatttatacaggttcaggccttcttataaaagaagtaataccctactcctgtccggggatgaatccgccgagtgtattattgattgtatgatttagggaaaatcaacctctgcccctagaggcgcccggaccccccttatatatgggaaggagtccgggttacaaaagataatcaatatccctaacggaatacacagatatagattaaatacagccgtgaccgactaagtctcaaggtgtttccttgttgtacaagttaagaaacaaacccgagatacaaataagatattccatacatattcggtatcctatatccagcccaaatagtatcgccgtgtagatatgggatatccataatctccacagtagcccccgagacctttgcagtcaaccatcgtagccttctcaaagatagcaatccgagtgcttcagattattcatgccaaggcccaccgagtagcgaagacgaagactgtaaagggcgaaaagataaagaatatggtgcatcgaatagatgcacctaattaggtgtagcccccaactatgtgattagttaacaaactaaacatatagttgagaacaaaataatagcactaccacgcatcagatggcaaaagcatacgcggcgcctaaagagacattctagccgactgctttttagccataacaaaaagagtccgagtggtttacactctaaaaggttcacgaatgaacacactggacaggcatccgagtataaaactctaaagatcacccaccaagtattataaaaaattatggtaatgaataagtctaatagcctaggctatgactatttaccataatgaaaataggtatataacataccaaggaagtgactatgataaaaacaagtcattccagattaacccagacagcttttgtagcctaataaagctaacaaaaaagcggtataacacctttctgtcgggcaccttttaatttgcattgcaataattccaaagaattatatgaccgcataaaaaggattttatcagcatcgggcaacactattgtgagcataatattgccaaagcaaaatatgcctaagtccctaaggaacacaatgggccacgctgttaaaagtattgggctgaagtactgttcaggcctaggcccatttgcacctccgatacccttaacaagaaatccgagatccaagcgacgcttcgtcttccccgccggaactctcgccattttccccactccttgctacagtgcagaactgcgccggcgaactagggttcaccaatccacccaaatccaccttcaaaaagtgatcaaattccttcccgtgatccaccgcctcaattcctcacctctcccaagccatccctcgaatcaaatcagcgcatttgaggaaactcgatggcggaagagagagaaagcttcgaaagccaatgggcgccgtctgacgtaacggaagagaacctgaaggagatggtggcgcacggcgttctccctgctaaggagatcatcgggtggcggccagcgtacggtgagatttttccgacccccgatacacacgagattgtggtcttctcgcatttcttctacggcggcttcgctcttccgacctcgaaatttttccgcgggatcttgaacttctatggaatcagcttgcatcacctaaacccaaattccatagtgcacatcgccaatttcgtccatgtttgtgaagcctttttgggaatcaagcctcactttgccctgtttcgccggatcttcttcctcaaaccccaaccaaacaagagtaagccatgtgtagtcgggggggcaggattccagctgaggggaactctgagccaaaagtatttctctatgcccttcaagacttcaaacaaaggatggcatgcgaactggttttatgttcagaatcctaagcctgctcttcccgaatactcttgtcttcccccggtgtaccaagatacttggaactctcttccaatcggagatgaagctgcccaagccttggaattgttggatcgcatgttaaaactcaaagaacaaggcttgcaaggagagcagatcactcggcatttcattaaatgccgactggcgccaattaaagaaagatcccgtacagcttttgagtttgacggcaagcacgatcctaatcgcgaagaaccagactctctggatttcaaaatcatgaaggagagaatgtataaaatcttctcaaatgccattgtcgttagctactcacaccagctgccagttgtgccatataatgcattcaatccgcctccgcaggtatgtatctgaaatcatcaacttacgaccaaaatagtatcttgtcttcatgttgagttaactaaccatggaggcatctcattcaggattacgtattgatgaaatctgatcccccaattgctcagcgccgatctcctcgccagcacaccattcagggaagtggagggccgacaatcaggtcagacccacaacctcaaacctccaaaccggctggtcagacaggtcctcgcaagagaaaactggtgcttaatgacgatgagggcgatgacagcaacaaatctggggacaagggcacgcccaacaaactcccaaagcataccatgcccaggaaaaaactggctggccgtcaaatgccaaagattagaacatcttccaggtataaacttctcggtaccatcttgtttcggcatgcttcccttatagaaattatgctgagtatcgaaaggacgctttgcaggaaaccgtccgacatagatccaactggaaaagatcctgatccggctgtgacagagccaaatttatccaaagacactgagccgtctgccgaaaaccagccgactgccgaaagccagccggctggcgcccatgcttcggatgacaaagccgatccgagtgaccagccgccaactggagaccagtcggcaacagctgaaactgcaacaacacaagagcccccgactggaaaccagtcggatgtaggttccgatgaagaaatcccggaagttgaagcgcaaacgacaacttcccaagaaccagaggctggtaaggactcaatgattgggtctctaaataaagaacaaggaccacctcatgttcagccaggaacatcctcaggtaacacatcttctcaagtgatgccgatttaaataacttaagcttactcgtctaattgtcttggaaatacatcaggaacaataggcgatgacgaagaaataattcctcgcataaaggcggttgatgactcccgtcctcctatcttgctcaaatggtgggacgagaactcgcaagttgccggcatcgttataaatcgtcaaaaagaagatgaggaagtgtgccagctgaagaaagcacttggagaagccactcgcattgtgaatgtaaatcttccgggtgactgcctttaataactttgttctctctttagtagaactgaaccatgatccatcatgcagagaatccatcttcgcaatgaggctaagactacaactttggaaaagctggttcctcatttgggaactctagaagcagttagggaccagctgcatgaggccaaggagtgcgccaaaaagacagagaaggagttaagggaccgaattgcccagctccaggattcaaacttcgagctaagtggttcatcaaaaggtaatcatccagatctgttccattgatttatgctgtcataattgcatcctcaaacacttggatttcaaacagcgcaagccaccagaatggctcagatggagaaacagattgaagccttgaaaaaagacaaagcagagttggctgcagaaagggactcagccttgaaagaagttgaaggtactgccggctgatgatctgaactttcctctttttaatgcagtagattcttattataaatgtgttgtgtagaccgtaaaatcaagtctcaagctcaattggatgtcctggttggtaagatcaagaggcttgaaggagcaagagatgaagtcgccaatgtcgctgcaccactcatccaagctatgttcctcaataacagtggtccgagtgcactcgacgcaaccgaaatattcgacaagctgagtgttgctccggatgtatatttcaagaatatcaagaaagctggaagtatgggagctagcatggccttggcgatgacaaaatccttgtacccgagaattgaagttgacaccattgatggctttgcaaacgggacaagtgaagaagctgctcttgatcttatcagcagtgcacaaaatgcggctgacaaaattgcaagtgatgtcgtagagcaattccgcaacaacgacctccaaccgagtaacaatgactctgatgatgaaatgactgattctgactgatcatgaatgtaatgcatggaggctcaatttgtacaatactggtgtatttatgctgtgcttgatgattcttgccaagtttttgatttcttaaaagtttttgttaagctttgttgagcctaaaacccaaagaagctattaaaaaactttcagtcctcgcaaactgagtagaaaaaccaaacaaggcaatgataaaccaagtaagcaaactgaattgataaaaaatcacactccattattatgatgatagcccccgactgacagcggcaagaagaaaacttgatgttgacagtcaagatagggaaatacaatgataagcttaagcatagaaacgatgaagatgttcgatgttccaagagttgtcgacaagagtaccgtcttcgcgcttgagtcgataagaacctggccgggtgacttcagagataataaatggcccttcccatagaggagataacttgtgccgatctcgtgtagtttgaattttcctcaaaaccagatcaccgactaaaaaggcacgagatcgaacattgcgattatgatagcgccgcaacccttgtaaatatcgagccgaccgaatcaaagctgcttcgcggacttcttccaatcggtgcaagtcatccactcggtcctcttcgtagcgatcttcacggaaatttcgaaagcgcaaagactcgaattcaacttcacttggcaacattgcttctgccccatagacaaggaaaaaaggtgactggcctgtggcccgactgggtgtagttcgcaaagaccaaagtaccgatggcagctgttgtacccatttgccggcatagggttttagccggtcaaagacacgcgctttaatcccttgaagtatcatgccattagctcgctccacctgtccattgctcatggggtgtgccactgaggcgtagcaaatcttaattccaaagtcctcacaaaagtctttaaaaactccgccagtgaattgtgtgccattatcagtgattatccgattgggcactccaaatctatgcacaatgttgatgaagaagtctcgagcattatctgctgtgattgtgacaaccggtttagcttcaatccacttggagaatttgtcaatggccacaaagagatgcgtgtaaccgccgactgcctttttaaacgggccaaccatgtcaagcccccaaaccgcaaacggccaagacagcgggatagtctgcaactcttgagctggtagatgaatttgtctggcgaaaaattggcaaccttcgcacgtgcgcacaatcttgtcggcgtcggacactgcagtaggccagaaaaaaccctgccggtaagctttgccgacaatggtgcgtgcagcggcatggtttccgcaaatcccagaatgtatatctttcagcaattgtctcccttcctctaaagatacgcagcgttgcagaattcctgaagggcttttcttgtatagctcagattcatgcataacataaagtttgctccgccttgaaatccgctcggcttcatctttatcttgagggagttcttgagaaattaaaaatcgtatgaagggctctcgccagtcggcttcaaccatagccacgtcatgagtgtccgcatcttgaatagtatctttatgaggtacggtcggtgtgtaaaggtgttcgacgaaaacatctgagggcgccgtctcgcgctaggatccaaaattggcaagtctgtcggcggcttcattgttgtgtcgaagaacgtgactgagctcgagtccatcgaacttgtcttccaatttgcgcacctcttgtcgatatgccatcatattgtcgtcaaggcaggaccactctttcataacttggttgacaaccagctgtgaatcacctcgaactattagacgctttatccctagggaaattgcaatccgtagtccatgaaggagggcctcatactcggcgacattgtgggacgccgaaaaatgtatccaaagtacatagcttaatctttctccagttggggaaatcaaaaccactcctgctccggtgcccgaaagtcgtttggatccgtcaaaatgcatggtccaatgctccatgttctccgcgggggtatcctcctggcactcggtccattcggcgacaaaatcagctaacgcttgggacttgattgaaattcggggcttgaatgatatgtccaaagacatcaactccaaagcccacttagcaatacgtccgttcgcttcgcggttgtgcagtatatcaccgagtggaaatgatgtgaccaccgttaccgagtgaccttgaaagtagtgagatagcttcctggtagtaattagaataccatataacagcttttgaacctgagggtacctcgttttggagtcggctaggacctcgctgacaaagtaaatcggtcgctggactttctggacatggccttcttcctcgcgctcaacgaccaagactgtgctcacaacctgggaggtggctgatacgtacagtaacaacggctcctgcgggtgtggtgaggctaagactggcggctcggtgaggagttttttgaaatcttcgaaggccttctgtgcttcgggtccccaccggaagctatctgttttcttcagcagcttaaagaagggcatcccccgctcgccaagtcgtgaaacaaatcggctgagcgccgccatgcatccagtcagcttctgaacatctttctgggtacttggcggtttcatgttgaggatagcagtaactttctccgggttggcttggatgcccctatgagacaccataaagccaagcagcttccctgacggtactccgaaggtgcacttttcagggttcaatttcatcctgaaagcacggatgctcgcaaaggtttcttctagatccgagatcaaatcatccttttgcttggtcttgacgactacatcatccacataggcttcaacgttgcggccgatctgcgttgagaagcatctttggatcatacgttgataagttgctcctgcgttttttagtccgaacggcatggtgacgtagcagtatgccccaaaaggcgtgatgaatgaagtcttcaagcagtcggattccttcagttggatctgatgataccccgagtagcagtccaaaaaactgagaagctcacagccggcggttgagtcaactacctggtcaatgcgaggcaacccaaaaggatctttggggcaagacttgttgaggtcggtataatcaacacacatgcgccattgccctgttttcttccgaactagaaccgggttcgccagccaatcgggatgaagaacttctttgatgaagcctgctgctaacagcttggttaattcctccttgattgcgtccttcctgtcttgtgcgaatcggcggagtcgttgtttgatcggcttggcatcttctttgacatgtaaggagtgctcaatcacctctctaggaataccgggcatatccgatggtttccacgcaaagatatctttattattctgaagaaaggtgatgagcgcgctttcctatttacaatctaactcggcccctattacagcagttttagtagagtcagagggatctaggggaatcttcttagtcttggcttcgctttctccactttttgaagtcttggtggcaggtatttctccttcgctcgccgtggccgcagccagtcggatgtcctctcgggcagacgccatctcgcgagtttgggccatgtcgcaactctccttgtcgcatgtgacggcttgcttgatgtcgctccgtagggatagcactcctcggggaccaggcatcttcatcatcatgtaagtgtagtgcgggacggccatgaacttggctaacgccgggcgtccgagtatggcatggtaagctgtctcgaaatcggcgacttcgaagctgatattctctgtgcgaaagttttcccgagtaccaaaagtgaccgggagggtgatctggccgagtggagttgcggataatcctggaattactccgtgaaaaggcgcattgcttggtttcagctcggagcgaggaatctgcatatcatccaaggtcttggcgaaaaggatgttgagtgcgctgccaccgtcaatgagggttctgcgaagcttgacattacggaccactgggtctagtaccagggggtaccgccccgggtggaccggtgatgctgaggcttggatgacggtagtcatgagatcggaagtgggggactcggctgccagtcggcgtgtggacgctttcggagttaactgggaccgaagccgcgatcatggtcttcgtctggttcaagatgttgacgacgtggtcggaacgatttagctcgctttggttgaggagggtgtcgagaagggtgatcgcggcaaccgcattctgttgaggggtgcggaaaaccggtgtcccttcgacgtcttgttgtccaatgagatcacgcgctcggcgccctgcttccaaagctcgctgacgtcgatcttcagcctccttggcgatccgctcacggtcctgctgctcacgccgtagccgttcttgttcttgtgcttgatgctcctcctccagtcggcgacgttcttcggtctcccgggcttggcgttgctcctccgtctcgttattggccatgaaaacgccaaagtagagaggggtgtagttgtcatctaggcttccgtcgaagtcgtcgagatccgggtcgtggtagcgagagctaaactcatcgtactccacgatgtcggtggggcgcgagtcgacggtgggagagctgtaatggtcatctagctgatccgtcgaaaccgtgccgagtggttggaggatgacgccgacttccctgaagctaggcgaaatcggtgttgaaaccgacttccgcctaggcctacgggatgaagacgctgtcgcggtggagacggccgctaaatcgtcggggagcttcatcaggactggtgggtaagccccatcatcttgatctggtgtcgttggagaagatgcgatctcagccgagtggtttgaagccgactcgattgagatggtcttgaagtaggtttcagccgcgtttgggaatccaaacgggactgagatccggttctctcccgactggtccgattccgagtcaaagagagaaatcttgccgaagttgtcggtgacgaagtcgaggctgccgaaccgaaacgtctgcccgggtgggaagacgaggtcgtcgatgccggagaaaggacccattgcactgatcggcgaaaagcttgacgcctcccctacctggcgcgctaactgtcgaaactagatttcggcaataataaaagggggtggctatcaagctaggaaagtgtatgggtttggagaccaaggatttatacaggttcaggccttcttataaaagaagtaataccctactcctgtccggggatgaatccgccgagtgtattattgattgtatgatttagggaaaatcaacctctgcccctagaggcgcccggaccccccttatatatgggaaggagtccgggttacaaaagataatcaatatccctaacggaatacacagatatagattaaatacagccgtgaccgactaagtctcaaggtgtttccttgttgtacaagttaagaaacaaacccgagatacaaataagatattccatacatattcggtatcctatatccagcccaaatagtatcgccgtgtagatatgggatatccataatctccacaaatatatatagtgtaattaataactttattcgtaacattatatatatgccggtttgcactctacctttttgtggtctattacactttattctattgtaattaataaatacaccaccgagaaaactgggcgtttctttagaattttatttgtgataaaagattttagtgtgtttgtttagctatgtgtcgaaactagatttcggcaataataaaagggggtggctatcaagctggaaaagtgtatgggtttgaagacaaaggatttatacaggttcaggccttcttattcaagaagtaataccctactcctgtccggggatgaatccgccgagtgtgttattgattgtatgatttagagaaaatcaacatatgcccctagaggcacccggaccccccttatatatgggaaggagtccgtgttacaaaagacaatctatatccctaacggaatatgtagatacagataaaatacagtcgtaaccgactaagtctcaaggtgtttccttgatgtacaagttgagaaacaaacccgagatacaaataagatattctatctatattcggtatcctatattcagtccaaatatcatcgccgtgtagatatgggatatccataatctccacagtagcccccgagacctttgcagtcaaccatcatagccttctcaaagataataatctgagtgcttcaaactttttatgccaaggcctgccgagtggcgaagacgaagactgtaaagggcgaaaagataaagaatatggtgcatcgaatagatgcacctaattaggtgtagcccccaactatgtgattagttaacaaactaaacatatagttgagaataaaataatagcacattcatgcatcatacgacaaaagcatacgcggcgcctaaagaggcattcttgccgactgctttttagccataataaaaggaatccgagtggttaacactcaaaaaggttcacgaatgaacacacttgacaggcatccgaataaaaactctaaagattacccaccaagtattatataaattatggtaacgaataagtctaatagcctaggctatgactattcaccataatgaaaacaggcatataacataccaaggaaaggactatggtaaaaacaagtcattccaagttaacccagacagcttttgtagcctaaaaaagcttacaaaaacagcataacgcctttctgtcgggcaccttttaatttgcatcgcaataattccaaagaattatatgaccgcgtaaaaggattctatcagcatcgggcaacactattgtgcgcataaattgccaaagcaaaaatgcctaagtccctaaggaacacaatgggccacgctgtcaaatgtattgggctgaggtactgttcaggcctaagcccatttgcacctccaatacccttaacaaaaaatcccgtgatccaagcgtcacttcgtcttccccgccggaactctcgccattttgcccactccctgctacagtacagagctgcgccggcaaactagggttcaccaatccactcgaatccaccttcgaaaagttcatcaaaatccttcccgtgctccaccgcctcaatccctcacctctccctagccatccctcgaatcaaatcagcgcattcgagtaaaatcgatggcggaagagaaagaaagctttgaaggccaatgggcgccatccgacgtgacggaggagaacctgaaggagatggtggcgcacggcgttctccctgccaaggagatcatcgggtggcggccagcgtgcggtgaggcttttccgtcccccgatacacacgaggttgtagttttctcccatttcttctatggcggctttgctcttccgacctcgaaatttttccgcgggatattaaacttctatgaaatcagcttgcatcacctaaacccaaattccatagtccacatcgccaatttcgtccatgtttgtgaagccttcttgggaattaaaccccacttcgctctgttccgccgaatcttttttcttaagccccagccgaacaagagtaagccgtgtgtagtcggaggggcaggatttcagctgagggggacgctgagccagaagtatttctccatgcccttcaagacctcaaacaaaggatggcatgcaaactggttttatgttcagaatcctgagcctgctcttcccgagtactcttgtcttcctccagtgtatcaagatacttggaactctcttccaatcggggatgaagctgcccaagccttgaagttgatggatcgcatgctaaaactcaaagaacaaggcttacagggagagcagattactcggcatttcatcaaatgccggttggcaccaattaaagaaagatcccgtacagcattcgagtttgacggcaagcatgaccccaatcgtgaagaaccagactctctggattttaaaatcatgaaggagagaatgtataaaatcttctcaaatgctattgtcgtcagctactcacatcagctgccagttgtgccatataacgcattcaatccgcctccgcaggtatgcatctgaaatcctcaacccatgatcaaaacataatcttatcttcatgttgagttaactaaccgtggaggcatcttattcaggaatatgtattgatgaaatctgatcccccaatcactcagcgccggtctcctcgccagcacaccgttcagggaagtggagggccaacaatcagaccagatccacaacctcaaacctccaatccgactggacagacaggttttcgcaagagaaaactggtgctcgacaacgatgaaggcgacgacaacaaatctggggacaagggctcgcctaataaactcccaaagcgtaccatgcccaagaaaaaactggctggccgtcaaatgccaaagattagaacatcttccaggtataaacctctcggtaccatctccctttgacatgcttctctcacagaaattacgctgaatatcgaaaggacactttgcaggaaaccatccgacatagatccaactggaaaagatcctgatccggctgcgacagagccaaatttatccaaagatgctgagccgactgccgaaagccagccgactgccgaaagccagccaactgccgaaagccagccgactggcgcccatgcttcggatgacaaggccaatccgagtgaccagccgccgactggaaaccagtcggcagcaactgaaactgcaacaacccaagagcccccgactggaaaccagtcggatgtaggtctaaatcaagagattcctgaagctgaagcgcaggcgacaacttctcaaggaccagaggctggtaatgactcggtgattgggtctccggataaagagcaaggatcacctcacgctcagctaggcacatcctcaggtaactcatcttttcaagtgatgccgttctgaataactccagcttgttcgtctaatgtcttgggaatacatcaggtccattaggcggcgacgaagaagaaattctccgcataaaggctgctaatgactctcgtcctcctatcttactcaaatggtgggacgagaactctcaagtttccggcatcgtcataaatcgccaaaaagaagatgaggaagtgtgccagctgaagaaagcacttggagaagctactcgcattgtgaatgtaagtcttccgggtgactgcctttgataactttgttctctcgttagcaaaactaatccatgaaccaccgtgcagagaatccatcttcgcaatgaggccaagaccacaaccttagaaaagttggttcctcatttgggaactcttgaagccgttaggggccagctacacgaggccaaggagcatgccaagaaaacggagaaagagttaagggaccgaatcgctcaactccaggattcaaactacgagctgagtggttcatcaaaaggtaatctctagatctgtcccattgattcaggccgtcataaccgtatcctcaaccatttggatttcaaacagcgcaagccgccaggatggctcaaatggagaagcaaattgaagccctggagagagacaaggtagaactggctgcgcaaagggactcggccttaaaggaagttgaaggtgctgccggctgacgatctgaacttatctctttttaatgcaacaaattcttatcataaatgtgttttgcagaccgcaaaatcaaatcccaagctcaattcgacgtcctggttggtaagatcaagaggcttgaaggagcaagagatgaagtcgccaatgtcgctacaccactcgtccaagccatgttcctcaataacagtggtccgagtgcactcgacgcaaccgaaatctttgacaagctgagagttgctccggatgtgtatttcaagaacatcaagaaagctgggagtatgggagctagtatggcattagcgatgaccaaatccttgtacccgaggattgaaattgactccattgatggctttgcagacgggacaagcgaagaagcagctcttgatcttatcagtaatgctcaaaatgcggctgacaagattgcaagtgacgttgtagatcaattccgcaacaacgaccttcagccgagcaacaataactctgacgatgaaagaactgattctgactgagtatgaatgtaacaaatggaggcttaatttgtacaatactggtgtatttatgctgtgcttgatagttctagccaagtctttgatttcttaaatgcttttatcgagctttgttgagcctaaaacccaaagaagctattaaaaactttcagtcctcgcagactaagtagaaaaaaccaaacaaggcaatgatagaccaagtaagcaaattaaattgataaaaaatcacactccattattatgatgatagcccccgactgacaacgtcaagaagaaaacttgatgttgatagtcaagatagggaagtacaatgataagcttaagcgtagaaacgacgaagatgttcaatgttccaagaattgtcgacgatagtaccgtcttcgcgcttgagtcgataagaacctggtcgggtgacttcagagatgataaatggcccttcccatagaggagataacttgtgccgatctcgtgtagtttgaattttcctcaaaaccaggtcaccgactaaaaaagcacgggatcgaacattgcgattatgataatgccgcaacccttgtaagtatcgagccgaccgaattaaagctgcctcgcggacttcttccaatcggtgcaaatcatccactcggtcttcttcgtagcgttcttcacggaaatttcgaaagcgcaaagactcgaattcaacttcactcggcaacattgcttctgccccatagacaaggaagaaaggtgactggcctgtggcccgactgggtgtagttcgcaaagaccaaagtactgatggcagctgtgtcacccatttgccggcatagggttttagccggtcaaaaacacgcgctttaatcccttgaagtatcatgccattggctcgctccacctgtccattgctcatggggtgtgccactgaggcatagcaaatcttaattccaaagtcctcacaaaagtctttaaaaactccgccagtgaattgtgtgccattatcagtgatgatccgattgggcactccaaatctatgtacaatgttgatgaagaagtctcgagcgttatttgctgttattgtggcaaccggtttagcttcaatccacttggaaaatttatcaatggccacaaagagatgcgtgtaaccgccgactgcctttttaaacgagcaaaccatgtcgagcccccaaaccgcaaacggccaagacagcgggatggtctgcaactcttgagctggtagatgaatttgtctggcgaaaaattggcaaccttcgcatgtgcgcacaattttgtcggcgtcggacactgcagtaggccagaaaaaaccctgccggtaagctttgccgacaatggtgcgtgcagcagcatggtttccgcatatcccagaatgtatgtctttcagcaattgtctcccttcctctaaagatacgcagcgttgcagaattcctgaagggcttttcttgtataactcagcttcatgcataacataaagtttgctccgccttgaaatccgctcggcttcatctttgtcttgggggagttcttgagaagtcaaaaatcgtatgaggggctctcgccagtcggcttcaaccatagctacgtcatgagtgcccgcgacttgagtagtatctttgggaggtactgtcggcgtgtaaaggtgttcgacgaaaacatcagagggcaccacctcgcgcttggatccaaagttggcaagtctgtcagcggcttcattgttgtgtcgaagaacatgactgagctcgagtccatcgaacttgtcttctaatttgcgtacctcctgtcgatatgccatcatgttgtcgtcaaggcaggaccactctttcataacttggttgacaaccaactgtgaatcgcctcgaactattagacgctttatccctagggaaattgcaatccggagtccatgaaggagggcctcatactcggcgacgttgtgggatgccgaaaaatgtatccaaagcacataacttaatctttctccagttggggaaatcaaaaccactcctgctccagtgcccgaaagtctttttgacctgtcaaaatgcatggtccagtgctccatcttctccgcgggggtatcctcctggcactcggtccattcggcgacaaaatcagctaacgcttgggacttgattgaaattcggggcttgaatgatatgtccaaagacatcaactccaaagcccactttgcaatccgtccgtttgcttcgcggttgtgcagtatatcaccgagtggaaatgatgtgaccaccgttaccgagtgaccttgaaagtagtgagatagcttcctggtagtgattaaaataccatataacagcttctgaacctgagggtacctcattttggagtcggctaggacctcgctgacaaagtaaatcggtcgctggactttctggacatggccttcttcctcgcgctcaacgaccaagactgtgctcacaacctgggaggtggctgctacatacagcaacaacggctcctgcgggtgtggtgaggctaagactagcggctcggtgaggagtttcttgaaatcttcgaaggccttctgtgcttcgggtccccactggaaatcatctgttttcttcagtagcttaaagaagggcatcccccgctcgccaagtcttgaaacaaatcggctgagcgccgccatgcatccagtcagcttctgaacatctttctgggtacttggcggtttcatgttgaggatagcggtaactttctccgggttggcttggatgcccctatgagacaccataaaaccaagcagcttccctgacggtactccaaaggtgcacttttcagggtttaatttcatcctgaaagcgcggatgctcgcgaaggtttcttctagatccgagatcaaatcatccttttgcttggtcttgacgactacgtcatccacataggcttcaacgttgcgaccgatctgcgttgagaagcatctctggatcatacgttgataagttgctcctgccttttttagtccgaacggcatggtgacgtagcagtatgctccaaagggcgtgatgaatgaagttttcaaacagtcggattccttcagtcggatctgatgataccccgaatagcagtccaaaaaactgagaagctcacagccggcggtcgagtcgactacctggtcaatgcgaggcaacccaaaaggatccttagggcaagatttgttgaggtcagtataatcaacacacatgcgccattgccccgttttcttccgaactagaaccgggtttgccagccagtcgggatgaaggacttctttgatgaagcctgctgctaacagcttggttaattcctccttgatcgcgtccttcctgtcttgtgcgaatcggcggagtcgttgtttgataggcttggcatcttctttgacatgtaaggagtgctcaatcacctctctaggaataccgggcatatcagatggtttccaagcaaatatatctttattgttctgaagaaaggtgatgagcgcgctttcctatttacaatctaactcggcgcctattacagcagttttagtaggatcagaaggatctaggggaatcttcttagtcttggcctcgctttctgcactttttgaagtcttggtagctggcacttctccttcgctcgccgtggctgcagccagtcggatatcctctcgggcagacgccatctcgcgggtttgggccatgtcgcaactctccttgtcgcatgtgacggcttgcttgatgtcgctccgtagggatagaactcctcggggaccaggcatcttcatcatcatgtaagtgtagtgcgggacggccatgaacttggctaacgccgggcgtccgagtatggcatggtatgcagtctcgaaatcggcgacttcaaagctgatattctctgtgcggaagttttcccgagtgccaaaagtgaccgggagggtgatctggccgagtggagttgcggatagtcctgggattactccgtgaaaaggcgcattgcttggttttagctcggagcgaggaatctgcatatcatccaaggtcttggcgaagaggatattgagtgcactgccaccatcgatgagggttctgcgaagcttgacattacggaccactggatctagtaccagggggtaccgccccgggtggaccactcggtcaggatgatccgagcggtcaaacttgattgcaatctctgaccatcgaagatattggggcgtgtcgggctgaacagcattgatctcccgttcggtcaacttttgcttccttttagactcataagccagggggccaccgaagatatggttaagctccttgcggtggtcttgaaatcctgccggggtgtcgccgtcgtccttcttcctcgacgtgctttgttcttcgtcggggttcttccgcgtagtcttagtgtattgatccgcgaattgcttgtagacgaaacaatctttggccacgtggttggagttaggatggtgcgggcgttgggagttcatgatcttgtcgaacgtgttgacgcgcgaacgctgtcgagaagagtgactggcggttgcaacaagttccgcaggcttacgcttgcggtctttatgattgttacttccacctcctcccgaagccggcgtatccttttttggcttccaactgggacccgactgttttgatgcggtgacggcgtcttcagctttagcgtactcgttggctttttcaaacataagcttgactgtcctgggtggcttacgcccgaacttgccgaccaattcttcgtggcgaatccctttggtgaatgcggcgatgataacgtcgtcggtgatatcggagatcttgttacgtagttcagaaaatcgccggatgtaatctcgaagggattctccggacttctgaataacgttgtagaggtcgtattgtgtgccgggacgctcgaaggtgccttggaagttggcgatgaagtggtcgcgtaattcagcccaagatccaattgtaccacggggcaatccatggagccaagatcgggcggaatccgctaaagccactggtaaatagttcgccatggccttgctgtctcctcctgctgcgcggattgcgagaccgtagacggtaagccacgattctgggttagtggtaccgtcgtacttctctattccagtcggcttgaagccggctggccaatccactcgacgcaggtcgtcggtgaaggctgctactccgtcaaggtcgtcgtcgtggcggtccggcgagtgatgatagcctcgagctgctcggcgctgtatgattgtgtcgcgaagatcgatggggcggcgacgaggtggtgagcgaggtcgttccactcggcactctctatgatgatcgggaggcgagtgaacggaccgctcgtcgtgacccctgctcctgcgattggatcctgcgccggtgatgctgaggcttggatgacggtagtcatgagatcagaagtgggggactcggctgccagtcggcgtgtggacgctttcggagttaactgggaccgaagccgcaatcatggtcttcgtctggttcaagatgttgacaacgtgatcagattgattgagctcgttttccctgaggagggtgtcgaggagggtgatcgcggcaaccgcattctgttggggggtgcggaaaaccggtgtcccttcaacatcttgttggccgatgagatcacgcgctcggcgccctgcttctaaagctcgctgccgtcgatcctcagcctccttcgcggtccgctcacgctcctgctgctcacgccgtagccgttcttgttcttgtgcttgatgctcctcctccagtcggcgacgctcagtctcgtgacgcgcttcgttctcccgggcttggcgttgctcctccgtctcgttattggccatgaagacgccgaagtagagaggagtgtagttgtcatctaggcttccgtcgaagtcgtcgagatccgggtcgttgtagcgagaggtaaactcgtcgtactccacgatgtcggtggggcgcgagtggacggtgggagagctgtagtggccgtccagctgatccgtcgaaaccgtgccgagtggttggaggatgacgccgacttccctgaagctaggcgaaatcggtgttgaagccgacttccgcctaggcctacgggatggagatgctgtcgtgatggagacggccgccaaatcgtcggggagcttcatcaggatcggtgggtaagccccctcgtcttgatctggtgaggttggtgaagatgcgatctcgcccgagtggtttgaagccgactcgattgagatggtcttgaagtaactttcagccgcgtttgggagtccaaacggggccgaaatctggttctctcccgactggtccgactccgagtcaaggagagagatcttgccgaagttgttggtgacgaagtcgaggctgccgaaccgaaacgtctgcccgggtgggaagacgaggtcgtcgatgccggagacaggacccattgcactgatcggcgaaaagcttgacgcggcccctacctggcgcgccaactgtcgaaactagatttcggcaataataaaagggggtggctatcaagctggaaaagtgtatgggtttgaagacaaaggatttatacaggttcaggccttcttattcaagaagtaataccctactcctgtccggggatgaatccgccgagtgtgttattgattgtatgatttggagaaaatcaacatatgcccctagaggcacccggaccccccttatatatgggaaggagtccgtgttacaaaagacaatctatatccctaacggaatatgtagatacagataaaatacagtcgtaaccgactaagtctcaaggtgtttccttgatgcacaagttgagaaacaaacccgagatacaaataagatattctatctatattcggtatcctatattcagtccaaatatcatcgccgtgtagatatgggatatccataatctccacactgtgaacttgtttcattgtgacggagggaataaatatactaatgaaaataattaaaactagctaattcagctttgcctgtattgatcgcggaatcaccgaccgagaagctctctagttctagggcaggtttgaattaattagtggtattaatgaatgattaattattgcagtggaccaggatcatagcaggcagcatcgatgaagcagcaggcagggtaattgaattgctggaggatacaagcaaggggaatgtgatgtatttccatggctggggtggactgggggcttcagccgtccttagagcagtcgccaaaagactgacgatgaggccatcgccatcgccaggaagaagaaggtgggagaagatgatccacgttgattgctcggtgtggcagagcaagagggccctgcagaaggccatcgcccaggagctgcagcttcctcggtcgctgatggccttgttcgaccagcacgacgaggaggatgatttcagtggggtggatcagggcatgagaggggtggttccacttgtcacacagacaatcttgagcgacctggtaaaccacacattcctggtgatcttccacaatgggagcggcagctacattgatctacaggagtgtggtgtccctgtaataacaggaatcttgaacaaaacggtgttgtggacctcccgaagcagctttcggattaccgacttggacatggataacgtaagcaaggaggatcgggataagcttgctgggctgagtgatgtcgctatatatgcttatccaaccgcaggcgatgaatatagttttgtaatcttatttggaatgcttttgcatcaagaggcagaggaggttgccaggtacaccggtgtccctcaatctgctggcatgagcaccgagcttgtcaagaagtgcatcatgtatcagttgatgctaagacaacaacatgtggactacacccaacactgggatacccacgcagctaactattgggtatgcagtggaatcatacaaacctcagacaccactagtagtacaagttgtcatagctcatcgccatgggagatagcccaagctctttataataacttgatcttggagtttttgaccatagacgattacaacagcaacccaacttgtgcgaaaagaatacagagagccctacgactgccttctgattttgtgggcgagtcgtccttcttctggacatgtgatgctgctggcaataacaatgtcgacgcaactacagcttgttgtagacagaaatcactggaggccaaaatgttccaacatccatctgcaagctggctacgtgtgatacatctctttgaatgtaccttcagttttgcatctccacccttcctctcttgcagcagcctaagattcctcctacttgaccattgcaaagaccaaaacagcagcaggacggactcaacgctgacgatgacaacggataccggagatactagagcttgttttcggaagctgtgggtgctggacttgagtttcacagactggtattggctcttatcggttgaggccctagatttaatggttgagctcagggagttgaatgtgaagggaatcaagcattggagcataagccatctactccatcgccttgatgatgatgacgctagtaatagtacccgaagcagcagccgcaagccttggctgctcagccttgtcaagctccaagtcacaaccgaaccaataactgaagatcaacatcagtcacaagtatggaaggaagatcaggtagcagcaacattattcccgaacctatctagctgcaaaatcgtaaagacgatcattcttgatggttgttttgagttgaagcgaattgaccctcacgtcctgccaccatcactcgagtcatttagcttctccagcagcagcaatgacaatgatgttcatgtctcagccaagatagagagcatctcctttcggggatgcacccagttgaagagtttgttattgagaggactatttcaaaggctcaagcagctggacgtgtcagaaacttgtattaaaaccctcgacctacatgcaatgcgaggcaacgggtctctcaaggagctatttctgcttggatgcaaggagcttcgtgcaatactatggccaaaacaagatgtatcattggaggttctgcacatcgacactagtagcacagaacttgatcatgctacaggtgtagaagaatcatcatcattctcacctgttgaatttaaatggtatatttcagtgagggacagaaggctccttcgctcgctaaatgatacaaaatatcccttggatgcaccatgcatcgagatctcatcccctcctgctagtgttgctactgctactactgatggttctgaattaggcggaacaataagcaagagaaggcccattgccgttagcagggctgaacaacgttggttgatgtcgaccaaaagccgacgaccagctgctgacaacaagaagttatatgcggatgtcaactccacgatccagcacttgcaactacaagcaaccatgaatggcaactggatgtggccttataaacaggagggcagcacctctcactacattagcttacaagatgataagaggatgcagacgaaaccattatcgtcgccatctttgccaggttccatctgtgaaagagcttcaggcctgcacgtgcatgacagcttgtctatcgcaagtatcacaagccattcaaatggggcacggagatggaataatctagagtggtgcagagtggagagatgccctaacattgaaggtgttgttttcactccacctagtcctgttggtggcataactttcttgtacctgaagacattctgggcaacccaactagcaagggcacgccacatctgggactggggcaaaaggggcctgctgcacaaggggccagttccattcaacctgcaagtgctacacctagattgctgccccaggttgatatatgtgttttccataaatgacaacagagcttcctatgcataccgttggttggaaacccttgagatcgtgtgttgtggtgacctcaagtatgtcctccgagtgtatgataataatcaagagcttctggtggcaactatagaattctcagagctgaagcacatccacctgcacgagctgccctctctgcaacgcatctgcgggcataggattgtggcgcccaagctcgagaccatcaaaatccgaggctgctggagcctcaccagcctaccggctgttgggcttgacagtacccgcaagcccaaggtggattgcgagaaggaatggtgggatggcctgcagtgggatgggttggagaacggacaccatccttccctctatgtgcccacccactcacgctactacaagaagaaactgcccagaggttccatgctcaggtatgtacatatgtctgtgtgcatacatgattattacttgggtatcagtccttgcgcgcacatacatacatacgtagaaacttatatagctcagtactttagttactccatcatatatatatatatatatatatatatatatatatgatcgatcttttccctttttttttaattttgtctgacttggcgtgctttcttttcttcttaaattcaggtgatcgatatatacgtccatacactacatatatgatactgtaatcatctacgtatcattccctttccctcatccagtggctcatcaagttcttcagctctatctctattatatatgtccttatttggggctagtgttcaaagtgcttgctcatttcatcatatcatttgcaacggcatcaatatctaatgcatgatgagtaagtacatctctggccggcatccagacgctcgtcatctgcttgttactagcttggattctgttcatttatgcttcttttgttttgtgtgaaaattaataaatggatgctcagctgccagctggtgtgtgagctctgcatctatctgctaagttattttctccatacatgcttgctttccgtttggccggttagtcgatctgcttgttcgaccgatccatccatcggattactacgtatgcttcatctttctggatagatgatcatacatgtatatgtgaaaactttgatctctagcactgttctggtgtggtgtgcttcctagaggtcgacgaataaatcatcagcttcagcggcatgagaagatccattgggtgatcctcatgcagtcgagttgctgttgtgcacttgtttgtgggtgcgtgtgtgttcgtgtgatttgtcagcatttatggactgacctaagtttgtactcctaattacttcacttgtatgaacagaaacaatgatgctaaggattgtgagtgtgacattgtctatgcagcaaacatatatacctgttgctctgttatttggaaggggttgtatattttgctatgcagtctgcagtccacatagacgcctagtattttctttatgaaaaatacggtacaccttttgccttttatggttagcttttactcttttccttatgagtccttttacagtacaccatgctagtgatagagacgaaatccagccgtttatttgtgtggttatttttatactaattgatttggttacttaaaaagatttcccaccaatgccaccaagggaaatccaatcggcatttttttttctatctcgtttgttcttcgtcgctgcgaggattccagtcctgactcctgaatggaggacgcttcgtgctgaggcacagactctgatgaatttatctgtagctgcaagtactatgaatgatttggtgatgcgtagaacactcccagtatatttaggccctctttgttaagacttataagccaacttataagtcgaaaagtctaagccaaaacaacaagcagcttttt

SEQ ID NO: 6457 - DNA, 36750 bp, Oryza sativa
tgtataactcagcttcatgcataacataaagtttgctccgccttgaaatccgctcggcttcatctttgtcttgggggagttcttgagaagtcaaaaatcgtatgaggggctctcgccagtcggcttcaaccatagctacgtcatgagtgcccgcgacttgagtagtatctttgggaggtactgtcggcgtataaaggtgttcgacgaaaacatcagagggcgccacctcgcgcttggatccaaagttggcaagtctgtcagcggcttcattgttgtgtcgaagaacgtgactgagctcgagtccatcgaacttgtcttccaatttgcgtacctcttgtcgatatgccatcatattgtcgtcaaggcaggaccactctttcataacctggttgacaaccaactgtgaatcacctcgaactattagacgctttatccctagggaaattgcaatccgcagtccgtgaaggagggcctcatactcggcgacgttgtgggatgccgaaaaatgtatccaaagcacataacttaatctttctccagttggggaaatcaaaaccactcctgctccagtgcccgaaagtctttttgacctgtcaaaatgcatggtccagtgctccatcttctccgcgggggtatcctcctggcactcggtccattcggcgacaaaatcagctaacgcttgggacttgattgaaattcggggcttgaatgatatgtccaaagacatcaactccaaagcccattttgcaatccgtccgtttgcttcgcggttgtgcagtatatcaccgagtggaaatgatgtgaccaccgttaccgagtgaccttgaaagtagtgagatagcttcctggtagtgattagaataccatataacagcttctgaacctgagggtacctcgttttggagtcggctaggacttcgctgacaaagtaaatcggtcgctggactttctggacatggccttcttcctcgcgctcaacgaccaagactgagctcacaacctgggaggtggctgatacatacagcaacaacggctcctgcggatgtggtgaagctaggactggtggttcggtgaggagtttcttgaaatcttcgaaggccttctgtgcttcgggtccccactggaaatcatctgttttcttcagtagcttaaagaagggcatcccccgctcgccaagtcttgaaacaaatcggctgagcgccgccatgcatccagtcagcttctgaacatctttctgggtacttggcggtttcatgttgaggatagcggtaactttctccgggttggcttggatgcccctatgagacaccataaaaccaagcagcttccctgacggtactccaaaggtgcacttttcagggtttaatttcatcctgaaagcgcggatgctcgcgaaggtttcttctagatccgagatcaaatcatccttttgcttggtcttgacgactacgtcatccacataggcttcaacgttgcgaccgatctgcgttgagaagcatctctggatcatacgttgataagttgctcctgccttttttagtccgaacggcatggtgacgtagcagtatgctccaaagggcgtgatgaatgaagttttcaaacagtcggattccttcagtcggatctgatgataccccgaatagcagtccaaaaaactgagaagctcacagccggcggtcgagtcgactacctggtcaatgcgaggcaacccaaaaggatccttagggcaagatttgttgaggtcagtataatcaacacacatgcgccattgccccgttttcttccgaactagaaccgggtttgccagccagtcgggatgaaggacttctttgatgaagcctgctgctaacagcttggttaattcctccttgatcgcgtccttcctgtcttgtgcgaatcggcggagtcgttgtttgataggcttggcatcttctttgacatgtaaggagtgctcaatcacctctctaggaataccgggcatatcagatggtttccaagcaaatatatctttattgttctgaagaaaggtgatgagcgcgctttcctatttacaatctaactcggcgcctattacagcagttttagtaggatcagaaggatctaggggaatcttcttagtcttggcctcgctttctgcactttttgaagtcttggtagctggcacttctccttcgctcgccgtggctgcagccagtcggatatcctctcgggcagacgccatctcgcgggtttgggccatgtcgcaactctccttgtcgcatgtgacggcttgcttgatgtcgctccgtagggatagaactcctcggggaccaggcatcttcatcatcatgtaagtgtagtgcgggacggccatgaacttggctaacgccgggcgtccgagtatggcatggtatgcagtctcgaaatcggcgacttcaaagctgatattctctgtgcggaagttttcccgagtgccaaaagtgaccgggagggtgatctggccgagtggagttgcggatagtcctgggattactccgtgaaaaggcgcattgcttggttttagctcggagcgaggaatctgcatatcatccaaggtcttggcgaagaggatattgagtgcactgccaccatcgatgagggttctgcgaagcttgacattacggaccactggatctagtaccagggggtaccgccccgggtggaccactcggtcaggatgatccgagcggtcaaacttgattgcaatctctgaccatcgaagatattggggcgtgtcgggctgaacagcattgatctcccgttcggtcaacttttgcttccttttagactcataagccagggggccaccgaagatatggttaagctccttgcggtggtcttgaaatcctgccggggtgtcgccgtcgtccttcttcctcgacgtgctttgttcttcgtcggggttcttccgcgtagtcttagtgtattgatccgcgaattgcttgtagacgaaacaatctttggccacgtggttggagttaggatggtgcgggcgttgggagttcatgatcttgtcgaacgtgttgacgcgcgaacgctgtcgagaagagtgactggcggttgcaacaagttccgcaggcttacgcttgcggtctttatgattgttacttccacctcctcccgaagccggcgtatccttttttggcttccaactgggacccgactgttttgatgcggtgacggcgtcttcagctttagcgtactcgttggctttttcaaacataagcttgactgtcctgggtggcttacgcccgaacttgccgaccaattcttcgtggcgaatccctttggtgaatgcggcgatgataacgtcgtcggtgatatcggagatcttgttacgtagttcagaaaatcgccggatgtaatctcgaagggattctccggacttctgaataacgttgtagaggtcgtattgtgtgccgggacgctcgaaggtgccttggaagttggcgatgaagtggtcgcgtaattcagcccaagatccaattgtaccacggggcaatccatggagccaagatcgggcggaatccgctaaagccactggtaaatagttcgccatggccttgctgtctcctcctgctgcgcggattgcgagaccgtagacggtaagccacgattctgggttagtggtaccgtcgtacttctctattccagtcggcttgaagccggctggccaatccactcgacgcaggtcgtcggtgaaggctgctactccgtcaaggtcgtcgtcgtggcggtccggcgagtgatgatagcctcgagctgctcggcgctgtatgattgtgtcgcgaagatcgatggggcggcgacgaggtggtgagcgaggtcgttccactcggcactctctatgatgatcgggaggcgagtgaacggaccgctcgtcgtgacccctgctcctgcgattggatcctgcgccggtgatgctgaggcttggatgacggtagtcatgagatcagaagtgggggactcggctgccagtcggcgtgtggacgctttcggagttaactgggaccgaagccgcaatcatggtcttcgtctggttcaagatgttgacaacgtgatcagattgattgagctcgttttccctgaggagggtgtcgaggagggtgatcgcggcaaccgcattctgttggggggtgcggaaaaccggtgtcccttcaacatcttgttggccgatgagatcacgcgctcggcgccctgcttctaaagctcgctgccgtcgatcctcagcctccttcgcggtccgctcacgctcctgctgctcacgccgtagccgttcttgttcttgtgcttgatgctcctcctccagtcggcgacgctcagtctcgtgacgcgcttcgttctcccgggcttggcgttgctcctccgtctcgttattggccatgaagacgccgaagtagagaggagtgtagttgtcatctaggcttccgtcgaagtcgtcgagatccgggtcgttgtagcgagaggtaaactcgtcgtactccacgatgtcggtggggcgcgagtggacggtgggagagctgtagtggccgtccagctgatccgtcgaaaccgtgccgagtggttggaggatgacgccgacttccctgaagctaggcgaaatcggtgttgaagccgacttccgcctaggcctacgggatggagatgctgtcgtgatggagacggccgccaaatcgtcggggagcttcatcaggatcggtgggtaagccccctcgtcttgatctggtgaggttggtgaagatgcgatctcgcccgagtggtttgaagccgactcgattgagatggtcttgaagtaactttcagccgcgtttgggagtccaaacggggccgaaatctggttctctcccgactggtccgactccgagtcaaggagagagatcttgccgaagttgttggtgacgaagtcgaggctgccgaaccgaaacgtctgcccgggtgggaagacgaggtcgtcgatgccggagacaggacccattgcactgatcggcgaaaagcttgacgcggcccctacctggcgcgccaactgtcgaaactagatttcggcaataataaaagggggtggctatcaagctggaaaagtgtatgggtttgaagacaaaggatttatacaggttcaggccttcttattcaagaagtaataccctactcctgtccggggatgaatccgccgagtgtgttattgattgtatgatttggagaaaatcaacatatgcccctagaggcacccggaccccccttatatatgggaaggagtccgtgttacaaaagacaatctatatccctaacggaatatgtagatacagataaaatacagtcgtaaccgactaagtctcaaggtgtttccttgatgcacaagttgagaaacaaacccgagatacaaataagatattctatctatattcggtatcctatattcagtccaaatatcatcgccgtgtagatatgggatatccataatctccacactgtgaacttgtttcattgtgacggagggaataaatatactaatgaaaataattaaaactagctaattcagctttgcctgtattgatcgcggaatcaccgaccgagaagctctctagttctagggcaggtttgaattaattagtggtattaatgaatgattaattattgcagtggaccaggatcatagcaggcagcatcgatgaagcagcaggcagggtaattgaattgctggaggatacaagcaaggggaatgtgatgtatttccatggctggggtggactgggggcttcagccgtccttagagcagtcgccaaaagactgacgatgaggccatcgccatcgccaggaagaagaaggtgggagaagatgatccacgttgattgctcggtgtggcagagcaagagggccctgcagaaggccatcgcccaggagctgcagcttcctcggtcgctgatggccttgttcgaccagcacgacgaggaggatgatttcagtggggtggatcagggcatgagaggggtggttccacttgtcacacagacaatcttgagcgacctggtaaaccacacattcctggtgatcttccacaatgggagcggcagctacattgatctacaggagtgtggtgtccctgtaataacaggaatcttgaacaaaacggtgttgtggacctcccgaagcagctttcggattaccgacttggacatggataacgtaagcaaggaggatcgggataagcttgctgggctgagtgatgtcgctatatatgcttatccaaccgcaggcgatgaatatagttttgtaatcttatttggaatgcttttgcatcaagaggcagaggaggttgccaggtacaccggtgtccctcaatctgctggcatgagcaccgagcttgtcaagaagtgcatcatgtatcagttgatgctaagacaacaacatgtggactacacccaacactgggatacccacgcagctaactattgggtatgcagtggaatcatacaaacctcagacaccactagtagtacaagttgtcatagctcatcgccatgggagatagcccaagctctttataataacttgatcttggagtttttgaccatagacgattacaacagcaacccaacttgtgcgaaaagaatacagagagccctacgactgccttctgattttgtgggcgagtcgtccttcttctggacatgtgatgctgctggcaataacaatgtcgacgcaactacagcttgttgtagacagaaatcactggaggccaaaatgttccaacatccatctgcaagctggctacgtgtgatacatctctttgaatgtaccttcagttttgcatctccacccttcctctcttgcagcagcctaagattcctcctacttgaccattgcaaagaccaaaacagcagcaggacggactcaacgctgacgatgacaacggataccggagatactagagcttgttttcggaagctgtgggtgctggacttgagtttcacagactggtattggctcttatcggttgaggccctagatttaatggttgagctcagggagttgaatgtgaagggaatcaagcattggagcataagccatctactccatcgccttgatgatgatgacgctagtaatagtacccgaagcagcagccgcaagccttggctgctcagccttgtcaagctccaagtcacaaccgaaccaataactgaagatcaacatcagtcacaagtatggaaggaagatcaggtagcagcaacattattcccgaacctatctagctgcaaaatcgtaaagacgatcattcttgatggttgttttgagttgaagcgaattgaccctcacgtcctgccaccatcactcgagtcatttagcttctccagcagcagcaatgacaatgatgttcatgtctcagccaagatagagagcatctcctttcggggatgcacccagttgaagagtttgttattgagaggactatttcaaaggctcaagcagctggacgtgtcagaaacttgtattaaaaccctcgacctacatgcaatgcgaggcaacgggtctctcaaggagctatttctgcttggatgcaaggagcttcgtgcaatactatggccaaaacaagatgtatcattggaggttctgcacatcgacactagtagcacagaacttgatcatgctacaggtgtagaagaatcatcatcattctcacctgttgaatttaaatggtatatttcagtgagggacagaaggctccttcgctcgctaaatgatacaaaatatcccttggatgcaccatgcatcgagatctcatcccctcctgctagtgttgctactgctactactgatggttctgaattaggcggaacaataagcaagagaaggcccattgccattagcagggctgaacaacgttggttgatgtcaaccaaaagccgacgaccaactgctgaccacaagaagttatatgcggatgtcgactccacgatccagcacttgcaactacaagcaaccatgaacggcaactggatgtggccatgtaaatcggagggcagcacctctcactacattagcttacaagatgataagaggatgcagacgaaaccattgtcgtcgccatctttgccaggttccatctgtgaaagagcttcaggcctgcacgtgcatgacagcttgtctgtcgcaagtatcacaagccattcaaatgaggcacggagatggtataacctagagtggtgcagagtggagagatgccctaacattgaaggcgttgtattcactccacctagtactggtagtaacagcattttctggtacctaaagacattctgggcatcccaactagcaagggcgcgccacatctgggactggagcacaacgggccagatacattttgagcctgcagattcgtcattctggttgaaagtgctacacctaaattgctgccccaggttgatatatgtgcttcccttatatgacaacagtccttcctatgcatactgtgcgttggaaacccttgagatcgtgtgttgtggtgacctcaaggatgtcttccgagtggatgataataatcaagagcttctaaaaactataaaatttcaagagctgaagcacatccacctgcacgagctgccctctctgcaacgcatctgcgggcataggattgtggcccccaagctcgagaccatcaaaatccgaggctgctggagcctcacccgcctaccggctgttggtcttgacagtacccgcaagcccaaggtggattgcgagaaggaatggtgggatggcctgcagtgggatgggttggagaacggacaccatccttccctctatgtgcccacccactcacgctactacaagaagaaactgcccagaggttccatgctcaggtatgtacatatgtctgtgtgcatacatgattgttacttgggtatcattccttgcgcgcacatacatacatacgtagaaacttatatagctcagtactttagttactccatcatatatatatatatatatatatgatcgagcttttcccttttttttttaattttgtctgacttggcgtgctttcttttcttcttaaattcaggtgatcgatatatacgtccatacactacatatttgatactgtaatcatctacgtatcattccctttccctcatccagtggctcatcaagttcttcagctctatctctattatatatgtccttatttggggctagtgttcaaagtgcttgctcatttcatcatatcatttgcaacggcatcaatatctaatgcatgatgagtaagtacatctctggccggcatccagacgctcgtcatctgcttgttactagcttggattctgttcatttatgcttcttttgttttgtgtgaaaattaataaatggatgctcagctgccagctggtgtgtgagctctgcatctatctgctaagttattttctccatacatgcttgctttccgtttggccggttagtcgatctgcttgttcgaccgatccatccatcggattactacgtatgcttcatctttctggatagatgatcatacatgtatatgtgaaaactttgatctctagcactgttctggtgtggtgtgcttcctagaggtcgacgaataaatcatcagcttcagcggcatgagaagatccattgggtgatcctcatgcagtcgagttgctgttgtgcacttgtttgtgggtgcgtgtgtgttcgtgtgatttgtcagcatttatggactgacctaagtttgtactcctaattacttcacttgtatgaacagaaacaatgatgctaaggattgtgagtgtgacattgtctatgcagcaaacatatatacctgttgctctgttatttggaaggggttgtatattttgctatgcagtctgcagtccacatagacgcctagtattttctttatgaaaaatacggtacaccttttgccttttatggttagcttttactcttttccttatgagtccttttacagtacaccatgctagtgatagagacgaaatccagccgtttatttgtgtggttatttttatactaattgatttggttacttaaaaagatttcccaccaatgccaccaagggaaatccaatcggcatttttttttctatctcgtttgttcttcgtcgctgcgaggattccagtcctgactcctgaatggaggacgcttcgtgctgaggcacagactctgatgaatttatctgtagctgcaagtactatgaatgatttggtgatgcgtagaacactcccagtatatttaggccctctttgttaagacttataagccaacttataagtcgaaaagtctaagccaaaacaaacaagcagcttttttatttggcttttttgaagccataagccactctaacactattaagccaaaagctaggttggagaagcttttttggcttatatgagatagatgtatgactccaccactaaacttaggacattaaatccactggcttataaatcatataagccaataagctgacttaaaagtctaggccaataagcctaagcctaaacaaagagggccttaacatttcactagatttggtggatcatgcatataatgtttaatggtccttagtaatctctctattatgtgctactactaataatttattagttgatcaactagcaccacacaatttctaatctattgtgaaaggcaaacgttcagtgtggtttcatcatgtatgcgagattaggaattgagtggtttggcattgctattgttgcattctgatctgttgattactaatgcttgcactaatataagcacggagatctgaatgtgcttttttgtcttcgatgaagcgtacatacttggccactctggtggatcagttttaattaaattttgtgggagggagcacggggcggcgacggcatcccgatcgggtcgattgggatttggggattcatcgaacgaatcggtaggggtaggggtagattacgttgagttagtgatccaaattaatttgcacttaataaaggtcatcttctaccggagcgaagcggaggcccagtagaagccagaggctgggccggaacgtaggcggaacgtcgtcattccttttagggttccaccttatatatatacctcttgtaagccgccgtgcgacgttgtaacctcaccccgatatagtgaagatattttgctggccgacgctcgtggttttttctctcctgttttgagaggattttccgcgttaaatctcgtgtcttctgtgattgatctattgtttttatatcgtttgcttgcttatcgtttcctaacggttcagtgcactaatcttaaagtgaaccaaacaaataacatataagccattgttttatttttcccataattccttcatactactgcgtactaatctgtactacttgtggaaatttcattagtataggatgaatcttttctttattttttgagggtaagtataggatggatccaaactgttggattagccctctaacccactaatataaggtagtatggtgtgctctaaagaaactcttttttacatgtgcaaagggagaagcacaatattttctcaatcctcaggtcgactgatctggtcaatgaattaagatgtatttcaacttgattagcagtcaccattagtaattgggttttgtacttgtgcagtgatataatactctgttttgtagtgaaaaccttctgccatgttgcagtataaggatatacagatgacatgcagtaagcattggggcatgctattctgtgtatccccaggtgttgtgctgggcctctatgatacacacattaggaccattttggtagacaatctgcaccttttaaaatacagtccttaaccagcaaaacacaagaacgccctgtccttttccaattcattgcttacacaaggaaacccctaagcagattttcagttctcattttttttccattttatccatgccgaagttcaattcttccttcgtgcgactgcaaagttccatcgttgcccttctccccgccaccgccgcctcctctctctcgccaccgtttcctcctctgctcccccgccttccttccaccgctgtcatctccgcctctcgtgcgttgccttcgtccccgcctcctccgttgctcgatctcacggcggagccacctctcttccttgttcttccaactcatgcacatggtttgaaattttggtaattttcggcccccaccggcaagcacaaatcttccccgaatttttggctttttgtcaaatatttgcaaaatttgtcaaaatttgttcaaattcagtcaaaatatgttaaaaatttaaataatttcggtccgaaaatcacgaaagtctcaaattctcggcaaccaccgaaatttctatggcaaccgaacttgcaaaccctgctcgtgcacaacaacagcacaacggatgagggtccatttcgtcatcgccatccccgaccaggttggaatctgagaagacggaggaggctatggacaaggcgacagatggggaaaggatccacaccaccggcctctcttcgccatggcggccgaacacacccaagaatcctcctctcgacattctaaatctcaaaaattcttcaacttaccatggtgatgggaggttgattatcctgttgctgtttcagataacccagtgatatggggctggtaagcatcatcttggcatcgacgaacctggcatcgttgtgcatcaccaaggttcactctcctgcattgtgaattttgttctcatgttttattttctctgaagttgatactcctgctggctctgaactctgaattttgttttacagtaccatcctctttgtacctgcaataaactgacatcgtgatgaatcagatggatgttggatctcgtgcttgtgaattttgttcaccgtaagttcaaatagagtacaaatagttttgatagctcacacataagggaaacagagtacacctttcttcggttaaatgacactgcaagctgtgaattttgatactccagctccagagatgtttcagatatgaggtcttcttaacatgaggtaaatttcttacaggaaatccattgatgattctctagttgtgaattgtagttctactccagcagaaattagcttattgtttcaagatgcatctttctcagcttagtcttgttcgtagattaagaaattcagaccaagtcaacctcctgataaccacactggattctgatgtcctggcgagccacatccaacgtgtggtgatccaaggcggtgacattatgtcgatgacactccaggcactctacagttaggaaaagtctttgttttggggtagaaatttgccatttgagcatgacaaatttgaattccatcaagaaattctagcgtagagccggtagaatcattgtcaacatgacaaatttgtatcgtgtcagtaaaattggtattgtgtctgtaatgccaattggaataatggattacaatgttttctttgttctgatggatcatgctttgttcagatggagtctaaatgtcagtttgattaacagatgttttctttgttctaaatgacaatatgaatgtctaaacaagtgccaattgccattgcattgctctgaatgacagattagattgttcatctgaacaatctgaacttttctataatgacagttggaacaatgacaatctgaatttttcgtgatgaaaattggaataatctgaattatacttagagagaatcccttatatgccactaaaaagtggtctgaacctttatatgcctctgaaaattggctcttctcttatatgccattggtccaaaattacgcacccttttatgccactcccgtcagttgaccgtgcgttgaccgttaactcttaaggaaaaaagccgtatttacccttctgagtatagggcatgcctaacaactcagagaggacaaatatgtctttttttacttgagagttaacggtcaacacacggtcaaccgacggaagtggcatgagagggtgtgcaaatttggaccaatggtgtagacccccgtttttatagcaggaatcactcgtgtgaatagtaccatttccctagatcaagtagtctggtactcacgattacattgctgaaatatcaagtgcgcatacatagattgtctagcgcgaattattacatcataggcccgcaggcatagtctagaacataggaccaaacggtccggaatacatcccaaaaggagaaatagataagcagcggaatcaaggcagcggcgacgccattgccacaggcgacgaccgtaactaagacctactaagcgccaccatcttcttcaccctcctggtagtaagcatatgggtcatccgagacttcatcaccggcttctgatggaatttgtaaatagcaagagtgagtaccaaccgtactcagcaagccaccacaacaacgatgcatatgatagaggatattcaatgaaaggctaatggtttatttgcataaagccaattttgcaattcttttcacaagcctaagacctagcataactgatcaaattttatctccgtagttcattatacagcgacggttctgtccaccatccattgtgttcccaaggatagcttcccgccactagttgtcatagttttctggggtctaccccttctcgcctctcgagaagttgatccaccagtctaaaaatcattatgcatatcccacccatcattttaagtgtttagagtctagccaagtgtaatacatgtcccggtgctcaataaccgcgagcacggctattcgaatagattggtttacttacactgtagtggatgtacactttacccgtactacgcgacttgcccaacacatgagcctacatcccaacgaatgagacttgccacggcaaagcctttcaacaacctcactttggcaatacccgctccatgaacttgagtcctcatgcactctaggcgtcataaatttctagcagtgagaggagttctggcgctccctagggggaaaactcacgaaagcctaacattgcatcctgtagttgaacccaatccatgctgtcctcttttgggtatctccttgtagtcttgtagtcttgacaagtcagtctctggccatccgtatcgggtatccgccagcagactgcttgttcgtccacacacctaagtgaaaccactatgcaggggtactgcctccgcttggctatctactccactaggtctatacccattcgagaagtacggctgtactaggatcgtttcatgcttaacttcatggctcggtacttaactgaccagggacggcactagcctttatcggacaccacccaagtcctccagccgccccagtcgaaaacatttgtttagtttaattttctttcacaaatcatctcatcattatcatggcaatgtggcgctcatgtctccacatgccgtatgtcaattaccttccctaattaaggtaattgcccaagcataaagcattttgataaatatgaatatgcatggatctaaattagcatgggctaagcatttgtcaaatattgactaaagacacacgatatcatggattacaaaggttatatggataatcaatatcaaaggtatggcatataacaaagtaggacattcacatataaatagcatgcaaactttatttaaatcaaaataagttcgcaataggtccaacatgctcaaagattagtgataacttgccttgctcacagatttgatgtccctgttctgcagttaactcaaccactccctcggaatctatatgtacgtgcgaaagattcgatttgaattcaactagaattcaaattaaatcaccaaaattcaacagtacaaaaataaatagcaaaagttattccatcagctagatcttgattttatatgaatttaggttcaagtttcattcaaatccgagctaaaatgagtgagttatacttgtttaaagattcaaatttgaattaattccaataattgtgaaatgatactgttcataattgatttatttttagtcatggcattatccataagatacattggctgacacgtgggaccagcccaggttgactagggccaaaccggctgttttaattaccagtgggtccagcttgtcatggagagtaaacttaatattggttttaattaaatttctaatcatccggacccacgcgtcatggacaggtataatcatcattggaagagaattactgtgcgctaagtagatgtgggtcccacatgtcataatctctctctcttgttcttttcctttttccccatcgtcttctacctcgcgccggccatcgagcagagcagaggcgcagcgcgtgcggcccagcccggacgagggcgacccggcggcggtcaggggaggcgcggaggagggtccggcgacctcccgccggcggccacagcacagggcggcgcggcatggccgccatggccgagctctagggtgcaaggggactcggcaaatggcgaggtctctaaccaattagtttggcgcaagagcttgtacagcttatggtgattccgttttgctagctaggtgggaaggagagtgctcgaggtgacctacccacggcgagcccgccgatggcgaagcggcggccgggacggcacgccgaagggcgctaatcgccaaaactggtgggggatttagcttctactccgtactagactaggaggagctataggagtgaggttttaccgagagacagcgggatggcgaagttcggcggcgcgcagctcagtgcggacgaaacaggggcggctagcggcgacgcttgcaggtgttcgatgcgtggttcccgacgttgatccaaggcagcagaggaagtagaggcggcccgagccacggttcccgcggtcagctacgccggcttcggctccaaccggtgatgatgaagcatgcacacaaggtgttcgatgaaatgtattcgaggaaaaggcagatagggatgaagtttttatgggggcttggcttggggataggccaggatggcgtggaggataggatcggcagctggtgcactcaatggctgtctagattccttctccattaaggttctgtctatactgtgtgttctagccggccctagctggagaggaaggctccgttcttacccgccggcatccgcatggtggcggacgtggccatggcgatgcgtgcacatgggagctaaggtagtagttggctagggctaggggtgacgcgcgatggcgacggcgcgttcgtggcggctcagcttttgcgcgtggattcggcggctcggtcgggctaggtctctggtcgaccacctggtggcccatgaacagtagcaaaagaaaaggaaggagaagataaaggaagagagtaagggggctaatctgtaaaagtgacttggataggaatttgaatgaaatgtagctctatatattttgtatttgagaattcaaatgtttgatttgaatatttattttgttattcattagttcccaaatgaatttgctttccattatattatccaaaaattatccaatataacttctaggctttgatattccttaaaaattaattaaatattccaatgtgacctttaataatacattagcacattggtcgagtttatttgtatggcaaagtattgcatatagataagtttaatctatttaattaattcttactccatgaaggcactgtgagacttggtgcaatatcggtctaaatattgaatcgagtactcatataagccctttttatatatagaactcaatttatttacatgactaattattttatgcgagtaaattttattccatgagagcctcaatgcaagttataaatatcaacttaattattccagtgaaacactccattatatgtagggttcataataaatatcataattttataactattacttagttgtatagctttagcttaattttcatttgcgacattttatagtttggcaagcaataatgaccgtaacatccatcatgatgcacaacaaaagaaccaacaacatcggcatgatgcaaatttatttaaaagtttttgaaagtactcaattttgagtttcgttttatttgtcgaattttcagggtgttacaaatggcatataagggaagagtcaattttcagtggcatataagggattagaccaattttcagtggcatataagggattatctcttatacttaatatttgaactagaaaaatgcccgtgcgctgcaataggaaaaaacatgagaaatttaagaaaaggttaagaaatatttatattatgtaattaattaaaatataaaatcgcaactatacatgtatacatgtatacgatgttgaagaaaaaaggctcgtaaaaatcaaggtaaatgtggaaaataaaattttccaaataaactatagctggatttaatttttattaaactctccacgattaattacactatgtgaaattttttcagtattttcagagcaccattgctaattttaataattaaaacattattttagcatttattttaatgaaaaccctcctttctccctgggccattttgagcccattctttctttagcccgtagccgagccggcccattaacctgacttctcctccctttcacctttgcctgcaagcgcgcatccagcccatcaagcaaccacaaagtttaatcagcgtcccttctcctctcactgtcgcatgggtcccagtgctacaggtcgtcccctacctccgttcgattccacagcttcccaacaccgccggaaactgtcccctccgtgaaatctgtccgcatccatagagctaatccaaaattgattgaggggttttgatgcttatctcctctttccgttttttctagaattagagcaaaatcgcatcgtatcaacctcggaattaagccatatagcaaaccctagagttgtccgtttcgcgtacggggaggaaattggaccgctcccaggacaatgtacgaaaaaagttggcaaaaacatcttaaagttttataataggtaaagatatactgaaactactggttatatatatgagaaatctgaaaataatgaagttatattcaaatatctgatgcttcatgagcatcatgtgcttttgaatatactgaagctaaactgaaaataccatgtacttttggactcctttcaaacatcaatcaaggtctctcaatagtcaatactccagtccaattactccaaggtttctgagtacttcaattcaggaaatcgaatcaagatttccatgtactccaattcagaaaaaatcaatcaaagcttctgactttctgagtactctaattccaaaaaagaaaaatcagtactcggcacatatactctttattctgtacgtacattcagaaagagtatcagagtactctaaatcagaaagatatttcttgtgctagttctttcattgtgtgtgtaaaatcgactacaattccagccaacgatcgagattcttgaggttatcggcgcaacctttctttattcttgagcttcttgattagatgcatcgctagaggttcgtcgtcgtcgcccgggagaggcacgccatttccgctgggcttcgtcgctgtggactgatgaggtttcgtcaccgtacgttgcctaggagagctaccgtcaatattagggttcgtcgctgtcgaggtccgttcatcgccatcaccagcgattgcgtaaaggcagttgagatcgagcccggccacgagccgcgcggcatcacggcgtagggttcgccgccattacgggttgggaaaggcgcggctgcgtcgtcagggcaaaccagacattttggaagatggggagagtatatcagttgctccgttatttggaaggggttgtatattttgctttgcagtttgcagtccacacagagcctactatcttctttattatcaaaaacacagtacaccttttgcctttgaatttcatgtttgacttgagaatgtgaatttaattgcccttaaattaactttcgaatagatttcagcactggccttttgagaagaagaaaaggaaaacccaataaaataccggtaagatgatattttagaaaagtttttttaattatttcaaattttgtttttctgttatagattcgaaaattttaaggtgttgcatagcagcatgcaatttgatgtcgcatggcatcgataggttcaagccttctttaggcaaagcattggtatcgatatcgttcatttttcatcaatcttaaatatatcttattcaagctcggttatattacattttgtcatgagcccctgcgcataatctaatgggatatcagtgggttatcggagggcgaggacatggaagcttggtcgaacatcgacccgtggcggcagcaacaggagatgagaaaacagagaatcggagatgagaattgtagattgaatttgcttgctttattcatccgaatgctacctcttaataggcttacaattggtaaccaaattactataagaaatagctaacaaactggtaattaaggaaaagagctaacaaactttatctaatttgcaagcggatagaactgttgccgtccggcgcggctgatcaggcgcgacgcgctgcgctccctgctgccgcgtcctgctgagccggcgtgcctctgcgacgatacgtacgtaatcctgaccatgacacatttatgtttggtttgcatttcaaatatcatcgtggcattaccactcatattactagtgatctaattagggagactaaccaacgggagactcggagagctacgaaccaatgattaagcacaacttctatacgtaatggatttgatgtgcttttatctgattaaatactatacttaatgcctataaatatatatatactatatacttaatgaatagtatatagaaatatatacttaatgaaattaatactatatacttaatttggaggcccaaaaattgtgggccctattcaatgggccacctcgacctgttaaatatgtgatccgaattttgggctcacaatatattcggattagtttataggattagtttcctattaggagtcctaaatttcttctatatatatcccttgtaagctgcacgaggagggtgcgacagcccaatgtatcccctgcgtttgtatccaatttctctacagtgatcattgtccgacgcggagtgggtgttttctgtgcgaggagaaaaaggcaatgcagcagccgtcgtccacgcctacgcagccgcacgcgtcgaggaagcagcagtcggtgtcatctgatgtccataccgagccatctaccagcacgtccattcagcagccttgcctcggttctgttcacgtgaatttatttcacggttggaaattgctgcgtgcacacgcccttcgtaccagggaatcaattcagtggcaatgctccggttctgttcaggtgaattcaaattcacattcaattgctatgttcacaaagccaagtctaccaggaggttctatacggagatcaaatacttcgttttatttaatgcacctagagcgtttcgcgtttttgctagggtttcacaatttataccagcagattcaggattttattcccaaggcgagtttgaagtttaatctaccgctcctggattgagatgcaatattctcgttatggcaagtgaagatgcaagttggcgtagccatcgaggaggagaagcaagtattgctgtacaccggagaggaaaaaaaaaggcaacacattcaagtcgtcgagagggagcctcgctcctgtctagatcacaaggtgatcaaattgtccggcgaattttgctaccatcatgcctaacacaccggaaggttaataaggagatctaagtactttgttttatgcacagcgttttgcgtttctgttaggattccagaaattaataccagcagattcaggatgttattcccatggcgagtttgaagtttgtgcatcagtttcgcgtctctgctgggttccacgatgtcataccagcagattcaggatttgttcccaatggcgagtttgaagtatggtctacctcttctggatcaagggtgttatggattatagtccaagtgactatttggcgcacattgattttatcatcatgaggttgtttagaggttgaagatttttatgctacaagggaaattcgtctcaaggtggagattgttaaatatgtgatctgaattttgggcccacaatatattcggattagttatgtaataggactctactttataggattagtttcctattaggactcctagatttctcctatatatatcacttgtaagccgcacggagagggtgcgacagcccaatgtatcccctgcgtttgtatccgattcctctataatgatcattgccggtcggtgcccgtggttttttcccgcaagggttttccatgtctccgttgtgcatctattttcataacacgaccgatagcccggccttaatttaccgtatcgatgattcgttctctaaaggaagttacagtgatgaggcggtttctactggtatttttatatataaaagggcattttatctttaggataaacagggatacaattgctttcgctcagaatagcttgggtcaccctggaggcctggactgacaggcatattagcttagatgaagcaaacaacactcctttcgctttatatctttttctttatgcatgctctttaattaaggagggcccagcagcgatcagtggcagtccaagcaacgaatctgatgattattgatggagcgcacagcttgggagatagtatatcgatttgggacacttttgccgaaaagcacattaccaaagcaaacgaccaagcatgtaatgcacgcattctatgtaggcttctgctagctccatcagctctccccaaacatcatcttgcattcagttcttcgatcgtttcattttgtatgctcccatgatgcgtgcaagcatggcttagtttgttcactcccggccgcccagttttctcaacatcgtgatcaaggtaagctacatgaatgcagcttgctttctcaacatccatagttttatatatgtacaaataatcaacacagtgatatataagagtcttatatatctctctggagttttggttttcaacgagctagcaagggacattcttgaatgcatgtttcaatatactccagctaatttgtatttagttttatatcatcaatttatattcatatagaatcattgattaattaaattaaaagaacatattctagattttgtaacgtacgtgcgattcaaagaacatcgactgatcaagatatgatggagctgctcgcctagactgtaattcaacaattgaagatccagctagctagcaagagatccaggcaacagatcgactcatcatgccagcggatgaggtatatatttcactccgtgccaatgtgccattatatttttttctcttttcattttgaatggaaattattcagcgaccatgcatgcaaaatttggcattccctctgtttcatattataagactttctagcattgctcacattcatatatataaatgctaatgaatatatgtctagatttattagcatatatatgaatattggcaatgttagaaagtcttataatatgaaacggagaaaagtatatattagctaggcaggcatgtatgcatccaatttggatgctattaatttgttcaaacacactttcattaattcattacatatatatggggtatattttaatttagacccaggagtgtcattaatttattcagtttggtggtcttctctataacttcactggttttcaaatagaagtccggcaaaatctttttgtattttcgattacatatatatgacttatagtacataactcaaaatatatttactagcttatatagccacacacccccacgcaggccatatataacaaacttgcccatatctaactccacgacccaaactaaactttcagctgcatggacacacatgcacacttgctaattactacctccgtattttaatttatgacgccgttgacttttttatccatcgtttgaccatttgtcttattcaaaaaaaattatgtaattatcatttattttattgtgacttgattcatcatcaaatgttctttaagtataatatctactgacacacttcacgccacgagactcactttacttgacacatctactgcatgcaggcacttacatacaactcatggctttcactgatatcacactaattaactcacacatgcacgcactgtcgtgctcctagcacacacgcacacgagacttagtatatataactcaaaccaaaagatcacttaaacaacaacgagattaaaccttaacactagctaattaactatactatagtacgtatcattaatttgaaagttttccacccaaaaactgtcaaaagttgtaaagacactccctgtatatgtagtaccgaatttaactagctagctcaacgctcagagaaaacgatatataattggtgtatctctacgtaccaaaaaacagcaagcatatatacagtagaaggcgaagcttagctaggtttgtctgattaattatattattaattagtacttattaattgcagtggacgaggatcgtagcaggcagcatcgatgaagcagcaaagaagataatcgatttcctggacgatacgagcaacaacagaagtacggtgatctattttgaggcctgcagaggattggggtcatcggccgtcctcaaagaggtggccaaacgactgagatcgtcgtcaccggagaagctgaagctgaagctgaggttggacaagatcatccacgtcgattgctctctgtggcagagcaagagggccctgcagaaggccatcgcccaggagctggagcttcctcggtcggtgatggccatgtttgatcagcgtgacaaggaggatgatctcgacggcgtggaccacggtgccagaggagtgataccgcacatagatgtgcaggagtgcggtgttcctataaatatgggactctcaggcaaaagggtactgtggacatcccaggtcaggtttgggccttggatgatcacaggcgatgtgcacatggttgccggaccgagcgatgtcgctatgtttgctgatcctatggatgatcaacccctgctgcatgaagaggctgaggaggttgctaggtccactggtgtcccaaaacctggcatgagccctgagattgtcaaggagtgcatcatgtactacaaggtggtgaggctgttagatggaaaccatggcattgactgggccacccacgcggctaactactgggtatgcagcgggatcatacgatccgttggtaatacgtcagcatgggagattgcccaagctttgcataccaacctgagattggattgggatgatagtctgaataataataaggaaaaactagatccactacaagtgccttgtgattctgtaaaggcatcattcttctgggctacatctcacagcaacaaggaagcaactacaagctgtaaagaatcactggaggccagaatgttccaacattcatctgtagacaggctgcgtgtgataaatctctcccagtgtacattcagttttacatctccacccttcctcggttgtagcagcctaagattcctcctacttgaccgttgcaaagacaaagacaagctctgctcaggctcatcaccaaatagtactagtgctggagacactgaaaaggagactagtattagcagtggagcatgtttccagaagctatgggtgcttgacctgagttacacagactggtattggctgctatcagtagaggcacaagatctaatggttgagcttagggagctaaatgtgaagggggtcaagcattggagcataagccatctactccgtgatgacaacaattctagtactggtgtcggaagcagcaccaagccccttgggctactcaaccttgtcaagctccaagtcgcgaccgaaccaataactgaagttcaacatcagtcacaagtattgcagcaagatcaagtagcagtaacattattcccgaacctgtctagctgcaaaatcatcaagacaatcattctggatggttgttttgagttgacgcgaattgaccctcatgacctaccgccatcactcgagtcatttagcttctctagcagcagcaatgacaatgatgttgatgtcacagccaagatagagagcatctccttccgaggatgcacccagttgaagagtgtgcttttgagaggagtgtttgagaggctcaagcaactcgacgtctcaggcacttgtattaaaaccctcgacctacgttcaatgcgaggcaactggtctctcaaggagctcctactgcttggatgcaaggagcttcgtgcaatactatggccaaaacaagatgtatcattggaggttctgcacatcgacactagtagcacagaacttgatcatgctacaggtgtagaagaatcatcatcattctcacctgttgaatttaaatggtatatttcagtgagggacagaaggctccttcgctcgctaaatgatacaaaatatcccttggatgcaccatgcatcgagatctcatcccctcctgctagtgttgctactgctactactgatggttctgaattaggcggaacaataagcaagagaaggcccattgccgttagcagggctgaacaacgttggttgatgtcgaccaaaagccgacgaccagctgctgacaacaagaagttatatgcggatgtcaactccacgatccagcacttgcaactacaagcaaccatgaatggcaactggatgtggccttataaacaggagggcagcacctctcactacattagcttacaagatgataagaggatgcagacgaaaccattatcgtcgccatctttgccaggttccatctgtgaaagagcttcaggcctgcacgtgcatgacagcttgtctatcgcaagtatcacaagccattcaaatggggcacggagatggaataatctagagtggtgcagagtggagagatgccctaacattgaaggtgttgttttcactccacctagtcctgttggtggcataactttcttgtacctgaagacattctgggcaacccaactagcaagggcacgccacatctgggactggggcaaaaggggcctgctgcacaaggggccagttccattcaacctgcaagtgctacacctagattgctgccccaggttgatatatgtgttttccataaatgacaacagagcttcctatgcataccgttggttggaaacccttgagatcgtgtgttgtggtgacctcaagtatgtcctccgagtgtatgataataatcaagagcttctggtggcaactatagaattctcagagctgaagcacatccacctgcacgagctgccctctctgcaacgcatctgcgggcataggattgtggcgcccaagctcgagaccatcaaaatccgaggctgctggagcctcaccagcctaccggctgttgggcttgacagtacccgcaagcccaaggtggattgcgagaaggaatggtgggatggcctgcagtgggatgggttggagaacggacaccatccttccctctatgtgcccacccactcacgctactacaagaagaaactgcccagaggttccatgctcaggtatgtacatatgtctgtgtgcatacatgattattacttgggtatcagtccttgcgcgcacatacatacatacgtagaaacttatatagctcagtactttagttactccatcatatatatatatatatatatatatatatatatatgatcgatcttttccctttttttttaattttgtctgacttggcgtgctttcttttcttcttaaattcaggtgatcgatatatacgtccatacactacatatatgatactgtaatcatctacgtatcattccctttccctcatccagtggctcatcaagttcttcagctctatctctattatatatgtccttatttggggctagtgttcaaagtgcttgctcatttcatcatatcatttgcaacggcatcaatatctaatgcatgatgagtaagtacatctccggccggcatccagacgctcgtcatctgcttgttactagcttggattctgttcatttctgcttcttttgttctgtgtgaaaattaataaatggatgctcagctgccagctggtgtgtgagctctgcatctatctgctaagttattttctccatacatgcttgctttccgtttggccggttagtcgatctgcttgttcgaccgatccatccatcggattactacgtatgcttcatctttctggatagatgatcatacatgtatatgtgaaaactttgatctctagcaccgttctggtgtggtgtgcttcctagaggtcgacgaataaatcatcagcttcagcggcatgagaagatccattgggtgatcctcgtgcagccgagttgctgttgtgcacttgtttgtgggtgtgtgtgtgttcgtgtgatttgtcagcatatgtggactgaccgagtttgtactcctaattacttcacttgtatgaacagaaacaatgatgatgattgtgagtgtgacatatattttctatgctgcaaatgtatgtattagttgctctgtcattttgaaggtattgtatattttgctctgcactccacagtcaacacatgatatgcctgtgtaaattttctttaacaaacactccttatcaaatccgcatttcttttgttagtttattctctgcttcaaaatgtgcaaagggagaagcacaagattttttttaagcctcaggtctgactgatttgatcaatgaattaagatgcatttcaaccaaattagcagtcaccattagtaattgtgttttgtacttgtgcagtgatatgatactctgttttgaagtgaaaccttctgcaatattgcagtggagagtggcatgcagtaagatttggggtgtatcccaggtgttagtgtttgctgggcctgtatgaatacacacattaggcccattttggcagacagctgcacctattaaaaatacaatccataactagcgaaatacaagagcaaaaatacagtcctttttccaattcagtgcttactcaagaaaacctcaaactagatttccagtcttcatttttccctgtttatcctaattttgtagctacaattaattcaagatacaggagattaaagaacttggacttaaaaaataatggtgacacagtagcaccttaatttccttctagtttcagaagggacaatttcctttgattcaactatatccaaaacaggcttcaaattacatccagttctacatccttgctttgcaggaaacattggatcttgctagagaagccattagttatacgagtagaagcagcaggtcgagaagcttggcaacatgtaggctgcaccctgcattttctttcataagtgatggttgatgcaatgcaaatcctagtcttgctaggagattacaggaaagctaggtgatctgatctgagcaaattcgcacagttttgccagccatttgttgcattagttagagatccatctgatccatatacgcattacgattaattgtgttacagaacgtatttaaaaatactgatcgatgcatgtgtcctactagtatatatgtacggcaagacaaaagcatgcaggatcatgagttggacaaggagcaggtgaaccgacattatttacctttttctttgcgggtgggccccacgcagcagcctatgttgctcgctgagctgttaaatttacattgtgtgtccaatgccattgttaaacatctacttccttcgtcccaaaataaaacaacttttatatatatatatatatacacaaattcatgcataaatgttaatttgtttaagtttggaaaggaataccctcaaaaaagtttagaaaggattgagaagatcgctagagtaaaatgcaaacatgagagtgcagcgagattatacaaattatatatggtggtactattgaataaactttttgttgtaattgttaaacttccatgtggaactataaagattgctttgggaaaaaaatgcgaatattaggaaggaccaaatatcaaataaatagaagggatgagtcttcgaactcaggccggctagctcaccaccatgtggagctggccggagtacccctgggcttttctctaaagattgctttggttctaaagataaatgcagaaatgtatgaaataagctctttttatgttttctaaagaagagggaaataatatcatatcattggttaaaaaatgttaagagacacaaagaaaaataaataagattagctagaatcggaataattaacatatcataattgtagttctattttagaagagagaaggaacctcacactattgtgtaacaaaactgtacaaaataacaagcccccttgagtaatatttaacaaatacagcatgtataccaactcaaaagaggacatgtgtataattaatataacatgatatatatagttgaagacaccatcagaaatgctaagcctagatatatactactctagctaggctctagctagctcatacatatcaattaatataaaaatattatattaaagatatatagttaatttgcaagcatatgcatgacgcaaatggcacgtttaattaatactatttgtcaaaactgcatcaagtggaaacaatagcgcacatgattccatttgaaacttagccatgtcttcatgtttggcagtgctaaccgagaacacaacaatgcatcttctacatatttcacctaatagttaacacactgacaacttcatgaagctttcaccgaaaatatttgagatagatcacgtgtcacaggccggctcaataacatggtacaacttagattgggagtataattaaaatgggcatagctaggaaggcaacagcatagaacattgacaacataatgatcatgcatgtattaagacattgacccactctggcaaaatctagtctaataaaaaactcacaaggttaattagaacattcagagatggatctcatcatgtcctgatggtatacttgtaaatgcaagtcgctttaatcatacaaggatggattttaaaaaaataaactcttccaaaacttatttctaaacatgaaccttttggcatggcgagacaacaataccatgtgcaacccatcatggcgtgacagtgttgtttcacctaagtggggtggtgtgaccaaaaggtttggattagaaataagttttggaatagtttacttttgaaatgaaaaaataaaaggttcaaaagaaataataaagaatcaaaaggatgtgataagaaaataactcaaatcaattaattagttgctctttatttatgctacattgaaagaaatgagtttttttttaaaggaaaacaaataaaacagatgaaaatgtgttataaatttagggaagaatttaaaagcaaagatgacgacttattttcagttagcaactactccactatagctctaggtgaattggagagctactagctagggatctttgacttttgccttctgtttggttaatttcaactttcaagtatcatcattgcgggacgttgactttctaatcctagtgagcaatcaaactttgataatcgtgtcacattaactaaatgagacccatttaagtttaacaaacaagcgttttgacatagtaaagtaattgctgattatcaatggcaaccccttctcatgtaacatccacgattttcggagctcaaggatttgtctcagctagggatggcaatttcccccgtggggccgggtcccctacgggggcgggggcgggttcagtttttgacccgcgggggaggtggggccgggggcccgcatttttgtggggaggggacaggtgaggcatttcacccgtggggtgccgaagggtgtatattaaatctcaaaatgtagcccatagaagatctaaaagagccacaaaattttaagtaatagccttatcctctccactctccccatctcccctcccctcactctcactacacaggcggaggcggcggcggcgccaccgcgccgaagaagaacaatgtccaagggcatttcggtactttcaatgctctttttctctctgttttcaccggaaataataaaataatgcatcaggtgtctagcagctaattaccatatttttgcaatgtccacaagaagatacatgttctttgggtgtctcacagcaaatgtcacaaactttgagtatcctatagcaaaatttgcatttgatttagtacaaacctaagggcttattctgaatgcaggaatgcaaattcatagtaccaattcctccaaactgaatgaatgaagtactcaaatcctataggaattgaatcctcaaattgttctctacaatttgtagaagccctaaaataacttaggccgtgtttagttcggtgccaatttttttttacgtatacggacacatatttgaagtattaaacgtagactaataacaaaacaaattatagattccgactgtaaactgcgagacgaatcttttgagcctaattaatctgtcattagcaaatgtgggttactgtagcacttatggctaatcatggcgtaattaggctcaaaagattcgtctcgcaatttacatgcaaactgtacaattagtttttttttccatatttaatactccatgcatgtggccaaacatttgatgtgacggaaaagttggaagttaatttgaagaaaaaagttagaatcgaaacacatgcttagtatgaaagagtgagaatgaactaaccgtacaagtaaatttgcaagtcaagtcaccacaaaaattaacctctagcaatcattgatctgatccaacatggaaaaggtgaagacaaccatgtgtggttgacttttttaacatatgacagatgataaaatttggtcaaaagttagcagcaaacgtacccacatccatatatgcatgcatgcatcacatcttgcaaaggtgagattctatctgtctctcgatctgcatgaatccatggatacatgtctgattgatctgatcatgcatcacagttgagaagaagctaagctaggtccaccaatactgttaagtgactagttaagcaaacaagatggtgatgtgcattgcccaactaatgcaatcacaaaagaaatttcatgtacatatgaacatatgatgtcaaagttataccttcaccaattagttgatgcgtcaaatggtattggattacgtatacgtatcttggcaaataatagttgcaaattggaataatacgacgacatagtatgaatctatgattaaacgtacatcgaatgaagaagcatcaacctgaatgaatgattagttgaagaagcgtgtagatcgaagatttgtctaatcaagtggcttaattatttgtccatatatacaacactacaatacaaacagatactacactggaacagcaactagacaaaaattaagttcatctctccctcaaaatgcatttaatttatacatttatatgatgttgaaattgctggacgattatgctaatacaaaaggttgatacaattaattgattttgagtgttgtttgctgcttcactcggggacaacacggtagatgacgacgaagcacggcagtatggcccttgggttcgccacgaacagctcctccaggttgccgtacacgctgctcgccgcctcgtcgccggccaccgagtcgaacgctccctcctcctcctccgcaccgccatcgtcgtcgttccggcggacacggccggcgattacgcggcacaccagcattgcccggcacccgcccgcctgctgcgccgccgccgccgccgcgccgcagtcgtgcgcgcggccgctgctcgccgtggtgcgcacgccgagcgggtgcgcgcccgcccacggcgcgaacccgtgccggatcgccgcgcacacgccgcaggcgtcgtcgtcgtcgcagagcgaggtggcgccgttgaggccgagcgggcaggcgagggcggcggggtggaagcggaggagctcgttgccgtcggcggcggcgcgggcggcggtggcgcggcagcgggtgcggacggcgtcgcggtaggcctcgaagcgcgccacggtgcgcgccgcgttgtgcaccttgaggatgcggtcgatctggcagatcggacggtcgcgcttctgccagctcgacttgaagattatctccacgatgtttcgccccgagtcctccggccccagctccgacactgcatatgcattgcatgcactccaaaattaatcactcgctaatcctccagggagcaagctaattaattggatctaccgtaatgtaatgtaattagtggagagattaaccacgcacagctagctagctaagtgcattaaatgcagtgagtgcatcagcatgtgcaagctaagctcacagttatcatagcagacagtgtgcaatcaaggcactgaaattcaggagatcagtacttcatctcggccgcatcaacaacaataatggcattgcaaatagtgcagcactgtcatgtgataggacacttcaattgacctaaacagttcaagaggatgatgtacatgttcatgcaagcacatcgatcacttaactaaccttagtggctgccatggcccatggcagtttaaagctgtataatcagctatgcatgttctgcatctatttggaagcttgagattctgctaagtagcttgttcgtaccagaaaaaagatcattttctaaacaaatatcgaacgaggggagtagcaagctattgagaatttaaagtttgattcctggcttctggtgtttaatttattttctgaattctataactatatattcttaaacttgggtgaaaatctgatgtgtttcgaaagctgagaaattctataaggagctatagctgccctagaaacttcataaaaaaaataaaggcatcaaaggacaagcaagtactccctctgtctcattttaagtgcagttttgagttttttcgtccaacatttgattgtccttcttatttgaaagtttttttttattattagtacttttattgatattagatgataaaacatgaatattactttatgcatgacttatttttttaatttttttatattttttttaaaataagacaaacagttaaatattggatatcgaaactcataactacacttaaaatggaaccgaaggagtaaacgacacctgaacaatctgaaactttgtgttcctttcagagtactaatttcacaaattgtgagtgtgttcgtgtttgtgagggtacacaaaagtgcatgcagatcctgtgtgctaccaactaatataataaattggcagattggatggatactttgcccaactactgtagttgtagaagcactgggatctcactctgcagttctttctagtactcctacattgattctattgcttctggtgcattgtcttaatcaggcactgtactgtcattgctgttaattaatgatctttataataactaatcatgtgcatgcagtatcctacatgcattgagatgccatcagtagtcagaaagcttctacccatctaccttcaacaaatggagatgcagatgcgactgcaagcatgcaaaagatggctaggcacagataccttttgatgtatttttgccatccaatcttaactaaaataattaaccaaagatgattaatgtgcacaagacagtagcttccttgtaacccacaaaagacaaaggaaaagaggaaaagaaagatggggttaatagctttgatgagcagcatcttccttctcctttctgtttgtctcctctcctctcatctcatctcatctcacatggtttgatgtgccaagaaactagtaaactaataacactgtcactccactaagattataataataattatcacaatattggtgtctatgtggaaatatccatcatcattttgtcatgagtaaaccaatcatattgactgggcaatatatagtacccacacacgcagatctcaatgcctcctcattagtgttactaacttggattagctaggagtactatcttaacttgttctacaccccaaaagcattgactactattcacacaacatgaacctcagtttgtcatttttcgttagaatggagatggttgatatcaatatcgtttacggtttatgtaaagttgatgaaatttgtagaaattttcatcaaaatttagttaattaccagcatggcgaatggcttggtggtgctccaagctgtcggccttgttgaacacctccccacactgcgagcatgcgcacagctcccgtggcctcggatacctcctaattaacaccagattattattcgctaatcaagttaattatgagcttaattaagtaattaatcggattaggaggagaccttgacatgggctcgacgttgatggcgcggcactcgtagcaaccggagaggccacggagggaggcgtggtggccgccgccgccgccggaggaggaggtggcggcgcggtgggcgcggcgggaggagcgggtgagcggggtggtgtcgcggtcgagggacgcggcggcggtggacgccgcggaggcggagctggcggcgtcgaccacgtcgcggatggcgcagagcgacgcgccgcacgcgccggcgccgtggctgcggagccgcgacaacgcggacgacggcgcggcggggtcgtgcacgcgcgccgccgccgtcgcgctccggcagctcagcaggctcttcagctgctcccacgacgacgacaccggcgcggc

SEQ ID NO: 6458 - DNA, 16701 bp, Oryza sativa
caagcaatgtcaaattttattgcaacaaaacatatggtgtatagctgaccattatattttggttcgtttagctactgatccttattatgtggttatattaaactgttgtgattcgtgggtctgagagcattatctgaaatcccttgcaacatatgagttctctgcaagtgttcaacattttaaaaagaatggtacaatcatccagctgcttcgatatggggttcccgaaggttcagatttcaggatgctggaatcacatcatagaaaaagaccgcaacatcacaataacaattaataatagggcaatttgatccacgaaggttactagcgaaatgaccatactgaagaatgctgttattgtttacagtgaaagatgcagtcagcaataaccttatataggccgtgtttagtttcccccctattcccaactttctatcacatcatattacatcaaaaacttaaaacttttaattttttttctaaactcccaactttcttcaaacttccaacttttttcaggaactaaacacacccataaactgtcataacatatatcagattttggagctaattagaccaactttgagccaacgccatccacagcattaatcctaatttgcctatgtggatctcacttggcgcaacaccttcaactagacaaacagtacttcataaacatatataattactggcctagaaggtaaacagcctactacttggaacattacagcagtgactattaagttaacatcagcactaacatactattggacaagctgttggttagctcagtggggaaacacaagcactggtttcttcagcattcctcatcagaatctccatcaaagtactggcaccgagtgctactttgacctttctcgtagcctccttcagatgggtgcttgagctcattaacaccttggtttttgcatgcattgcaacaaccttcaggaacagaaaacatcaataataacagtggtcggaaaagaagagagcaatttgatttgatgtgaaccgtgtatcacgcagtggataacaataatactactactggtaaaaactaacgaaactaaggttcaatatatttagttaagaggaaaatagggactcaactcctcatcaagatccaaaaccaatgtgaaaaccatgtataactagactaaatgcaactaatactgctaacagacatgccttttctttcaaatacaaccaacaagagtaccaatttttgtgaggacataaaagtgatgatatggaaaattatatcctgatcatcctaatagcttacactatagggcctgcctacatctccaaatcaagtactcacaacgtacacctagttttatgttttcgaggcacggtttccaatagtgaggtaaacttcattgtatttacaatttctgctatgttaatcatgtatggatttggcttgcacaaaccatttagatgtattcagtacttcagtacacaagtcttactagttatttccgactatcttcttcatcatcagaaagacgaatcgcatattcaagtggggactttctattacttgctctaaggttagtgtagatatgatcaatacaaatcagatatacaacatgcatgagaaaacaacttaatactatttattcacatcgcaattatcatactcaagtatttatttgagcaatatgtcagtgaaacattcagtagcaaatcctacatgtattgtgcatcttaaaagatttttctattcttaaacgaggaaatcatatttcctttaccagcatcaagtggcaactgaaacccacaatagtgttataaatgtgtaatgataatcccaaatgaaagattcatggttcacatttttcactaatttaatccaaacagtggagtaattataagatgatgctttgctttagataaaaaaaaagaacggaataaaaagaagaccggtccctgctgaagttttggctaaagatgtgacacagagtacagtgttagattataaaagaacatgccatgagtacagtgttgtttgaacaataaagtttaagtagaaacaggcaagaacacataccatcatcagttgcctcaagtggagtgcaaaaataatacttgacgccatgcatcagctttgtttcagcaaaataaagcctagaggtccagcattcctcatccttattcttcatctcaacagtgaaattatagtggcaataaaccttcctatattccataacactaaagcagtggtgcaatatttcaccaaacttgtaatcaacttcctaaaaaaatcttaaaataagaaagagcgataacaatgataataagatgaaatatactagtaggttttatgcaaggtcgcaaacctcaaaagcatccttttctgcaatatagtttctgaacgctaagaatgcttcctcggtcaaatattgaagtccattcgcaattgtttctttccgagaacgttgcttcaccgggctcaccctactaaaaaaggcctttgctttcttgtctagcagatcgatgtactcatcagacatgcaatattccactggtttgtttaagctgtgtttcattccaaaaatagtctgttattgtaacaatcataaagtttagcacgctacaaatatcaaaccagaaacatatatacaaaacataacacttatttctgaacaaataatcattttttttggcttggaaatcaaagaaaaaatcatttataataatattagataatgatgacaaggagttcaatattttataatatatacttaaaatcgtaaataaaaaaacataactatcatttacaaatattaaattgtccgattatcagaataacaaaaacaatccaaatttccaaagatatattcgactcaagaatgagaaggaagagcatgaccagacatcttatggttacatttatagtatcaatagtttcttgcaagccattggagtcaagttaccagagcaaatagttgaaagttgaatggataattttttttatacatataaaagatcatgcaattaaaactatgttaacacattttacatgttcttgcatgagaatacatctagaccatgggtcaacataaatatagaagaaaattgtgttccaagagataaatcaaaaggactgtaatgtaactatagggaaattaccaaggaagacgtggcatttcagcctgttcttgttgtgatggtatttctgacaagtggccaacatcattagggtttggagtggcatattctttatcagtgtgttgaaaaggaccggcgtcacttggatgtagcactccctcaggctcctcgtcctcctcaaactcaatattcaacttcttgcatctgaaagaatcaataactttgtagaaatggtatcgaaaattgaaaagggaagcatctacttagtatttttcagaaacaaaatcgaccatgtcttgtaattatgacgacatagtttgtattggtgtgaaaaaagagcaattaatggggttaacgatatacttcatagaaacttcaactgtacctacaagaacaagacaacttgtcgtctttgtaaaacaacatagaaagtaatgatggatgaataaacagcgcagaagatgggagaacttagtgtgatattagcaaataagtccacatttgttggagaaggaatactacataaccagaaaatacaacataaataaacaagcaactttgtggtgcaaatacttgcaaaaggggtcttatacaatagagctattaaattttttttgtgtaaaagggtaaacaagtagtgtattagaaaccgcaccactgcatatataatttatgtacaaaagggtaaacaagtagtgtattagagaccgcaccgctggatatataatttacgaatgtatcgtgctacactgcgtccttgctcctccagctcagctttctttgccatctggtacatgattgaataattctgctgtgaggactgatgggttcctgcagatgattgggctctgaacctgaatagagaaacaacgttagcaattgagaatgcatttgtttgttaagcgcttgtaattaaaaaaaggaggaatgaatttcaattagaatagaaaaacgattacaagataatcattaatcagaacacatgtgaccagaagtcgaaacaatcagatcccaactgtttgtctcataaattaagaccttaaaaagaaccaccaaactgacgagtaatgacagaaagtatgacaagcaagattgatgaaacgcagaagtcccttctgtctcaatacccttggccaatgaactccagcggtttgtgggagagatctcatcggcatccatggtatactgacaagtcagtggcaatgaatgtgggtggggtgtcatggctgctagccaggtcaatgggtagggtgattcaagtggaaggggattgttggatcaggaagagagctcgtctggccatggtgtgccagcgcccagcagttagcgaggaggactgctaggtaggtccaaggggagaatatcaaggaaggaagcacaggatgagctcgactctcagcttagtcagcacataagacaatcattgtctctaattactactactatatgaggataaacttttggatactctatagttggccataaggcccgaggcccgaaggcccggcccacggcacgcctttttggcccgacccaagcacggcacggcccgacttgggtcgggcccgtgccggcccgacccgactgtcgggctgtgcctgggcctccccaccagcacgctgggctggcccggcacggtcgggccggcccggcacgatgggctggcaggccaggcccggtacacaaagtatagggactaaaaatagacatataaatgtcaatgtctaaagaatagggaccttaaatagacttattttagctatttatataccacagcacaaagaagagggaggtaaaatagacttttttttagctatacaatgtcacagcccaataggagggagaaaatttagacttattctgaggaaaagcacgatggcccatcgtgccttcgggccgtgcctgggctgtgagtgcggcacgtgggctggcacggcacggcccggtgcgtcgatcgggccgtgccggcccgacaagcctcggcccaggcacggccgggcctgggccgtgccgtgccgggcggcccacatggccatctataggatactcatggcacgcttttcaaactgctaaacggtacgtttcgtgcgaaaactttctatatgaaagttgctctaaaatatcaaattaatccatttttcaagtttgtaataattaaaactcaattaatcacacgttattactacctcgttttacgtgaaacacttaatctttatcttcatcttcatcttcaggagattcaaacaccacctatgtctacattgctactaatttggtttccagggacttattccaagtccctgtcacattggatgtttggacactaatttggagtattaaacatacactaattacaaaacccattccataagcttggactaattcgcgagacgaatcttttgagtctaattacgccatgattttgacaatgtgatgctacagtaaacttttgataattatggattaattaggcttaaaaaaatcgtctcgcgaattagctctcatttatgaaattagtttttttattagtctatgtttaatactctaaattagtgtccaaacatccgatgtgacatgggctaaaaagttttagccccatctaaacacccctaatgcaaaaggagagagtttctgtccaccagcacagagaaaactattcctgaagaaccaggacagaaaacccagaacacccatgtcttgtgtcttctctaccgctgcttccttgctgaaccgatagatgctgcccgtccatgccaaaacatctccctcccacaatctcccattaaagtccaattagaaattatgtatttggaagatgccatcctatttaatttagagttcattgtaatgataacaaaataataatactatataagacattttattagcaccacgtaaaaacattttctttagtttgtaaggtattccctcaatttcgtaatacagggcccgcctataattattcttttgcagttttttcaacatgtaatgccttataccaaagcttgttttaatgctatattatcaccattttatccctcaagtggtactactgttagttgttattgttgtggctaagcagtactactatagaaaagatagcaatgtcattttatccttttgtgttgtactgttgttagcttttaaaatttcttgatctatgtacccagctgatattgccatatattatgaaatggagggagtagaggatagaaacctagaacggtactttccattaattcagtctgttgctcttaagatgaaataaagttggtaataggcaaatagcaaaattagccaaaagcgcacatgatgaccttttaagaacatattccatgttctgcacattatgcacaagtcaaaatatgaagaataaacacatggaacaaatccttacaattgagacatctgatgaggtaacttgtcttgttcatgaaagccgacagtatcagccttgaccctaagcaaataccacacatcttaataaagttagcatgttgctgattcaaatcaatttaaaaagcatagcacgatattcaataatgaaaaggatgcttagtttgacagtaatatccacaatgttttcagcaggttatattatttgttcttttaccctaaaaagcatacagtttttttaataagttaaaagtattgtcctgacccctgatatatgagcacaattaatgcgagaaaaaaaacacttaagcctacagtaacaataagtcaacatgttagatgcagctcatggattggcaataccaaacaacaaagaatgcataattggactatgggagcagatgtaagcatgaataaaaatgagatgaatggtgcaggtgtacaatgcgcaattaccactgcaatctattctagcttagacatgggtacatgttaatctgttttggtatacaagcaagtgattgccaaagttaataaatgactggaatactcatgccgccataggagcaataaaaatgaggggacaagacatgacgcggtacattacttattgatgctctcttagataaatgcctgtgtaatgggactatgggagctggactaaactatcgggaacacgaggcaatcagtgtgacggttgtgagatacgaaggctgtgtttagatccaaacttacaacttttttcatcacatcaacttgtcatacacacaacttttcagtcacattgtaacaattttaacccaaactttcaactttggaaggaactaaacacagtcgaaacaatgaaggcaaaaccatgaaactaaaacatttagtatcctatatatctataattctatatatgaagttcatcctcactaactgtagttaatgttatttttctcatctctcattaagccacatcactttaattatttgtaatccttggatgattgatctatggtccaaattatctccctcattttctcctcttatgaaatcatatcacctcagttttgcctttagatgattaatctatattatctcccttatttcccttctctcattgagccacatcatcatagttttgcttttaaatgatcaatctatacataattcaaattgttataatcacatcatcttaactgtttattgtttttttttcaatagtcagtcaaagatgaaaattatataaagtcatctagctatcttacatgttatttctactattatcatacaaaattcccacaacaatgcgcagtagttattaataagatcatgccatcaagcacagcattttcgaaagtaaaaggcatagaaggtttcacacataaacaagattataacgcaagattgaaagcataggaaactgcaagcaacgttatcaaacatctaccacttccagcaggacaaaataaactaaggaagacatcatacatggttgaatcttcctcctttgactggcagatttctgcaggtggttgggatggtgtggtatcagcaccagagtcagacatttgttccactcgactgaacaaattttttaagaatgcatggtactagcaagcaaatttttttaattaaaaaaatgcgatatttttttattaaccaatatataaataattgatatagtgtactatgcagattgaaaagatactagttagtataactagagaaggcgattggatatactaattaacatagctattgtgaggtagaaatagtcatgagagccgattgctcatctggtgccttggtagaagaaactaagattatgcagaagtgtcctcaacatgcaagatttgcaagcgcagcagcgatgtgattgtagcccgtcgtacctctggttgtctaagcgccgcggcctcctccgatcctcctcatcatcagaaggtcgcaattgaatcagtggctccagaaccggagaagcgctcttccgggttctgctcggtggatggagctcctcggcttcgcgccgccggagaatgcgtatcatgctcgagacctctgttcttgggaagcggtgtgggcgtcggatttcttggtccaacatcggccgccgcgcccgtggatttgggggagaagggctcctgcgccaactgggctcggcatcatcgccggcgtccatggagtggaggggtgtccgacttgcgagaggtgagtagggctagcgttggcaattcgatcaagaggatggggagcttagtgccgtcggaaagggtttttggacacgaataaaaaaacttatttcatagctcgcctggaaaccgcaagactaatcttgtaaaaaaaactaattagccagattatctcgtgtaatcgaatgtacatgtgaacgtgagaacgtctatgtaatcgaatcgaatccaggatctgcttggaggagcttttgtggcaactatagcttttgctagtatcagaagcatctcagatagtttagaagctatatagttataaaagaaaataaataaaactaaaaatcttaagctctccaaacatgacctcgatccgtgtaggattccgcatccaactcccactattttaaacaaccggaaaaaaaagtacttcatttatctttacctatctatatatctatacctcccacaatgttagatttatacttcaagaatcagcgtcacagaaaaacacagagtaacaccagaaaaattaatagtaggacacttagctccacggagattactaacagacggaccatactgagaatactgttattgtttcacaacgtaagcttaaacgtgcaatgagcaaatacccttatatatacgactttgcaactggcatagcacatatctacagattttagagagctaatcgaaccagctttgtcgataagataatatagctaagtgacactaaatatgaaaccctgcccagtcaaagcctcagacctttgtgccatcaacatcagaagcaaaaacctggccataatcgcccttgtcatcctcatccagatagtcagaccttgcattgagagctagcatctggcaaacaagccagaagagagcagcatcaagggccaggaaagcggctcctccaaagaggccagtcttcgcagtagggcactgggtatccaggtcatggtggatgttgttgcttcggtgaagaccctcggtgaccgttgcccagagcaacattgcaaacgccagagctgagacaagcctgatttcacaagaatagatgatgaaaatgtatcaatggagttagcaggaaaacaaaatgcaatgtcgagattctcaaatatcagcagaattaagctagtcccactaaaaattttgaatacaggtaattcttttgatctgaaaaaaaaatgtgtcattggcacagcttagcattaatctatggaactgtacacgactaatagaactactaacacctttagggtccatctaaggcaatgattccacaaaacaaatatgtattttttttattaattaataattttgtagctaatcataatcaaatgaaggctcgatgaggtggatccgcatcaatgccagatactactgcttcaaatgcacatgaaattgttagctgcagatctgagaatcacttactcagcaataacgaagaacgcagataagctggcgcttcgaaataatgctccgcgaggaacagacttgctcttgtatggatagaagatagcggcatgccctacgatggtggttaacacaagtgacaccacggagaggcttcccattgcaatagttgggtcacttgggaacttgcagatgacaacatcctttcctttgataggagttccataaggaggctgcatcaaagaccaaataaaattcacaacaagtaacaattttcaaaagttcataaagagtggcagttgatgaaagatatagcgcagcagaagatgtgttactaccctgcactacagttaaagtgtatcgggaaattgcaccaagtggtcatcatagtgtctattgacaaaaccacagataagccttccataataattattattatttcttaaacggtactagtagaaacctttcaaagatgtgtacaagacaaaacatcattaacaggaacgagtattttagtcagtgaagtgatgcaccttcttgttttctgcgatgacaccaagtaagaaggagagaaggccaaagaaagagacagtgagagcaatccgttgagccgaagtgagagccatcgcacctgcatatgccaatttgagatcagacaaaatcagtaacacaaaaatggagttttaacagcatggcatcgagtaatttaatttcttcgcacgacaatgacacatctcgatccaggcaagcgaagctatcacaattcaaaagactaaaacaacatatttaatttttcaaaagtccccttgcgtcctcccattcgcttcatctactgacgcacgcaatcttaacaatccctctcaatcaggacgacacctcttctcctagcccgaattgggagggaatggagttagatcgaactcccaatccatcgcatcggccgatctattcctcctagcccactcccctaccagcatcaccccaccaccaccagccaagacccaacaagttcactaaaacagtggggattttccctcccggtggtgacgacagatcgtcaccaaactgagcacgacgaatctggggaaggggacgatggaggaggagagagattaccaaccaacaacggcagcagcaaggcgaggcgggcggaggagcaggaaaccctaggaggaggaggggatcgagcagatgggaaatcgcgtgctccactggaatcccttcttctctccgcgagctcggcgaaaggtagttaagttggtcaactcaactcctaactaaccgataggcttccccgatttatacggaagagatggtggttgggcctagtgggcccaaactaataacaacctgggcctagttgactaaagtgggcttgtaaggcccacaaccatagtaacagaaattgcatcgtccaaaaaggtctagaatatgcctcgtcacgcaataataacagctctaatcgcgaaaagatttgagcagccaatctatatctacatacaagctaattgttgacagttttgcttagtagtagttgcatggaaattgcaagtcgctgagaattctcaaggagcagttgatcgaatggatattatgccttcgaacgacatgatcgaagggttggtagagatgcaacggggttcggagttttaaactgctgacgttttgagacactcaatctgcaccgcgcagctttgatcgaacggttggtagagacccggtcgggttcggaaaaaaaggattgattaccagaccacttcagtcttcagataaaactccctcaatccaagatcaatacaccaccttcaacattgctggtttggtttcaggatttcatttacatgaaaagatgacagtgtaacacatactgcagagatatgttgcatctcatctcgtctgatctgatcaagacgatcacaagttcaccacgagatcgagagactaaccgaaaaaagaaaaaagaagaagacttcattgagccgtctcctgctcctcgcactctcctccctcctcgagctccatctggtgacacagacaacgcatgcaatccctttgggtcgccgaggatctgagaattttctgtcagctgcaagctgaagtcaatctgccacttcatttttcaaaatttcaggattaaaagagaaatgattgttagtcgtggacagcagctgcagaagtgccaattattctattcttcctttttttttaatttcctttttaagacagatggaattcagcggaggggatgatgtgcaaatttcagtaaaacagctgatcatctgggaggccgacgaggatcgtttgagggtaactagcatgtaatcaggacgtaacttgtacaattctatcatacatatgtggcttgcgggtttgatccccgcaaaaacatgtgtgaagttttcctctccctctcatgcacgaatttataagcacatctaacggggtttttttttataaaactggcgaatgttctacagcaattccgaagattttaatgacaataaaacaaatcaacaaaataatgatattacctttccttgagaaaaccatgagaaactttagttttttgttaatagaacttttgttggatccccgcttctgacatattcccaattgcataagttcatggaaaaaacaatctgactaaatggggaaaaaatgcacagccatgttactagcaaaagggaaaatcagggagttaattttaactccgctgggaacaatgacagccatgtgtgatcatcaacgtgataggtaacgattggagttagaaaagagtaccgtagattagtaatacctccgtcccaaaataagtacagccatagatatccgtgtccaacgtttgaccgtccgttttatttaaaaaatttgtgaaaaatttaaaaatatttagtcacacataaagtattattcatgttttatcatctaatagcaataaaaatactaatcataaaaaaatttaaataagacgaacggtcaaacgttgaacgtgaatagtgtaaaactacacttattttgggacggagagagtactaggttagccttgtgaatatgtatgcctaggaagaggacatgtcaaatcagaaaatcatcttcttgtacttctactactactacagtactacaatctacaccaaacaaaagaatttctaactaaattcgtcgtaattaagcaaaagttccggattgctactctagtttgagtgagtaggatcatgtgggtttaattatttttaattgcatttgtattattgtatatatcacttgtttttgcttttaagtgtcactattatacgtgaactgtttttatactttttatgccaccgcataagcgtaatatacacacaacacttcagcacaggtcatatgaaagagagcaaatcaagtagagttaattacgcgatatataaattaattagcacatgagcctgatctcgaatcctcgtcgaatctagggcagagtgggcaaatcattatgttacttaggtgctacaacattcttctcttttgctacctagcttgaaatgaaagaaggccagtgaagaaaaggtgttaggagtatcttgtttaattagttcctaagtacaaggttcacaggctgataggaatacaaaattagtatagtaatagtatacattattattttcgccttgtcattgatcccgaatcctggttagaatctcaatcttatgggctcaactattatcaaacttaagctacacctgacaacctttttccacaagaactaaacaaaaagttcgatttgcatctctcgctgttgttcgagtctggagacgggtgcacgcgtttatgaattcatcgtgccttatcttgataaaggggaagtgcttcacgtaatcacgttttagttttgtttatatcttgaggacagaggaaaaggatggctagaaaatcacaccgagagatgtttacggtttacccactagaactttggcaatttctttggatgagcatgaatttcagttcaattttctcaccattgaaggccatgcacaaatacacacacaataaagacacacaggaggtgggaaatcaaacataagtgctatacaatgcttaaggcctactttggaaccaaggaattttatggaaaattttcgtatgtagtcctttgaattatagggatatattccaaaaaatcgtataggatttctttgagtcctccgctttttaccagacaatcaatcaaagttaatgtttttcattttctttcagaagtccaaggtaaatatttctttatctatcctcttttatgtattctaataaagtgtgtaatttagaattcctatgattttctatcctaggccccctttgattcaaaggaaattcataggaattttagaggattttattcctataggaatttttcctacaaagccctttgaatcaaaggaataaaccttatggaatcctatgaaattccaatggaatgtctctttccatacaagttttggaggaattttaacaagaggtagaacctaatggaaaaaatcctttgagtcttttatctctcttcaaattcctgtgtttttcctgtggtccaatcaaacgatcattcctatgtttttcctgtgttttgcaatcctctgttttacacttacatttctgtcagaatcctatgtttttcctattcctctattttttcattcatgtgattcaaaggggccctaaattcacatgtttctatttcctgtaggattgagctaaccatgacactctatttcctgcatttccatattcttgtttctttttcaatccaacaatcccaaaggaacctaaaccagaatcttttttgaaacaaacaatgcttaaacgagaatcaaaccataaccaaattgagaagggcacccatcctaactactcttattaaactcagggtttatttgggagcttaaaattccgagaagcaactggttggtagctagcttctgagaatctgaagaagaagaagctgagaagattctaagaagcaactggttggtatttagcttctgagaatttaaagaagttgaggcttctagtccattttttgaattctacaatacaaattcttaaaatctggacgaaaagttatattgtttgggtgaagttctgatcctggcagaagctgtaggtaccagaaactctcgttcaagctcttagattcttactctctccgtcccaaaatatagcgatctaagatgtgatgagacccatcctaggactatgaacctggacataaggtatattgtaggatgggtatcctaggttgctatattttgggacctattataggttgctatattttgagaggtagtattaaactcaaggagataaatggggcaggtaaagaaatgggtttttgcacagcatgtgggagtgaggcacaaccaactgcacagtgcacacatacctatggccccattgggttaagagctgagctcgctctcactgttcaaagtttttagagctccctttcggaccaaagccaaaggctggtcaaacaagctacaattgccacccttgtgactgaatgaatgccatcatctcttctgcactgccttctctctgtaattaccaccatagagtatagtagtaagccactgtaagagcagatacaatagcaagctataagccagttataaccatatatcgagaagaaaagagaagagagagaagaaaacgggatacagatttatagccagctgtaacacaaactctaagacgttatgtgtgtatgaaaggtatgaccgggtattaatgatgtatatttttatagttaactattatatgaataggctattagattagctatagataatttggagccagtagttggctatactattaaatttgctctaacaacaactactagctggagttgtactagggtagtagtaagagccaatcatcttcttgagtgagataaagagagagaggggaaaaaaaggagagcagatgatcatatctgtccagcattttatgtggtgattaaaaagaagggaaatgctgagcctatcaatgatgctggcttggttggtgtgttggtaggctttggaaaagagaagcttattggagtattactagtattttttttagaagcaaaagagggagattatatattactgtacccaatggggttgggtgtgagtgttactgctggtcagttactacttccacagccattgaagtcttttgttgactgcttttatcctgcatcgttagctttgcttgttgctccggcctacgagcactctactccttttcttttttctttattttaattttttttctttggggtttgcagaacagaacggaaaccaaacctgcgttgaattgaatggcgacgttccaaggcgttgttgcgtttgtgtctggattctgcagagcggatatgacttttcagctggaacattttacttcttcccctgcttctgcttcctgcatgcatgagcaaaagattctgaaatctgaacaaccaagttactactgtacttatgttagttcaaatcagagaatttcattctatatatggagtttatcctgaagctgaaacgctgaatatgaaatgaacctccttgttatcctg

SEQ ID NO: 6459 - DNA, 91105 bp, Oryza sativa
ttctgattgatatatttgatcttttatctaatgctagcaagccaagtgttcctgataatactggttagtgtacatttaatctcttaattactgtcatcttcattagtgttcctgataatacttgcttattattgtcatcttcaatattttcaagtccattaaattaatttattttttcttacacattttgaagattttaatccttctgaagatgacaagaataagttgaatgatggcagcataataaatgaagctaacatttgtgaaaccccaaaggtaattatatattttttcattttctatattctgttttttcaattttcatcatttaaaatttgacctaaaacttttatgtacagatccattccacttgtgatgacaatgcaattctaaatgaacagtccccaatgctgtgcaaagatactaaaactcccgaaagatcatgttctgaaaaggtatctaaatagaaatactttgcaatgaactacaattttaatcctaattttccagtttattaacatttcattaatatgaaattttaaattccaaatttgtaggataaaaattctgatgttgatggtataatgagaaagctttgtaagcctggtatgtcttttcccttttcaattatgattatttctttgttatttttttgatagtaattctgctttttgattcatatctgtttcttaagaaaaaaatttatattactgatttaattttttatgcaggaatgatttctagtcctccaaagataactaaagcaagatttgttggtttcaatgaaagaaaacccatctattttgatcatgagaagccacagtttcaaatctgggattcagatgatgataacattaatcaagaagataatttgaggtctgaagtaacaccaagacatggactcaaatcaagcaaaattgttcctgattcttactccccagcatgccctactgaattgaacaaaaccaaggttagttctctcattctttgaattgtggtctgacatcaaaactttgtttgtttatatgatatatgtggtcttagatatgttctaaaattgattggccaaaattcaattctgatcttgaggtcttaactagaaatactttgcagtaaacaacaaattcatatttgattatttatatatttttttgtcatcctcatgagttatattcacattccctgttactgagatttctattataactcactttgtttgaaattttcactttctattaacaaaatataactattataagtttttactatgatactaactgtattgacatgtcacagttttcattgaactttataatcaaattcagatagcaaacatgtcacatggtataatttattctgatctttttttgtctttacaatttgccatatagtgcaaatctatttaatcatcttgttgtactattacagattattccattggacctgtcacaaaatttatatgatttatctcaaaaccaagaaaacaattcagaaaacgaggtaaattttaaaattgtactcaaataatttttcattcctttttaaaatttttatttttgctttttaacttcacaggaccagttgataatggtaactttggaagattcagaaacacaatctcaacacaatgaaaaggaaaatttgcctgttcaacaacagtacactaagacaacagaaaacaaaaaggtatgcatgtcatggttaaaaaaatttattatatgtttatgatatgcaatttttgtttgtttaatttataaatctaaatttattaatatttaatatctgttttctcaattatttttttcttttaggattcacctgaagtagtttttcttggggaaaggcaatcgacagaaaattgtcttgatatcacatcaaagactaatgtattgtacaacaaaatcaacactttcatagtcaatccagataagaaattgaagatgtgcactgccagtccagaaagggttcttttatgcaatgttgacagaaatgttggacagtgtagttccagtcaaaaacctcagcatgatctcaggagaattctacaaccagcaagatattctactgatccatatagtcctgagaagcaatctttttgtgtcacagcttatgatagacaactatataatgctgtttgcaagataagcaaaagttcatttcaagagtaagtatttcatcttataaattaataatatgtaatagattatttaaaattgatcgtacaatgtttaacgatttttttctttttgacaatgcagtaaggttgttgttgacattgacggtgtgcactgcaaattttttacttttggtgattctttcaagcctggtggtgaactctcaaattttgtaacgtcagttttctgtcgtacatgtttcgactatcccatccctcaaaatccaaaaaaattacttcttctcatcaattggcgtaagttaaagatttctcaataaattttaacatatgccaatatcttttttgtaacttgatattctgttagtttttgaaatattaagttcatagccatagctgttgtttcataggttcacagtttttctgtttttctaatgttaggatgatcttcttaaggaacgctctgcaactaacttctctgttgttaaaaagtgttttgatggagcatcccttgcaagacctgttcacagctgtgacttggttagtattttttaatctaaattaaattttttataatattcaatcttgtcattatttttttctttttcagcttttttttccaattgtcaagaatcggcactggtttgtgtttgcaattgatctgaaagctcagaggtttgtttttttggattcaatgtatgatgaggacagtatatatcatcaacagattaggccaaaactggtatgataagttatagttatttaagttcttatgattttgcttatctttttttttgaattttttccattctcatatgttttatttacatacaaatttgtaattattacttgaaattgattgttcgtagatatcaaactttagtcttgcctggaacctttatgtcaaagatcatccaatagatttcaacaactacacagtcatttatcctccagtgcccaagcaaacaaacaggtataaactcatcttaaaaagtctcatttacatatttctattactgaaattacagtattcttttcatgtaattttaattcaaaataactgtaatttcattttaagtttaattttgtccaaaatacatgtcttcacatgttgtttagcacaaattaagatttggcaagtaaagactagattcatttttataatagaatgtgtatcagctggtcattggattttgattcttctgatttatgtcatctaaaatgtcaattacatgatttttgtattgatattacagtttttttctatatatttatgattcaaactcactgtaatttttttaattgttctgatatccttacaattagatgctaacatgttctacaatgatctccaatacggaatacaatgggtaaaaatgtaatttggttgtttttgtgatgtgtcaacttaccaaaattcatttattttgtagaacaaatttaatactagtggctcattaacagagtttgaatgattgttgtttagtatagggaattgtttacctcctagttcactgacctttcagcatatggctgacctgcatgttagtttacatatacttgctttatgggctttcattgcttattttctgagattaattgataatgattatgactcttctgatttatgccatcttgaatgccatttacatatttttactattgatattacagtgtttttctttataattattgttctaattcattgtaaatttaatatgtcactgcactattatgaattatgagttgtctattttcattttatgaaatcaatgacattgaagaaaaaatatgtactgaaattttcagatatcttttgtttggtatttttcaactgccattgattgatatgatttttatgaattgtaaaatttttgatgtcagacatcatttgagatgttttatgattttattttcttttttttgtagatttgactatggtatttttactctcaagttcacggaggtttggggccctagagtgctgcttccaaatatcttttcgcaaagagatattcctaatatcagaatacagttactcaacaaaatgttgtttcacccacacaattcaattctttgttcagacctttacaaactactggatgatcacttctgaaggtaacaactttcagtgaacaaatagctaattcaaaattgataactttttaaaatttaattaaatttgagatttttttttgtaggtgtgctgaagatctgattcaacaggacaacaaatttgtctttacatgcaagcaatagagtatagcagtgcaggatatcaattctcataaaactgtaactagaatatatttgtctagacaatttttttttgtaatctcagtactgatactagactatagcggtatatgatatatagtactgtaactagaatatagcagtacatgatataattttcagcacaaattcatggtggtgaaatatacaagttctgatatttgtgctgtcagcactacataaattctgtttgttctagttttcatcttctactcttttcttttcatcacacatcacttgcttgtgttgatttctgatttcttcttgacccttttgctcaactgttgtacttcgtcttgatgacttttgcttatttctgtattctcctttttgtttggttttcttttctttgaagtagcttccttcttctcttcttctccactctgtaaatgagccaaaaattaatcactcataatatcttaaaatatgaaaaacagaattcatttgtttttgcagattaccttttgtggtttacttggaatttttcttttccttttccttgccaaatcaaactcaatatgcttgaagggacatgttggaaaagtatgttctgtcctaccgcagtgactgcagtgatttgtttctttgtcctctatttgctctctaattgttttatatctttgcttaggcctcccttttgaatttgctatatctggatcttcaatgtaatcttcttcatttctgatatctccatgaatgtgtgtgttttctgatttttcattcacttctgctgttggactaaaactattgttctcttcatgtccctgttgtttatctgctccttcaaattcatgagagaacatagtattcaacttttcatcaatcttttctgattcttccatcaagaatttgtatgcttcaactgttttcgcaccttttgatgcaatttcagcaaatttccttgacaggatattaaatctgagaactgatgattctgaaacaggtatgatttccttccctataattatttctgttgatttatgattctttctccatctatgcatgatatatttctccggtatttctttgatgctaaggtgaagcataatcttcaatatatgagagcatagtatgccatctttctggaacattgcacaaatacatgtgtattcttctgtatccaagtccatcatcacaaggtattttctctttctgatttgcttgctgatcacattttctgcctcaaacactgcataacacttgaactttttaatctcttcaacttgtaattctaatgtcttcctgagctgagcctgaaatcttttgaatattttgttgttatataatttcactgcttggtactcaatggagtagtttgaccaaaaactagtcggcctttttgttcttgattcatgatcgtcatgctattctaaattttgaatagtgtccataaccctttcatattctgtcaagaaacttctgatgctatattgggggccaacatttttcttgaatctcgagttagttccttcacttaatgctgttgattgaatgaaaggacagaaatctgttttgaaatatactggaataaacctttttctgatatgccacatgtgtgctagaaaatttatctcttgcagattgaattcttgaatcatatcctgccaaagaacctcaaattcctcttcagtcaaacagttatgtatgatatcactgtatattgcataaagaccttgattctttttgaataaggatctagatcttttcaaagcttttgaaattatatggaaaaaacaatttcgatgcttagcttctctgaaaatatttttgatagctgctctcatagcaccatcttggtctgtaattattgtctttggttgcttcccattcatacatttcagaaatgttgtgaacaaccattcaaaagtctctgttgtctcatcatgtaaaaatgcacaaccaaacaatatcgtatttccatgaccagaaactcccacaaaaggtgcaaatggtaggttatatctgttggtcaaaaaagtagtgtcaaaacttatacaatcaccaaatttgtgataccaatctctggatctaccatctgtccaaaagaaatttctcactttcctattttcatccaaatcaaattcataaaagaaatttggatctttttcttgttttttcttcagatatgtcaaacactgcatcatatcattgctgcttgtttctctgttgatttctgttctgacattgctgatatccttcttagtgtaaggtaatgaagttaaaccacctctaagaactgacagaataactatcatgttccttgtgggaatgtgacattctttcaaagttcgaataagcacccgctcttctgttgataaatacttgtgtgaccttagaaatctgactttgtttggagggctcagctcatgattatgatccaaatctaaccttgttataatccattccaaatttctttctgagattaccataacacatttgcactctgttccaataacttcatttgtttttctctctccagtagcagtctcatctactgtttctggctttgtattgcaatctgctttgacatatttgtagcacttgaatgttactctaataacttctctatttcttttcttacttgtagttctagcactatgaacattgacaattgaaaatccagccatgtatgcatagaagttgaaatagttatgtgcctcaataattgatttgaacttctgatctaattcaggtatgtactttctatctatgattgcgttattccctttcaatgcttcttgttgttcttcttctaaaaattgttcaatgtcttcctcagttagcaattcatcattcataacatcatcatcaacaccattaccactgatgttaccaatatcacttgattgttctaaaattggttcctatcacaagatttaaacaaaatataaaacttttttcacatttatttagaataatgttttacttttcattttatagaaaaacttatatttgtaagaagttcatacctgaactgattcttgcaaattgaaaatatctagtgaccatgcatgttgtgactgattgtcaacattgctgtaaccaatttcacttgtttgctctaaacttttatcctgtgaaaaaacaaaatgcaaaaaaataaataaataaaaggtttctcattttttaaatttaatagacaaaagttttagtattttttttaaaaatattatacaacaattacatacctgcacagattcttgcaaatttaaaatatccatcaagcatctttgttctgattgatattcaacgtgtgaattcaaactttcgtcaaccttttgataatcttgtccaattccagtctctattgtatcatttttttgttccttcaaccttaattaaacagtttttgaaagattttcaaaaaatatacttaattgaacacataaatacataaatgaacaacaaatcagtacttttgttttcaaaaaaaaatttaccttcaattcattgcaacgttttggttgtgatgaaataatatgttccattagactagtgtatgatataaatgaatcctatttgataaaaaaaacaaaaaatcaatgtagtcttgattgtcaaagaaaataaaagaaattatatcaaacttaaggttgtcaaagtaaaaatacttactgcaatgtagtcttggtccaacagagatagaacattgttttcataatcaacctttgcattgttagctccattttctgcagaaattttgaaaattctaatcataaaagaaattatatgaaagaaatagtgctattctacaattcttgttacctgaattaatttcttgcatattcatacaaatatgattgaatatgaaagaaatatgattgaattttttcaacttgttacctgaattaatttcttgcatattcatacaacttatagttcctttgtcattgttttctataatacctgcaatatttgataccagtattataggttagtgtaacttttaattaatcaaaaaaattctcttaaaaataatataaatattactgcaaattttttacttttctctgattcattcaaagcactacatccaatgtctgcttctgaatttttggtcttgtcaagtttagcttctgtttctgagaagtctttactgttacctgaaaataaatatgaggaaaatatctatttttttttgttttactattactcatacctgcaatttgcttcataatttttcccttacctgtttttgtaatgtccatgttttcttgcactctataagatagtgttgtattgtaattctcctcaagcaatgctaaacctgttttcaatcatataaactattaaatttgtttcacaaaataattaatgcagtatgaaagttgtcaaacaattttatacatttatttatatttacatgtctgatttgttgtgttcttcttctcaatcttacttcctatatctgacaagtgccccttgttccctgtttttttaaaaaaaattgttgtcaatccatagttgtataacatttacaattttgatgaaaatatgattgagtgcttgtaacatattcattaattacctgattttatgttgtctctgttttcttgcattttatatgattgagttgtgttgtaattcttctctaggaatgctagacctgtttaaaatgaaagactcacatttgttagaatccagttaaactctttctatgaattttttttctaaaaaaataatttgaatttaatggacttctttttgtatacctgaatttgactgaaccaaagcagtacaagttccatcttcgaaaattcctgcaaaagattataaaacaaattacaagcataattttttacttttaattattcttctaattattcttataattacctggtaattgcttcattgtcttaaatctctgtgcttttttgtcggtatctgtttcaaaacctttcgaaaccaaaattttttattttttgatcaagattagtgaaaaaaaagtacttaatatgaaatttacatagcaatacacttacctctcgatgtctttacttcttgtaattgcttttcatcagccttctttagatcatttgatattttcaaaatcttctcttctgttcctgaagatagaagcattcctcttcatgaatttttttttttggccagatgatgataaatattttttttgattaagcaaatcaattttctgtacgtcatcaggcaagaaaattaatcatgctaagttaaaagaatgattaaaattcttgtcctgatgatgtgcagagaattgaggtgtttttttacttatctgatggccacatttgtttttatgtcttttttttcatttttctaaatgaatcttttgtggttcaagtaatattagtatgaagttttggacttcttttgcaaacctgattttgaattaacagaatcagtactagttccagcttcaatttttcctgcaaaagtttataattaagatcagatacataatttttctctcgtcctattgtttaatttgataaatagataatattataaaatttagcataatatacctgctaattgcttcattatcttcagaccctgtgattttttgcctgaatctgtttcaatacaaaaaaagtaattttatagaagattagtgcaaaaaaaacagaactaaacatgaataatacagagtaatgcatttaccacttgatgttttccctgcttcgaattgcttttcatccgccgtctttaggacatttgatattttcaatttcttctcttttgagaagcattacccttaatgaatttttttttggccagatgatgataaatatttttttgattaagcaaatcaattttctgcacatcatcaggcaagaaaattaatcatgctaagttaaaataatgattaaaattcttgtccagatgatgtgcagagaattggggtgtttttttacttatctggtggccacttttgtatttatgtcttttttttgtaatgattttgattctcctgatctatatgatctacaatgtcagttacatgatttcaatattgaaaatacagtttttttctatgtaattatggtacaaattcactgtaatttttatatttcaaagtttttgtttgtctaagctttggtttgtaatggaattgtttgaatctggattgatatgtttttgaacattgaagtacataagctcattaacaacatgaatacaaaatgttgccagattgacaacaatttctggtggactgaattttttgatgtatttacttgttctgtttcttagtacaaaaggacatgaactacattgaatttcacttgttttaatttcagaatgaaatagtgggcaatgaattttttaaacaatgaaagtttgacatgaaatgctttagtgttctataatgaaattttgacatgacatgctttagtgttctgttcattcagattttttcagaggtgacaagtgtctgctattcagattttttcagagcaaatcttcttctatttgaatgacatgagctgcattagaataaactagttttaattacaaagtgaatttttactttttttgaatttatgtctaagctatgttatgaaatagattctttgaatctgaaatgattttgaacattggagtacatcatctcattataaacatgaatacaaaaatgtttgctagattgacaacaatttctggttgtaaaatgttttttacatgatttcaatattgaaattacagttttttccatgtaattatggttcaaattcattgtaatttttatatttcatagttttagttaagtctaaactatgttatgaaatggagtgctttataaggtgtagttatgtcatgtatcttgtttgatgatttgaaagtgtttatgtttttcaaattttttacaaaaaggcatataaagtgtgatcttgttcaattagacaatctgatttctagattttcagcagatcctgtttttattcttgttcatccagagaatcttttttgttcaaacatgatttctgattctgttttatttgcattgtagtataaaatctgaatttcctacatcattcagaattttagttcctatttttagtgtactgtttattcagaattttcagaatgtacaagtctctgctgttaatatagaaattttcagaaggaacaagtatttgcttgttctgtttcttagtacaaaagaacatgaactacattaaatttcactagttttaatttcagaatgaaatagtaggcaatgaatattttaagcaatgaaagtttgacatgaaatgctttagtgttctgtaatgaaattttgacatgacatgctttagtgttttgttcattcagattttttcaaaggtggcatgttttctgtttcagagcaaatcttcttctgtttgaatgacatgaactgcattagaataaactagttttaattacaaactgaatagttcacactgaattttttacaatcatgtttattgctggtgaattttaattttctgaaagtttgagatgacttgctttcgtgacagtggagagaattacttgtgacagtgatttgagtttccttattcatgtaaaatttttgaatgagatgtgtttatgagttgcatgaatttgctgatgttctacccaagagattctgtttatcctcctaaaattgtaatgattctgtttatcctcctaaaattttctcttctgttctaatactgtgatgttcatttaacaggaatttagaagtttcgagagaggcactgtctacaatgtgtgaacatgtgtatattcagaagtcaatatatgtgaatatttgaatgtctcaaggaaaactctccaaaatttcatattcttcaaaagatcagagttaaagtttatctagaatggtcagaagaacaaaattcaagatcaagattcagatccagattcaaaacaacaagatatttcaaaggaggaatcaaaaggtgcacttacctgttgatttttcctgctcttcacctttttccttctccaaatcgctcaaacttgtgattcctttctgtgtgtactgtaaatttgcttctctatcgtcaattttctcgttaatctccatctttttttcttctgacttcagatctgtctctgtttgattccccctatgttgaatttgctttttgctttttatatccagatcacgtgacactttcttcttgggtgccaagttttctaattaagtaacctggcatgtgtcacgtgtattgtgctcatctatttgggctttttttgttgatttattacattgggcttgaattttagactttttttgtttgggcctccatttaatttggatcgagtcagctgggccaatatctggcccgatctgtgtttttttttattttttttccttctattttgatcaaaaaacgttgttcgttggatctggatcaaatggtcaaaatattcgacagatgggaaacatcaaaatctgtcgcatgatctgtagacactccctttttaatatgttgaaactacagccggtgtgatggcccatagacatgcaaagaagacaatggtggtaagtcctcaaacgtggtggtaagtaaaaaaaagaaaaaaaaatctgacctgaccaagagaaaaccagatatcaatcgtatccgcctgctcctgcatggacacgtaggcacacacagagactcacgcatgcatgtgccacgtcggatcccgccgcaacagagagacccacacggtctcttccatcgctcgccgtgcccgactccatctgcgtctctcgcgccgccgccgccataaaaccctccggcccaacccaaacccaacccaaccaccacccaaaaccccacgccgccacaccaccacaaccaccaccaccgtgcgccgcggccgcgcgcgcgctccggcgagcgagtcgccgacaccaccaccaccgccgccgccaatcacagattaattaattccgatggagtcgtcggagatggcggtgatcgagtacgtggtggcggagctgagggacgaggcggcgggggccggggcgcacgtggcggcgctggcggcgctctgcgacgtgctggcggtcgccgccgaccacctcttcgacgccctccccatcgccgagttcgtcgcccgcctcccgcgcctcctcgcctccggcgagggagacgtgccgctcttcgccgcgcgtgccatcgccgaggtatgcgagggcgtccggccctgggcgaccagcttcgccaggtacggcgccatcgaggcgctccgtgacaagctcctcgccatcgactgcatcgagctcgccgaagaggtaattaatcggtagtagtaatagttatattcatctttctgaattaattatatagctatacttataaaaccctcttatataaaccctagttttattaggttaaagtactgataataatactatggttaatatgtgtctgtttaaataaaatttaaaccatttatatgcattaaaaccctagctatgttaggttaaactgacaatattatggttaatatgcctataaggactacatccagcttgtcgaagaggtaaaatttgtacgtactagtagtaattgtattcatcttttcggaccaccttaattgtaaacctaaaacccctccttaaaacctgaaagccggcctaaaaccctagctatattaggttaaacttgataatacaaccgttaatatgtgattttttttctaccttttaaaaaaattaaatgtatttcaggtgtacgagacaatcttttttaataaaaaattacgacacccactaatacttactgtccttatatttatatttatataccaatgatatagattttacactataatttatccatatttttgtcggtaacataggttttacgtgcacgattaagttaattatacgttcgttcgtgtattgtgtaacataacacgtggtttcatcaagactgcattcttttttttttacaacgacatacattttttaaatctaaatctcctattgttgttccatcaatagtaagattaaattgagtacaattgtaagggtatatccttctcttttatggttggttggtgtggatgtggtgctaaaggagacggttgcttcgttttgtgtgtttatacagtgccttcgcgctctgggcgtcatatccatggagtgccccaaggagtgcctcagccacggcgtgccagccgccgtgctgcagttcttcgacttcttctcgatgcacaagcaggtgaagcctcctcatcctgatcagactatctctcatctcttgtggtttaatccttctttgcgctgctctgccgcctccgtgcttgacatgcttgcgcccacgctcaccacctgtttgtggaaatgcctcgcagaagctggtgctcaagatcgtcgccaacgtcttgggcgacttcagcgcgaaggatgcggccaaggccatggaggccgcgcccgttctgtgcaacctcctgcaatccactgacaagacggtacgcgtgtttaattttatgatggttatattatgagtttgtcttcttcttctctttcttggagagctactgtttctgactgatgggtttgttgaccgttctggatgtttagatactcgactccgccgtttcttgcttggttttggtctctgatggtgcttgcgacagtgcccaacacatggaaaagctttacgagcttaatgcagtccaagcgacgatgaggttgatggagaacgacgggtggaagagcctcagcgatgagactttatctgtatgttgcatgatactgcttcctcagccatcgtttttcttactctaaaattgactcaaaatgaaatattcttgttattccacattaccttataaacctgtagccttaaagatgtaactaattatcaactctttaagtattcgaaatcaggagactctttgattaccacctttataattcgcatgtgttttttcatgtttcatgaaaaggcgtcctttttatttagaagtcatttttacggcaaactatcttagatgtttatggctccctttagaaaatctaaatagtgtaagaagtatcgacaacacaggcacactatttagtaatccgcagcaaagcacatgtggtatgttagctgttaattcattcctatcttagttttagcaattgatcattcatgactgaattgacatgtgtgacagggcatccttggtcttctcaaagacctagcttctctctcagcaagggctgtaaagtctctttttgagttaaacatttgtgatttgctcaagcagatgataacatactacacctcgtcgcacagtgatcacaataaggtacatttttccctgtgtgtcttagcatcagaaattttgttgccatgttttcctatgatgacctaatacttgacacaaaagcagattaaaaattttagtgtaaattgttaaagtggcgtcacatgtttataccttaatgtatattttcaagagttagaaaaattggtagtacttctcatttgttttttttatacaattacaatgaatgtgtgtttatcagagtagagtagatatgtgaatgaactgtacaagtattccattgtacagtagtttttcgtaatatctatttacacaattcaattcaattcaaaactgcaggtgcagacgcttgtagagctcatttattatcttatgccacctcttgaaatgtgtgaccatcgtaccgaactaatcattgcaaagaagaatgtcatcacagaacaaagtggatacatccaacagcttgctagcatccttacttttataatacaggtaagaaaattctctccagtctccttgtaacacaggaagatagttctgcaactatcccttgatataacatatttcttcttgtaacgtaggttgcgaaatctgctgcactatcatcaatttgctacagttgtgttgttgtcatcagaaacattgttgaattaagcacaccttcttccttggtggaggtacagaagacagtaaacctgtcaaggtgaacttttcacacagttgaattttctcccaaaaatattttgaggggccttgaaacacgcttcctttatttaactaaccaacttgaatgatggtactgatatcttgcccttgtatcagcttacttgctggctggttggcccggaagaaccgccatatcatattccaaacgctcaacgtttcgaagacccttctgagaaaagaccagaaattcttctttgagaccttcatcagggagggtctaaagcatgcaattgatgcaatactaacacaggaaaaaggaaagagccgcttgccagaaagttgcctttgttttgatttagacttggagacctcgacagatgatgcatgcaggattaataatggtgctatcctgaaactagcggaggagataaagaaaaacttcttggtaaaggttgccaagtctcctcacaagtttgggtgtgcttttaaaagcataaaggaatttttttctcgtttgaattgtcatgccacggcacccccagctaaagatcaggatctctgcaagcagttgtctgatttttcaaggcaattattatcggatgaactgccaagtacttctacttttgagtttgtgcagagtggatctatcaaacatttggcaggttatctttccaatgggacatactttaattcaaatctcaggaattgccaggacttgataggggagcttaaggaggtgaaaatccggctgcagaagttcacgcacttggctctcagcgtggacaatgaaagctcggtgaagccacttgagattttggtggagaaactgatagatgcgttgcatgtgtggtatgacagtttccctgtaatcctggctgatgaacagtgcacacgtgagagcaccatgattcctctgagggattcaggaactgaggaaccaatgtcactatatataaaattttcgagatcagccagggaggaggagttggaggattatggtggagttctccctgttgatctttcttcgacacctgaatccattgaagaggtcctgttgcctgagatctgtaaaagaactggcaatgaaacttcatacaaggtattacacattacaccggcttgttcatattttctcaaacgtttactgcatgttttcacttttgtattcacacatatcatgaaccatcaagtgtaaattcagttttatttataacgtgttatttctatgattcaggaaaacactcaagaagcaaatgggagcagaaaatctgttgggctcagaaatggtattaaacctttctcctatgccgcttacctctaggatctagtgtacttctttacatgatgttacaaactgcaatgttgtttacttggtcaattatgatatcatgattttaagagaaacaaactaacgaatgttgattccccaggtgacgggcacaagttctcaagattgaaattctcttacaaaggaacacaactccagtcatctacaccactttttgagtcaatcctccgctcaatgcatgaaggagaaaccgatctccagattgacccatctttttgggataaagaacacaagatagtatacagaagaagaaacaaaagcaagaaaatatcttcccatagttcctacaatattcagttgtgccgtgtgcatgaaaaacttgaaatgtcattgcttaaggacccctttttctccaccatactcactggcaagcttcctggtgatctggatgaatctgatccatcatataacttcctgttcatgctgaaagtcctcgaagggctcaaccgtttttcatatcatctatcaatggatgataagttatgcaaatttgctgaaggctgcctccaagagtttgatgaccttaaggtggcaatttgtccaattccacgggatcagttcgtgagcagtctactgacaaataagttagagcagcaaatgcaagatagcttgtttggggatggcttgataccctcgtggtgtatctatttggttgaaacttgcccgttcttgttgtcattcgaagctcgatggaagtatttctgcctgacggcacatcactcattcatgacagatgaggctagcagttcaacagaaactaagaagtacagcgtaacacggagcaaaatccttgaagatgcttcatcgatgttgaacaaacatggatcagacaccaaattcattgaggtggaatttgatggagaggttgggaccggtcgaggcccaaccttcgaattctataccacagttagtcatgaactacagagagtgggtcttggaatgtggagaggagacgacaccagccaagaatgcgaagctggttttgtccatgccccttttggtctctttccacagccatggtcctcagcaaacacttcatctcaagggatcagtttgtccaatgtggtacaaaaattcaagcttcttgggcatcttgtagcaagagcagttttggatggaagggttctggatattcctctctcgaaagcattttacaagatcatgcttgagcaggtaacttttcagcaatcgtccaatgtcaatctcttccctcttctttgatcattcatgtcaccttttctctgatcatgcctgtttttgcttttaggaccttgatatttatgacattccatcatttgatcccaagttgggcaagactgttatggagtttcaagcacttgttaaaaggaagaagttcctggaggaaagggcatccaatccagcagctgatttgtcctataaaaacgtgcgattggaggatttatgtcttgactttacccttcctggaaatccggaatatgaacttgtccctggaggttcagagaagatggtgacacttgacaatttggaggagtatgtgtcttcaattgttgatgcaaccttgaaaagtgggatatccaatcaaatagaagctttcaaggctggaattaacaaggtttgtgaggaaaatattcagtagatctaatgtctttatttttttccaaataaagccaaaaaaatcactcctgatttatttcagcatcctgcaggtttttgctcttaagactcttcggttgttcagtgaggatgagatggagcgtatactatgtggcgaacaagattcttgggctgtatgcatcctttacaattccttttattttatacattcatttctgcaagagagtttcttgttagagtttctaactttcaatacttgcagtcgaacaaacttgaggatcacatcaattttgattatggatatgatgcgaacagtgcatcagtaattagtgtaagtacaacatataagcctatgcctcccacatattttatatcttaacttgtaatgaggaagtcaattggaaaaatcgttttcttttcagttcctggagatcttgcgggagtttggaagagaggaccagcgggcgttcttgcattttacgactggagctcctcagctcccacttggtggcctagcttcgctcgatcctaagctcaccgtagtgcgaaaggtttgcgtttatttttaactcataagagactatcctattaggtcccaagattaatatttcgatagaaacttaacttagtattattaattgtactcaacagcaatgtgatggcaaagtagacaacgaattaccgagtgtcaatacttgccggcatttcttcaagcttccaccgtactcctctaaggtaccataaaaacatgcactttcaacctagttcatgaatgatgcaaaactaaaaatgatttctcaattgccttcatttctgattgcaggagattatgagacagaagctcaaatatgctatcaaggagggtttaggctccttccaattatcatgataaaaggctgaaggtacaacttatagcagaacgatgtacaatacttcagatgatagatgttcattcacggctgatggcaatgatggaattgcactgactcactaatttgacttagattatctgatctggcgatgtttttacttggggaaatagttacttgagatgtaacaccaattttctcccctcctgctagattatgtatatagactacttcgattctttcattttatatgtctatatgatatgtatttacacccccaatctctggggactgtattgctgctctttgataatgaatatccaccatttttttaactctgaaactgatagtgattgactgtgttgatgtaatttacgatggattgaaatatgaatttcttgacaaatcgccagtctgtcgtgtaggttgggaactcatttctatgaacacatgaagaactattatgtctgtacttgtaacattgacagaaacatgcacgagcactatgctatattaatttcagataccaaattgaatatatatgatccgactgtcatagccaaacacaagacccaggagcattagtcactgaaaaacttgcgttacaaatccagatataatccagtgatcttgcatataatcaaaatccccatcccatttttcaagcagaaaatagaacaaaattcagaggttcagatgcttttacaaccattgttagcatctgctgatctgcaacacaagtcaaagcaacactctgcagatgactgtcaaaaaaaatggcacgttcatatccatcacaaccaaacagaagaattaatagcactcagtaactcagaaaattatgctacaatttccaaaacttaatccattgttgtcacatataatgaaaatcctcatcacatttttcaagcagataatagagtaccaacaaccagttgacatatcagagagagtaatccaaaatgtagatataaatatataatagaacatgaccatccaagatgtttttgcagccactggtaactcatctgcatcacttataatttaaataactgttgagcaagactgccaaaaagatgcaactagagagactagttcaacacatagcctactgaaatgatatagcttaatccactgcctcctcctatggattctgagtatcacctaataacatttcttgtttgtaatctgttcactgtctcctcatctactatgacctgcatcaagaacatgatactgataagcaaaacaagaacaaacaagctgcaactctgtcatggatcagatgatattgagagctacaatgccagggatcaccagaacaaacctgagtaagttgtttcatcaaactgaacagctcaaaagagcaggcgatccatggcagtgttcagtgagcactctggagaatcgatcggcgaagccgacatcgagtagttgagccggaagctgatgagagaagagctaagagcgttgatcttggttgtgcctgagaatgcagcctcagcatctgcacgcctcttgaacatcaccatggcatatgcattctctgtcttggcctccatgatcggcccaaacttgctgaagatgttgacaagttcacttagaggaagaacagcacttgggcagatgaaattcagcaccaatccagccagaaaaggatcttctctgatgtcactgttcttcttcttctcatctgcacttcttgtgcaccttcccattgtgagtgaaatcgccggaggaggaggaggcggcgcatcgccattggtggtggtggtggtggtgtcacggtggatcaccgccggtgaccgcgacatctgctgcgcggcgcggctcatgagcttgccgatctttgtggacatctgatgggacagtggctgtggcgttggctcgaaattctccagttccgatgcatcgtcatccacattgccagtgatcgtgttcttggttgctcttcctctcttgcggcgtggcgccatggcgttcgcctcgatgccgtggtgacacgtgtactccgggaggctcctcgcggcggcgcccctccaccggtcgaacgccttcagctgcgccgtggcgatggcgaggtcgagcctgtcggctccggcgagcggcgccaccgccagcgcggagacgtacccgacgaaggcctcgccgcggagcgcgccacgcgtgaacgccgcgtcgaccgtcgcgccgtgcgctccctcccggatgccggcgttctcgatcacctgcttcttggccacggcggcgccgtcgcagcagcagcagcacgagagccccgcggccacgcggcgcgcgacctcgcccagcgcggcgtccaccgaggcggtgagcgcgggcatggcgtgggcgctctggccggcgaggagcgcgaagtcgccgccgtcaccgcggaacgggaggagctcatccgcgtcgacccacgcgaacgtcttgtcccagaagaaggcgacgagggtggcgccgtgcttcctccgctcctccagcgcctgctccgacgcgtcagccgggtcgaacacctgcccgggccaccacgggtggcacctcaccttgccccacacaagccgcccgggcgcgaaccctcctcgccgcccgacctccccctcgtcctcgaaggcgcagtcgtacctcgcgcgctcgccgggcaccaccaccaccgccggccgtggcgtcgcacgcttcttcttctccctccgcaagcggcggaagttcaagaggaactccgccacgtcagggtgcacgacgcgaggccgccccgggcgcctcacggcgctcacctccccctcgccaccgttcttggccaccgcgccgtgcgccgccgcgcctttctccggcggcgccatggcgatcctccgccacctgtaaaagtaaaacaagcgccaaaaaccgatcagcaccatgtcctgtcgagaggacacgagagtgcgagagagacgtaccggagagtggtgttcttgctggggctggaggagatggccggagatatcgccggagttggagacggaggaggtgggagctcgccggagcagaggagggtttggcttggggtttactagtagtagcagaggtagaaggtgtaagtgtgtaatttcgaatgttttcgaggggttaagtgagaaatgttttttgtctggactttggactatgcagaacagaagtactcctggagtactacttctgtggatttgtcaattaggaccttgtatttcgcacaaaattatatttcttacaagaaattagtgttttgtatagactatatactatatagacagattgacacaagttaagtacacaaaaagaagagatgtaatctgattgtgcgttagttacaaccaaaaaaattcttgttgatatgcacaattgcctgtgtcatcaatttcatcatttaactatataagttctttctttgttttgttaatgtgtaaatagtttgaatatccttaatgctacaatattttttgacaacaaatgcaaatctgcacctgccttttctacacctgttctctgtataatgcacgctgataattggtatgcaggtaatgcagcttgtgcggtttataggtagtatcaaattaaatattctcttcgtttcatattactccgtataagatgctttgattcttttttatgtcaaatttttgtaagttttaccaacttttacagaaaaatgtactaactcttttaacaccagaaaaatatcgtggacagatgacgacggcgtcttttggcattgcgaccttcgtgagggcgtcgtttttttacagtctttgctccgtggtggtgttgtaagcccggtggcgaccggtctcgcatagcaacgactggttcagtgctcggcttccctctctatagtgtatgtctgggcggttggcacatggttcgggacgtgtgctctagtgcacatcctgaaaaacttttttataaccttttctttctatcttaataacattggatgacctccttcggttatcccgacaaattttattaaaccgaacattaaatatattttaatagtatgattatttggtgttgaaagtgttgttatggtttttttataaacttggtcaaacttaaaataaatttgattaagaaaaaaaattaaagtaacttgtaatatgaaacagggagtattatctaaaaaatatcaaatttcattggggatattgttgtaaatcacataaaggctctggattatttctgaaagcaaaaagagaagcaagaaagaaaagctgtgccatgggccatggagaagggaggctgaaaccgaaactgccatgtctgaaactctgctgctgctgcaaattctgcatagttggtggttggcaaaagattcacaccattctcccaatcccaattaacatacccttttccgtgatatatgtatcaggtttcatcaatgcatttacaagatataggtaagcaaatattcctacaaccttttgtgcttggaattcacaaacttctgtactttttacaggtgagttgaatgtccatagtgaaacataaaaactgatgatggtgtttctgaagtggagatgggatggtgaatgtattagcagaaagttgaaaaaaaaacttggagtttaactgtctaaatatttactttgaaaattgatggtcaaagattaaaatatttgacttgggataaacccataatgactagtaatttgaaatgaagaggatggaatttaattgtgccttaattaaaaccaaaaaaatcttcttgatgggcaccgctgcatgtccttaattttatcatatactagttatataagtgctttcttcatttttttaatgtataaatggttagaatatccttaataatgctacaatattttttttgacaacaaatgcaaacctgcctttcctacacttgttctctataattgacggtgataattgatagtatgcaggtaatgcaacttttactgtttttcgtacgtgctttaaaggtagtagtactatcaaatttcattgggggtaatgttgtgaatcacataaaggtactggactattctgaaaaaaaaagagaagcaagaaagaaaagcatataccatggggattggggaggttgaaaccgaaactgccatctctgaaactctgcaaatgctgcagatagacacacacacacacacacacacacaccgttggtggttggcaaaagattcacaccattatcccaatcccaattaccagcaacccttttccgtgattatctgtatcaggtttcatcaatgcatttacaagatataggtaagcaaatattcctccatttttttgtgcttggaattcacaaacttctgtacttactacaggtgagttgaatgatccatagtgaaacagaaactggctatgatccttctgaagtgagatgggaaggtgaatgcattagcagaaagttaaaaaaaaatcttggaatttaactgcctgaatatttactgtacttcttgaggggcatgaattgcattgcattgcttgtggttacagcagctggagttttctgtgtttcaagacaaggcaagaatggcatgcgtccaagagaactttcacccttttggccaaagcagcttttcaccactgcagagttgcaaaacatgtcttgtttttgttccaatggaacagcaaaattctgaattcagtgcttgggccgaattttgatcttcttcttccaggccgaattttgttttatcctattttgggccgaatttgggtcgattacgaggctggtgatgaaggccgtccgattctttggcccaaggaccaggctacaaattttgggccaaattgggatactgatccaatcttgggctgaatttggttaacgcatcattttgtctgacagtcatgtggtacaatgttattcacgacaaattttgaggtgcaagccctgatttcagttaatttttgtctcataaaatatcaatgtgcaggcccatcaataattcaattggtttatttgggcagtaataatcaagtcatcatgggctcatggctttgattgaacttgcagatgattttaattacatcgaagatgaactttgaattgcatgggcaaagtcttcatgcttcttctgcatgtctttctcctttctatatgttagtggagttcatgtttctgacttggtactcagattttaagtttttaaccttcacaaaccggtatgaaatacatactccatgcaaaagctcagtctcgtgttgctctttcattcacagaaccaattaatgagctcatactagaagaaaacagtgttccattttgtaataagtagcctttgcttttgagatgttctgatgaacgcataatgagccatgatttcagggcctttgtctgccatatctgaaccttcttctctttctttttatttcaatagaaaaaagtgaagttagtgatcagatacagaaaatgcatatagttaggtacagtagtaggggcaattagtaattactactcacccgtctcacaatataagggattttgagtttttgattgcaacgtttgaccactcgtcttatttaaattttttttgcaaatataaaaaacgaaaagttgtgcttaaagtactgtaaataataataaagtaagtcacaactaaaataaataatagtttcaactacgtactgcatcctatcctgtcacttgttcaaccagctgttcttaattccacacagcaatgagctgagtttaggaggtggtacctccattatgtagtccaaatcaagctatcagacaaacaccagcagctgacagtctatctacagtcagtactggcaatgccatgccttagctgctaattaacatagctcaccgagcaagatgtttagtgctaattaaactactagatccagtgtagttaatgtaatcaccccgtgcgcctgtacacttgtcatctctgtacctttatccaccttaatgaaatgaaatgaacagatgaacaatggtactgtatctactagctaagctagctttgctgccattttgctcaacagtacactactgcaccccaagagatgctcataatctagtttaagagataggattacatacaccataattaagttggagttgcttccaaaatttgttctgagagtttgtttctaaattgatgctacgaaattgtgcaggccacgcatgaaactaatgcaaccaaaaaaaaacactaagggctggcccactaagctagcttgatgctaaagatggattgggattaaggtgacattgctcggtgacattccacgtgacattgagtcactgacgtgtgggacccacgtgggtccaggcacatgtgggtcccacatgtcagtggctcaatgtcacgagaatgtcatgggagaatgtcactggatctgcgttcccattattcagataagtgaagcaagattaattgttaggtgcaggatcaattgtttttttcagatgcaagcaacacctgcgtgcctacaaagagattcaggtagtagtagtaccacatgtccacatagcatgatttttcaggcatgatgcaccacccttcagtcctatatagtctttgagctaatcatactcctttgcaaaattcctgattagtgactaaaagtatcttgattgtgaagctagcggttgcctgattgcagcctgcacactatctattactttctagaagggaatcaacacaaagcaagtagagcctctgtcaattagtgattttgcttagcatgctcgctgcattatagtagcacctaccagtctcttggattgactttcctcgagagtgaattttcagagttagtttaaaaagttcactcgctgcctcgctggtctcttgattaaaaattgtgttaaaaaatggaatatgatgaacaggtataatatgtctagtagactgaaggttgtacgtcttagggcaaagatctctctcatcttatttacatcctacctatatatgtgcacgcataattaatctcatagcaatgcaatgtcaaccaagctaagtagataggatgaatgccttcttgaaacatttcaacgagtttcatcgtttgatcttcaacttgttagtcgttattagggttcacagtcctgttactagacaaaaaatgctcacgagtgatttcttcggtttttacaaaaaccgtggtaaaccaacaaaaacgaacagtttcggtaaaaagaacatatttcagtttaattttttaaattaacttgattggaaaacagtttgtgctatcaagccggccttagaagtcttttttcctgttgggtttgttttccctggacatagccaaaattgaaattttaaatattaattttagagttcattttgatgttttcttcatcatggtttagttttcagcattggtttttaagtcgttaaaaacatatttatacaagttttactcttttttttcgctaataaacgtgcattttataattagctataggcaaatcgatggacaattaattactctttgcatgagctacatttcatcatatttatggccatgcccaatatctgttgttctctcaaaactttacatgttttgaatgtttttatttgctgttcataatcaacaacgtactaatccttcctatgtggttttattatttctgaaaaagtaacagttattttctttgttgcaggtgtatgcagtatgcgtcgctcttgtcttatttacatcctacctatttatttgctttctttcttattctaaaataatcaacagctatttagtttgctgttcataatcaacaactaaacggtcaattactgattactgtttatttgccttctttcttgttctataataagtatagcagattgaaggttgccttagggcagaggtcagtaggtcactatcgtcttatttgcatcctacctatatatgtgcacccataattgatgtcacagcaatgcagtgtcaagaagtgtcagctaagctaagtggatagggtgaatggtttgtccttgcaacatttcaacttaattactccttgcatcttaattaccagatatatactcatttcatcaaaaaaaatgtttcaagctaattgtcgtttaattttgttcaaagtttaatatatctaatttgactattatttttgagaaattcatataatttaacaacacgtcaattatatattttaaaacatttctccatttaatctcaacctacttcattaagtacctgtagctaacttaaaatatacttacattttaggaaaagggagtatcatataatcatattcaatatacctgttgttcctctcgatactctagcacctgttttgaatgtgtttacaattattgttcacaatcaaaactaatccttcccatgtgattctgatttgttttttctataagaatttctgctctactcaacacaagtaaagaagccgacgcaggagacaatcctaatcgagtgcttgcttaataacatatctaactgctagctctaaaaattaactatcatctacaactataacctaatcatatgctctattcgtcctaaaatataagcatttttttttgactttgacagtttttcaagatgcttctttgaccaacaatatctataaaagtaagatgttttaaataaaaagaattacttcctccgtttcacaatgtaagtcattctagcatttctcacattcatattgttgttaatgaatctagatagatatatatgtctagattcattagcatcaatatgaatatgagaaaatgctaaaatgacttacattgtgaaatggagggagtacatattatgatagtttgtttgatgatgaatctagtaacatcaattttacatgattaatctttttttttttttactattaaaagtcaaagttaaaaatatttaacttgtcactgtactaaaaatgcttatattttaaaacggagggagtaataattagatttagatatgtactaatacactattaatatctggctcacctatctctcgtatattttttttttgagctgagctatagttggctacaaattatttgtaataattaatctgtttttcttctatcttctctttaatcttcttcacatgcgtataaatatgatgtgaaaaattataaaacccgtttcttacgattatcttatgctaggattagtacactagtagtagtataatcacagctcgctaattacgatgcagtgatgcaatcaccccaagaaagaaaagaaggcaccaaaagcagaacaccccccaatccttctttttttttccctctcaaagtatgctggaattttttcacagtttcctcgcaataaattactggggtcagtggacgatgcctcccttcctttgactcaccagctcttgtcggggagccaaaccctctctgaccggacacctgacctcctcacgacaatgacatgtgggcctcacaccatcgtggcccccaccctgcagtgacatgtaaacccagaccaaccaaccggtcgccgaaagcccaccacacaccgttcctcctcgagaccagcaacactcggaaggagaggagagactgacaggtgggccatgcgccacgcacgtgccactgactcgtgggcccccacacgcgccccgggacacgtgcgcggcctcgtgcggcggagccacgcaaacggccatggctttggcacagcgaggcgcacaggcgcagcggccgcataaacgctagctcgtccactctcctctactagcagcagcagtagaagacaacacacacgcagcagcagctgcagcaaggcagtaggagaggagttggagggaggagagggagctccaagaatcaccagagagcgagcaagagagaggtgaggtgagaatggtgttgcttttgatttatatgccctgcttctgtttgcggaaatgcgtgtgtgcttgcagtattgtcttgtggggttgtttcttgggttctttgtatgtatggaccatggccattgttgttgtaggaggaggaagaaagggtgagagctctcatggttgctgggcttctccatgtccatggcgtgtttcaatagctagggataaagatcaagaaaggcttcttcttgctagctccttttgcattgcatcccttttgtttttcctgcactctttgtttcatgtctcgttgtttatttggtttgaggagtaagttcattcctttccttaaaaaaggttcattccttttgaatcctcttcttttctttcttctcattctcatcttgttcttgcaaaccgcaacctgagaaagagttagcaataaataccctttaatactgttaatagtagcactagaaatccggtgctttaatccgaaatacaatggcgttgccgttactgcaagaaatgcagataagtttcagtttttaaaacgtttaaagctcccatatttttagctgagagcatgaatcacgctgcttgcatctgtcaggtcctcccatcactccatctgcaatgaattttaatcctttggccgctcaggttcttgccacatgaatgcattgcttcactgaaccagctacaaacatgggcaaacacatttcaggatctagacccatggggatcacaaattcacaataatggcagaatggctttaccaccagcacacacacagggccttctctgtaactgtgcaagtttactgcagccttcttctcactttgaatttttgaccctccctttctttactttctgctatgtgctattgctccattccatgtaaggctgctattattattcccctcttgagagagaatgaccattctagcccatgctgttcatcttgatggtgttggatgaatcaagggcagtttggtattcctgcaattttttacatttgttgtgtgaatgggttcctgctgtgtttgccggattcctgctgccaaaggccattgggggtccttgtggttgtggctgtgggcaactaggtgcactgttacctctgcctgaggttacaggtgtgagaagaaatgtagtgcacattactttcctttcatctttcttggtctgtaaaaatttcaaattagtgggatcctatgccattttattaagtactggctttgctactccatagctttccaaactgttgtttgtttcttctaaaaaaatgcctatgctaataacctgtaccttttgatacggtaacagtacaatttcaccactgtactttgctttttcttgcatttaaagtttgcaatttgcaagtgaaatgtcaaccagataatcttgtgttggcgtacatgtttgagttgtaattaacttgcaactttgtttttttattacttacctcatgagttctttcttctttctttcttgcagaagtaaggtgagctcagaaggatttggtaagggatctcattatgcagacttcaaaaaccaggttagtttttttgtcctagaactttcatgtatcttgcctcttgctcttgttttcgcagcaggtatgcagttctgctcatgcatgtgcgtgtctgagacagtggttacaccatgaccagacagtactaagtagtatccaaggttgtgtgtattaaaatggatctgatgtagggggggccattgcagattgaattttccatgaattgttacttgccaaatataccataaatcttacaatgcactagtgtacttgatctttgctaagtattaggccttttcttttggaagatcattttttttcatcggtagcaacttagaacagtcaaaatgagaacattcctgtgcttatttactagtattaccttgcatgttgctggatcttgtacacaaccaagtgaaggttgcctactggtgaaatagtttttggatgtactactcttgattagtcttgtgtaagccaactgttttctcagattattgtactgctcctgttatcaatctcttcatcatctggcatgtgaactaatagatctgtatctaaaaaaatccgcactaatagatggtatttgaaaacattgtcttcaaagttggtatatcagtacactcggttgttcaacaacttcatgcttagtgtactgtttgcggttaattacagtacttacaatcattaaacttctgtttccctcaatacctctattgttgtttttttttttgcggggaatacctctattgttgttgttagtctgttgatcttcaagacaattagataacatgttttttggctattgatttgtgtaggaatgggccttcagatgccccacagaaggcttctccggcaacaccacggtcatctcgggtggcgaaaactggagggaatgaaactgactctgcagggatcacaccaacaagaaccactccagagaggagccctaaggtcaccgagcgtcggtcaccacgaagcccaattactgaggtgctgatatgttttgcaggcatcgcgtttacttcactacttggtggattcttagaagcatattttttttttaagaagtgcacctcaaattctcataagatgtttcaacaccaaaactctgcatatttcattattctgcaatggctttgggcaagcaagtgaacctttagcacaacatacattttgggactgcagatttatttatagaaatgatatgttcagacacaaattctgaatatttcattaacctgtaagcaagcaagtaatataatgatggtgattgacttcagaaaccatttagcacaggaaaaatacatgttcttttgtcatgtggttttctttatttgatttagtaagtgtaaattttcttaaatgggtattcgctgaacaatttgcaccctgttccagaagcgcccaagtaggctgtccgagttggagtccagggtcagccagctgcaagatgagctgaagaaggccaaggagcagctgagcttatcggagtcacgaagacgccacacacaacaggaagcagaggaagcaaaaaagcaggagcaggctgcaacctcaaagctcgaggacctacagcgccagcttgccgagttctcagctgcggaggagtcccgactccaggaactgcggaaggtctcacaggagcgtgaccgtgcttgggagtctgagctcgaggctgtgaagaagcagcagtcagtggattcagctgctctgagctcagccttgtctgaaattcagaggttgaagcagcagctgggggccaccacagagtctgatgcagctcgtgccaagcaatgcgagtttgcggagtctgagctcgagggcttgaagcaggagatggagctccggcttgcgaccatcgagggcctgaaggtaaacgttggcgagagcgacaaggctgtagctgaggcgaacgcggtggcagctgagaccaagaagcagcttgagatggcacaagctactattgactcgctgcttgctgagggtgcccggttgcaagaatgcctgaggtcgaaggacgcagagctcggccagtccatggctcgattagccacactggaggaagatctgaagaaggcacataacaaggatgatgttgatggcagctttggcagccctgatcatggtgaagctgtggagaaggtggtggtaactatccccaatggcaatggcagctgtggtggttctggcgcagagattgagcagctgcggacggcgctcgaggtggctgagattaggtaccaggaagaacaaactcgcacgacgatcgagacgaagaccgcctacgaaatgctggagaatgccaagtcagagtacgaccgcagagtgcgcgatcttgagctggagctgaagagcaagaacgatgagctcactgaagcgaaggccactttggctgtcaggtgtgacgggaagagcgatgtgatgcagccagagcttgaggcgaagctgatgaagtcgatcaccgatgcgacggagctgaaggcgagcctgatggacaaggagacggcgctgcagagcgtgatggaggagaacgagacgctcaagtcggaggcggggaagaaggcggcggaggtgcagcggaggtacgaggcggcggtggcggagctggagctggccaaggcggcggagcaggacgtccggatgcggctcgggtacgtgacggaggaggccgacaagagcagccggcgcgccgccagggcgtcggagcagctggacgcggcgcaggcggccagcgtcgagatggaggccgagctgcggcgcctccgggtgcagtctgaccagtggcgcaaggcggccgaggcagcggcggcggcgctgggaggaggcggtggcggcattggcaggaacgtggagcggacggggtctctggagccggcggagtacaccaactccatgatcggcgggaagctggcgagctcgccgttctccgacgagccggaggaggagtcgccgaagcggcgcaacagcggcgtgctccggcggatgagcgggctgtggaagaagagccccaagtgaccatcgacgccatggacagcttggtgtggtgtgtgtactagaaagaactgaaactgactagctaggctgagctgatctgatcacgccatggatgggtttagctgcaaacactgtgaatcaaagctagttaagttaattactactggttggttagttggttttgctgctgtggtcgcagtaaaaaaagaatgttaagaactcttgtaatgatgttggagatgaggagcatctacattttgggctgcatgctgtctttgacaagagtgatcttgtgttgttagctgatcaggcctgtatgcaatgcatgcttttgttgcttcatgttcaaatttctcgctgtctaaacaaaaaatatttaattttctcgcatggcagggcatagttccatttagaatggagacatctcgcatggccggcgcgcgcgcgtctcctctgcgtttttttttcgtttcttttttacctttttccccttttcctttcttttttctgattttttttatctttagcatcttttgagtttgaaagtttttaaattttgagttgaaaattaaaaatctgatcttaaaagttttcaaatctcgacttgaaagttttcaaatctaaaattgaaagttttcaactttttaaaatctgaagtttttaaagtttgagttgaaaattttcaaatcttgatttgaaatttttcgaatctcgagttgaaagttttcaaaattttcaaatctggatttgaaagttttcgaatctcgattctcgagttgaaagttttcgaatctgagttgaaagttttcaaatctcaagttaaaagtttttaattctgagttgaaagtttttaaaatttaactttaaaatttaaaacttaaatcgaaagttttcaaatctaacttaaaaaattttcaatctgtctaaaaaaaaaatctccaaaatttttcctaattactatcatcagtgttaagtatattaactaataaagaggagtcctaattactatcatcagtgttaagtatattaactaataaaaatgctcgccagctatttttctggcgcgcatgcgcgccctagcaacccccgcttgttgatgcatgcgtcagacaagcggcagttgaaatttttctgtagactgtgtttgtttggtgtttcatgggccggcccagcaactagtcgagcatagcttcgtttggggtcacatgtttatactaggactgctcatgaacacgataatcgatcgccaattacttcattgattaatccttttccccccgaagaatacttcattgattaatctcgcacaacatgatataatttgctgtgatcatacccacggaagaaagaaactgaatgtctgaatatacaaaccggagacatacatgaagatcatcatccattcagatcacacatgaatcatccatactcatcgatccatcagaaagtcagaattcagatcacacttttctgaatgctgacagaaactacagagatcgatgtctagtctaggcgactagctccactgatccaggcaagcaggaaccgaagaacatgccgtaagtagcagctagtacgacttacataatagaaaccaactaaactaaaccatgatactaacataatcgatcgatcagaacagatcactggtagtaactaactaattaagcaacaagcacataaacagcgtagatgatgccgggtaagtatcccaggatggtgagcagcagggcgatccagaactccatctgcagccagcaagaatgcatgaaaaatcaaatcaaatcaaacaaaacaagaatgaaggatgaactgcttacgccgatgccgtagcggaggaagacgccgagcggcggcagcaggatggccagcaagatctccaagaacgtctctgaacccatcacttacttcacttccttcagatatcgatcgattcttcttcagtgtagtattcaggtagctagctagctagctggtgctaagctgagaatgctatggtctcaagttgagtgtgtgtgtgaaatgtttagcaagtgcagaactcagctggaggacaactctagaacagatcgaggaagttgggccacgtggcacctcaaagcttccctggcatggcacgtagcctttggttcagggacacctgtcctgtcctgctgcctcgcttgcactagcaggctgctactcactccgttcccaagaaggtgaatctagaccttaatatgatacattctagtacaagtaatctgaataaaaatacgttcagattcgtagtactggaatgtgtcatattcagtggttggttttttatgagacggagggagtacgtgcgtcccaaaacattagttagagcatgtgctatataatccagctataaacatactctttatgtaaaaaaaagacaaaccctaggtttctgtacctaatgtttgaccgtccatcttatttgaaaaaattatgaaaaaaattaaaaagacaagtcacgtataaagtattaatcatgtttatcatctaacaacaataaaagtactaaatataaaaaaaattattataagacgggcagtcaaacgttagatacgaaaacccagagtttgtctttttttttatggagggagtatttcgagaagataaaagagaaagggaaagagaagataaaagaaagggaaagcagcggactacaaatttatagccagctgtagcatggacttcgaaatacaatgtgtgtatgatatctggcaccatgtatcgatagtgtaatatataggtagctattgtatgaattgactatattaaattaactataaataatttagagttagtagtaaactatactattagttttatatgggatttgacttatcataaaataacgaatctatatataggttagtctagattcaacgttttagaataggtcaaattttattctaagattgcagctgtaacggaggaagtaattctctagctagtgtaacccaaaaaatacgtttctttcaaagtagtgcagctgctcatacgtacaaactcatatacacatacgtcctatccgtaatgatatcttttaaagaatggctgaggccatatgtattctactgtgacagatatgttcttttaccactgaaaaataattaggcgtaaatatgaacattcgtgtcttcacaatagcgattactaccttcatacgcaaaatataatatttttaaaatatcttatattttaggatagagaaattttatctttgtatatttcttcaataaagtactcgaataccaggatcaacgcggaaagtttcgattgaaatagaatctaaacaaggaagaacatttgtcattagttggttattaaaagcatcccaaaaacatctagattaaaatatggctttcaaattaagtttcaaattagatgatgccaaagaaggtagggtgccatacgcagaagggaaatgactcatagaataggagaggcaaatagagctcttgcacattttcactaattcatgaacaaaatcttggtacgtagacacattaattctaattttatttaaaaataggtttaaacttaacaattcgtgttgcaaatacggctagttaagcttaaggtggaagggcgaatcatgtgtgtatatctgttcatccaaaggcaggagctggttagcgtcaaaagtctatctgcgcgtcaatagcaagcagagaaggaatattgtagtctgatttgtatgccctttttttttgttatccttttcagattgtaatcgaatatccactgaatttatcagtagcttttcatggattcgcgtatatttgtaaaaaaaaaaagtaatcgatcgagttgtccttctcttatccgagccctgcataactaatatctatatgatcgagatccctgatgacgcaggcatttcgtgagagatgatctgacttaactgcttgacgattaataaattttaacatccttatcaaccaattaattctgccatccttttcgtcatttctaatgccctgtttagcccccacacgcaaattttacacactgtcacatcaaatatttgacacctgcatgaagtattaaatatagactaaaaataattaattgtatagattgcgactaatttacgagacgaatcttttaagcctaattactctatgaattgacaatgtagtgctacaataaatatttgctaatgacggattaattaggcttgataaatcatctcgctgtttactgacgaattctgtaattatagtttttttattagtgtccgaatacaccatgcgacaccctatatattacccaatttgatacgtcaaaactttacacctctagatctaaacacgctgcacagatgcaggagagatgtatatgttctgggaattaaagagagtatgaaatataatcaggattgatatactgttacctaggagacctttcattattatactatttttttagctttttcaccaagttgttgttgaagattatttgtttcgaatacttatgaaatcactttttttaaaaaaaattcttgtgctgtattacttaattagaatacttgatttaagttattataaactattgttaactttacttaaaaatatttaatatatttctacaactaactagatgattcatgataataatccaataaatagtccatagcaattgctctacctggaaattgagtagaggtagctagtactacaagcaaagcacaggaacttccatctgtgtacagtaaacctcctaacaagtaaactacttatattagtaagtacttactccctccgtcaaaaaaaaagataaaatgtgggttcctgtgtcaacgttttactgtccgttttatataaattttttttataattagtattttcattgttgatagatgataaaacatgattaatactttatgcgtgacttgtctttttaattttttttcataatttttttaaataagacggacggtcaaacgttagacacggaaaccagagtctgtctttttttttttttggacggaatgagtaatgagtaagcaaagagaagcaacatgtccaccgaccaggcatgatcgaacacgtaggtacgttacacacgagacgggagaatcttactgtaacttgtttctgcaacctgcatgacccatgactgaacctgctggaatgcagtgcaatgcaatgcaatgctatgatctgttctatttgtattttaattgattttagtccttgatctaacagaattgttcttctttggccggtgcaaccagtccactgctgatatcttggccacgagatgcccatactacgcacttaggtcaacctatctttaatttttttaaaagtagtatagggctatatgctccataaagatgttactagagaaaatacattacttctactctgatagtcaaactggttaagtccatctcttcctaggaagagaaaaaaaatgaaaaaagttttttttttagtgaaacttacacatctcacaatataacactcaacaacgaaacatcatagtgacatcttcaatctttaaaatatactaaccaatcttttatagctcatagatgtagcgtacatgtgtttgagtttataaagggtgagcttgagcttgcgtatgtgtttatattgagtttcgagaaaaaaaagaaaaaaaaaaacatcgtccctttattcgcttgggtccacatcctagccagaagcaaaagatttgtataacatacagaatgatttttagctacatatgtaattcatattgtaaactattttgactttttttacgttaaacctcaataactatagcatgtatagagaaatgtaataactcttaaaaaattaaattagtttcattaagtctaacattacattttcataggatgtttatttagtgttaaaaatattatctctctatagtttaaactaaatttaaagaagtttgaaaaaagtcaaatcatcaacggatggaaattgtaaaatggatggagcagtaattaaacagggcacatattctgttatagaggatgacgcaatggataagtaattcatacgtggcaggtgggcactgttgctctagcttatccggttggtgctccatcatcagagtcagctcatgacgccaaccaaccggcaggatggtgccacgtggctccgtggaccctcgacacgtaacctgccaaggctgatgtaggtgcgtcgacgtggcgcccttgggggtgacacgtcacgcgcggccattggtcgccagttttgccggtgccggttgttggaatgttggtggtttaatttgccttgtgatgtgtcgatggtgagcgtgacaattgacaaaggagtcaaattaggagtagtttactcgtaatttcgtcatgcgtaatcattattgttacttcgagttagttctccgatttacataacgacgctgctaattttttagagtcgtactttctccattttacaatgtaagttattctggtatttttcacatttatattgatgttaatgaatttagatagatatatatgtatggattcattaaatacaatatgaatgtgtgaaatactaaaatgacttacattatgaaacggaggaagtagtttataaaatggaccaagcatttcggacatagagaatatatgtttaattcgtagacacagtttacaagacacggttcatttttttacttaattatgtatttgttgttttgttgtcttatttttcttacttgctgcaattgaaattgatgttcgcaaaatagataaataattttgagatgtagagtatcaagaaacaaattcgaaatcttagagcatgttctgtttgaagtcaatatctgcagtaacagaatattggtatattaaatatctttcctaccaaaatattaatatattaaatagtaatttgttaatatttgatttgctatcgatatttatttataacacatttgtattgttaaaatattagcgttaaccagacttgcgtatgatttgacattggcatggtagcaaacctaacaagctctcgttagcatcatcttatctagagtactacctccgtcccaaaatacttgtcgctttgagtctttttataacttttgatcattcatcttattaaaaaaataaaaattattatttattttgtttgtgatttgcttttttattaatagtattttaattataacttatcattttttatatttatactaatttttcaaataaaacgaatggtcaaacgttaaaaaaagtcaaagcgacaactaagctgggatggaggtagtagaaaggaaagaaaaccattcatctttctatacaacatttaatcccattcccctctctatctctttcatggatcatactaccttttactttgagaagtttgccacacacatataacactttgagttcattttagtgtacaatacatctttctctgaaatggagagtatctggccatgttcattggtacccctcaaagatcagcatgaaaatgagttctggtcctttgtatatatccctttgccccggatgttctatcatcaactttgtctccatccccatattcctgagggttttttccttgatccaaaaggacttgtcattctcatatgcgtgactcacatgttctatacttgaaaaatcaaaaagatattttcttctcttatgaaaggaaggaatactttaacatgatatcagtaggatcacactttgtactactctcggttcacaaatataaaatattggaggacatcgttttcgatacgttgctttgactaaaataatttatacaaatataaattattttaaataaatatagttgcatatatattacaataatttgtttcacgataaatctagttacatcatttttacgccgtaaatttttatacttttatctattgattgtcaaagttaaataaaactatttatctttacattgtttttaaaatattttatatttatggactagatgtgtcatgtaaatgccctgcaatgtcccatcttgtgctgcccatgatgtacacacactgcacctcatgacccataactagttattgactaactaacactacaagtccacttgatgtattaagaaactccttttttgtatttaagtaagtagtgttagttagtgtaacagtgtaaccatcgaattatctaaatgttggttcagaatcgatcgatgttgacctggcatcaagtcgaaatttcatatttattgctgtgtagtcactccattgcacatgcatgtgcctgctttcctcatcattttcaggtggattagctgttgaataatccaacttgcaccatttttctatatcttagagagtaacctagcaaccatgccctgtcatgtaatactagagaaattaaggtatcatgggatccacttgtatgccctacctttgtggatggaaaattcctaatttttctacatagaaaataactgaactggtaaaattttttgagacattttagttatgaaatcatcatgattccaaataggacactaatgtagatttatcttacacagcctcaattgcgtaattttcacattttaccagtatatcgaactcctatgttttcagtaaaaagctggacgaaagcctttaatttaagaaaaatgttgaacattactccatttcggattaaagtattttcaacaacaaatgtgaaatacccagactttgccacctattttcaggcaaacatcacattcgtaggcaccgtccatgtttgatgttgttaccaagtaaatcatggaaacgtgtaatcatcgataatcgagaaaaaaaccatgtggctgtgaactgtgattcgttttcaatattgcaaagcagtggaatcaatcactttcaccagtgaaaacctgatacgattagtacgagtagcagcaaaggagtacgtacattggacgcccaagccgtataaagtcaaaaagcaaccgagcaattctcccacctgctatactatccctgtttacaaacactccgtatttaattaacgttttagatatgatttagtttaaattttaaaacttatccactaataatttataaaaaaatcatatgcataaaaggtaatatcacaatgttatagaaccattacattttataaacttagtcatagttttaaaatcttgatataatcgtgacctgggtagttactagctttttttttttggaatcagttacagaggttaaacataggtccataagttattgtattcatggcaaattgttttcaagtgttatgcgatatactaaatgtgagcggttgtatgtacatggtgactttgttaatattaaaaatattccagcataatctctgggaggtatttattcggatgactccgtcgatatcgaaatgtatcgttacagtcatacagatatgctcattctactatgatgtacgtgcgtatgcctagagacgtgttcatatctttattgcgttttggaaaaaaaaatcttactctaaacgtgaaatataatactcctacatttaggacggaagaaattacacgaaataaattagagtacgtatacacgtatacgtattcctactgccgacgtcgacgtataatacgccccactcccacacacactctctctccgcgcttctgttgctgctgccgctggagctgaagctgcagctgctcctctcgctaaaaaccaaccccccaaccgcctctcccctctcctctcctctccccctcgcatttgcagttgcagagcaagaagcagagagagaagaagaggaagcagaggaggaggagtccaagaattgaagcaggagaagaggaggtggtggtttgattcaagaagaaggagaagagcaagagcaaggatgttgcgaggagggacgagcttgctggggatcgtcaacttcgtgacgttcctgatctcgatcccgatcctggggggaggaatctggctggcgtcgagggccaactccaccgactgcatccgcttcctgcagtggccgatcatcgccatcgggctcgccgtcatggtggtgtccctcatggggttcgcgggggcgtgctaccgccagacgtggctgctccgcctctacctcttcgccatgttcttcatcgtcgtcgccctcctcttcttcatcgtcttcgccttcgccgtcaccgaccgcggcgacggccaggtggtgatgaaccggcggttcctcgagtaccagctctccgactacaacggatggctccgcgaccgcgtcgccgaccccgcctactgggccaccatcagcgcctgcctccgcgacggccgcgcctgcgccgccatgcgccgcttcgcccgcgaccccaacaccggcatgctcgtccccgagaccccctccatgttctacgcccgcgacctctcccccatccaggtcaccaccacaatctctctccctctctctctctctctctctctctcctctctctctctctcttgattcgtcagttcttgaggagattgactgctgctgcttctgatgcgattcggattttggaagttggcgtagttgtgacgcgctcagagaggggggaaaggaaactgacttcttttttgatttgttcctgtttggtccaaatgaactgaattaataaggagctaaaaatagcggagaatcgatgtgtttttaggcgttctggagttgaaaggttggattcttggtgagttttggatggattagatgggcattagcagtttatccattgccaactacaggtcagtgtagaaaaggctgggattttgtggcacaaaaataagagaggattagggaaagatttgcatttttatggagctctattcatcaattaggggaaagatttgcatttttggggtcggtcttgattggattattgattcaatttgaaggaagggaacaaccacctatactgttttctgatttcttgttgtaaagtttggttaggatattcccagttatcactgcatggtacccatgtggatctcaagatgtgctgctttgcttaccactttcatcagcagccccccttttgcttagcaagtcatatggccctttaaaatatttttgttcctgcatcagcttgcaccttcgagaaattgttaatcctgcaaccttttgcttgcccatgatttggccaaagcagcaagaaaatcacaaacctttagccgcacccgtccttcgattccaccggatacctttcttcaaaagcaatcttttttcttgctttaatagtttattgaactgcttcaaattgcaaggaattttgtctaaattccatgcggcgcgccctaagtacatcctatttagggtgattcagacttcaaatcttgaatgattaactccctcaaagcaatctttgaagtgtgtacaactccctcaaagcagtgtccttttttatggagcaagttggtacctccaactccaggctatgcaccaaaagaaacctatgtgacaagaattgactgcctggtcgatttgagtctttgtctatgtcgtttatttttttccccttaggtgaccttgctggtgcaattgctaagaccaaataatactaagacgtttcagagttgccactattgcagtggtaagaagtagaatctgcaatatgctgtgatgctgaggacaaggtcattttcctagctttttctctcttcttttctggataccaaaagacaaggtggaccacagcattagcatgattgaagggatcacggcctctcgcttcttacccaacacaacaaaatgcgatcaggacagctaaaagccggttgctaggtgcctcatttgagagttggaattggaccatggaagccttgccttgtttgtcctttatattctcgttgctgtcttctgtaactgccagtcttttttttttttgctacaatttcacagatcacatgaaaaaaaaaaaaacccatttctcttgtagtctttcaccggagactgtactgtactggtatgctatggattgcataaatattcttatacagattagctgttgcccatgtctttataggcctactttgatggagccaagaaatttgtatagtttaatgtgcatgggtacatactttgtactttgtaggacatgtcctgaccatgaaagcattcaaagttggttcgtggtttcccttaatttagagtcggattgctttgttttcccttttcatgtagacatatgcatgtttgatctctaatcgaactggcaccatcaattttgtgttgaatataggatatctttttatgtattcggttatatttgtgtttgttgctgtcgacaagacttggcagtctaaggtgatggaaaatggataattgctccccaaatttgtacatactgtcccaatctatggggtactttaaaatgctcagtttgtgttgttaagctagtgctattgtagttctattcatttcaatttatgttggatgtaaagctacctgtagataaattatactagttcttccatatctaaaaaaatgttactccctccatcccaaaaaaagacaaaccatgggtttccgtgtccaactttgacggtccgtcttatatgaaatttttttataattcgtattttcattgttgttagatgataaaacatgattaatattttatgcgtgacttgtctttttaatttttttcataatttttttaaataagacggacggtcaaacgttgggcacggaaaccagggtttgtctttttttgggacggagggagtatgtactagtcaaattttttaagtgcacatttacaccagttgtccccatgaacaagttgcaagaacttaaattctaacgctgaatatttctggttaatgatgttgatttgggttctgatcaacaaaatgttcctttttgtgtgtgtgtttgggggggggggggatttccaggagtgaattacagtcaatgagctatgatgttttgcttgtaaaactacattctgtaaatatgcattttgttgtcttgtcacttcctttcatgtccattaggatagtaaaaccataggagcgaagttctgaatatctagtttggattatatgctaacaccatttcatgacttgacatttgcagtctggatgctgcaagccaccaacatcgtgtgcatacaactatgttaacgaaacgttctggaccgcaaaccctggcgttccgaccgtcgtgaatgatgtggactgcagcaagtggagcaatgaccagcagacgctttgcttccagtgtgactcctgcaaggcaggcgtcctcgctggcatcaagaagagctggcgtaaggttgccatcctcaacatcgtcgtgctgatcatcctcgtcatcgtgtatgttgctggctgtgccgctttccgcaacgccaggaggatcgaaaacgacgagccgtttggtatggcaaggatgaccaagactcaacctagcaggttccagttctgagatagtgaagaactgggagcctttgcccctttgcctgtacaaaaagaccacaattggtggtgctaaggctctgtctgaatctcttatatattatttactggaatgtggaatcagctacactttgggtggtgaaaaaggaaagtagttcttgtttcagaatgttcagtctggtttggttttgtgcttgctatagtgtttagggttaggtctgttgtgtactgggtacaagatgagatctgcaagaaacaagagtagttccctcatttagcaatgtattgtgctgtaccattggagattttgatttggcataatcttagatgaatatgttatcatcatgtacatgatgaatgtattgctctgtagttccttctctctctctctctctctctctctctttcttttactttgtttccattattaaaaattaaaatggttgaccatgttatgatgattgctgatcaggtattgcgcaatatgatgatcttagatcgtctaacaactgcacagttatgttctttgttttctgatggaacaatttttttttcttctgtataacaacatagacatggttgaggcatcgatgtgacaccgggtataatcaaaaacttccctactattgtgggctacagtgttgtgatccagcgacagatgaatcttcagtgttatgaaccacctgcttcagtcatttgttgtaagttgtaaccatgaacgaatactatgtgctgcggcattctatggagaaaattccctctatggattctactacctccgtccaaaaataacgcaattctggctattcatctagacaagggaatgctcaggcgcatagcgggaattgcattcttgtcgggagggaagtatagtaggtaaaaggaaaatgggtatcaactggaatttgtaacagctgtaaaatgatcacaagaagcaacaacatttttttagataatggattaaaaacccagcctctacatccaaaaggatgtacacagcctaataagcaacaacatacatgggttttccatcgagggaggctatctcaaaagcaaaatacataaccagtttgccttaaacagttgccaacaacatgaacccatcttaataaaattaatagtgtgaaactttattatcttcgaggatttcatcgcgacaaccaaagcagcgagtctccctcagccgccaagaagcagttgatttagtgagacgacgatgttgatgatgatccctgcgcaaaacaattacaaatccgttacttctctgatttaaagacacaggatcaggttatcactacagactgggcattggacattgtcaagcagtgaagcaggcattgctagcagaagtcaaagataaaggccctatcgataatcaatatgcttgggcatttcacatgtcaaacccagcagaacatcactacagttcaggattacctcatctgatccatttggtagctccatgaagttccatcacgcacaaaaaccagtaccacatttacatgtaactgataccccactaactgatggtagattttctcttttgccccatagttaagtggcgtttgctcactaggcagtaggcacaccccaagctaatgacaacgaggtccccgggtcacatgtccacatgtcatacatacatatgtggcaaaaccgcagaagaacaaatgccatccacttatacgtggcaaaattgcaaatctgacgtttttgtgactagtggtcaagaggtgcctacaaatgttacagggcacggagatacacaagaatgcaaaattttagctattttccattattcatccccttgcagttttcacattctcgattatcaaaaacaaaaaaaaaagaaagaaagaaagaataaccaagcaccacagccccatgggtttcatattgacaaaaggtagttcaaacatggactagtatgccacagtacaaacgggccagaaggttacctcatgctcatgcccatgaccatgtgagtgatcatcatgaccatcccaaggatgacgcatgccctgaaaacattattatttattaaaaagagatgaatcaacacaactcaagatcgaggaaatcgaaagattatattaccaagagaacagcaccgtcctgcttagccctgtagaaaacccaaaacctgtacagacaagacttgggttataaatgtaaacaagtagaaaatccatggtattagaaaatcttagtcataagcaaacatctgtaactgttcataattggatatgcttgaaatgacaggaaaaaaaatggaattaaagacaaatttggttactgtcttgcaatgaaaggtaggttacgggttacctttttaaaatgtaaattaaaacaaaatgcaagcgtgttaacaatgagatttctatactcatgctgccatgataagctattcaagcagaagcttaacagtaggctgcaaatgagcaaatgacttcatcgagaagcataagaaaatgtctggcgaagaatagagtggacaaaagaactaaggacaacactatcatgcatctttgtagattgattttattataaagttgtgacattcaggcaggacggtaccctccagtagacccttgactgggcatggagctcatatcagatttgcttaataattataagtgcttggttgttttagttgccagtgattagtattagttggcgatgggtttaatagtacaaatcatttattctcagaggatgtttttccccctgaagtgatgtttaatgacgacctcaaggtgacatagtagtttgtccaaatcttaaagctagtcccgtttcacaaatcacaatggatacaatggagatagaaacaagaataattagccatatggttggttgtccttatcgtgcctaatgctttcttattcatgtgttgtgaataaaggttgcaaaacgatgaaataacaaaacattggtttgaaccaaaggcgtttcaagctagccaaatactgtgattcttcccagagttgtgaaaaaaatgcatggatgaaaaaggtggttaaaagctagctaaaaggagtctaaaatttgctacagcataatattgtaattcataaccaaactcccggagagcctaaatcgtgaaatcaataatgatatgctgccgctgccgctgccgttgcctatccaagaagaaggagcgcgagcagcgttgatatcgatgactattctactccatgaggaaatcttccgatacaaagatgagtcccatatggaccaaacgagaggatttgagagatccccaaattgagtaaacgtttaactgcaatcgaattcctctctaatataactaatcgatcgcgcacaagcagtagttgagcagtagaacgaacgaatctagggtctggtagaggagggacggatctcatccggtcggcgaggatgcaggcccagatttgggggggaaatgggcgagcgagggatgcgtgcggtgcgtaccacatgacggcgcagaggcccttgccggcgacggtgtgccagcgcttgttgtgggggatggtgtaccccttgtacgtcgtgccgccgccgtgcccgccgccgcccatcgccgccgctcctctcgccgccggccacgcgctttctctctcttctcctcggattcggctgcgtctgcgtcactgcgtgtgggggtggctgggtgggtgggtgggtgactcaccttggctcactagtgggccggaaattaaggcctgctagtgaattgtcctggcggcccattattcgtggtccttttcaaccatttgggccgtggggttttcagcctagttagtttgaggaacttttttttttattttacacatttttttattaaaatatttacaacaataatttaggcctctagacgccctctagaaaggcgatttttaaacgtgatacgcctagatttataaattttcaaaacgaaaaaaatatttttgtaaatatttatttaaaaaagtgtaaaaattaaaaaaaaatatcttagtttgagtatactagtaatagaaaaaagagatggggtgtttggacacaaattgtgtgctccctccatttcaaattacctgttggtctaggcttatcacaaatcaaacattttaatatttaaccatcaatttctatatagttatgattttgcatcataagatttatattttatatccaccgtgtgaaatactttcatataatatatattgttaagcaaaacggatttctaaaatttaatggtcaaagatagatatgtttgatttaggacaaatgtaaaacaacaaatagtcctatatgaattgaaatccttcatatatattttttcgcaaaattccatagaaacaaaagagcccattaattataccagtccagtgggaaatcaaatcatcattggtcggtccagagttcacacaagctcactaaagattctttctagaatgccatatgattgtgaagagcttgcttgcttaccagttatcactctgcaagtccaaaagttgagaagaaataatgataagacatatgaatcaattattcaaacaatgcatgccagttagaatgcagtgagcccagcacaagcaatgcagattaaccacatgtccaaacctcttaactaactattgtcatgtagaaaaatcaagctctttcttctccaaaccccaatcaaagcacatgattccagttaagagagaagagattggatcagagaaaggactggcccccatgtggtgttaataagaagaaaagtagtgtgcatttgacattcagcaatccagttaggtttagtttatgacatgagatagatgtgttctttctccagttcaaacacatttctttgatcttatgctgaaacgtgatcccctcatgatcagcaatttctttgttgtttagcgatacgtgttacatctgggtcaaaggatggaagaagctccctatgaacggacactgactccagttgacgtttttggctactgattgttcagcaatggtcagagattatgtccatgtcccctcttgcatcaacaaatctcccccaaattttggtgacaaagtgttattttgaactggaggaactggatataaatgtcgacaaaggttcatacgaattgtgaatttgtgcatgcatggaaagaaaatgtcggcagctagctgccctgctcatttggttggttgacagagcagaaaaaattcagtcagtggcagaacttcagagttgcagatcatgcatagacagtgctagcttccactaatgtatgacatgttcagacatcaaattagttgtagtaattaactcagcagcatcacaaagagtacgtaaaaagaataagaaaatgccatgaaacacatgttaattagtggcatccgacaatacaccgtacaatattgtactcgtttttgcgtcaagtcccacagtagctgttgccaacattttcaaggattcttctgcatgccaaattaattaactaaacaattgggatcagtgcaaagctggctgtatttcatttcagctcgaccaacgctagacacatttacaaatcaaacctaattaagctaggagttcaccatgcatatgtctgtcttccacatttgatgagcaataggttggatcatgtggcatgtacattgctctagtttggcattgggtttggagccatttgcatctggtctagataaggttgttatttaggttgccactcttgttgccttcttctcatttctgttggaaagaaaaattaacttggaaatccctaatgcaagatgattagacagacaactaggaaaattgaggagatgaacatttttcatgcagatatatatgtaattaacctagatggtagagtagatctgtagagtagagtagttagatccatgtactttaacctgccacttgtgttgctgaggaattttttcatctactaggtaaacctaagttaggtcaatgtacaatgcacatatatctcctctctactaagctacttcatgcatgttgtcatgaatgcgtgtttgatagtagtttaacttgttttcttcctaataatttttgtcattagatgatgcaaactagtgcatgttgcagatatttcatctcttgggagttgcctaagaaatactagaagctagaaaacaaggggaaaaagttactaatgccacgtcaagtatggagaatataatgcatgcatatgtactgaaacttaaattaatttgatcagtatttggccggcacgcttcgtataaatacatttcaaattttaaacaccgtacgatcgagggcaactagtcaatcaactgggattatagatttgacgtcgttttgaaatacatgtactccagttgttgcttgcatacggcatgaatatgccactcgtataatttttaattaattaattcgtttaattaattactgcattgtgcctgacctaccaatcattagtaagatgcatcgatcacttctgcatcagaccatatatatgaacaggaataaatagtagcgtggtagctagggtcgttatagttgagttttgtttacactgtcaagtgtccaatgcgcagatcgattagtcttttattcataattaaataatattccatttgcttataatcttattctataagccagatgagataagcatataaaccagagaacacttcatgattggctaactggactcaagttaattcagcacatggttcagctttgagttgaactcttttgcaccgtgccactaattcaaattaatatgaatattttagaattcaacttagaatttagttaagcctcgttggagagaagcagcagatatacagttaagtcagaggatcccatttccgtgacagaatgaagttgaatttaacctgcccatatgaacagaatgaagctaaaactttcaaaattggatatagaaatacaaagttatatttatcatagtcttatttttactatttttctttaataaaatagttcttcaatttgataaataagaaaaggttgctggtattacaaggccaatttagccccttttgatttaattgttattaaaatattaaactgataattatcaagccgtaagggacctggaatcatgattaagaaacataaatattttacttggtgcggatcgagtctcatttttttttcataaaatgaatttctaattttgtaactaacagatcgatgcaaagttatactcggcttagagtctcattttttaagtttcttagatctttgataagtttaatattctgaattaatcgatcaattttaatttttatctttgttagactcaattttaattttgaaatcctaatttgaaagttagcaattgtgaatgccatgaattcttctgttagtccaaaatgttattattcgaccgcctagatgcatggatgatcttatttaccactttttttcttcgataacgtgggaattcaattattcatgctatactataatagtcattacaggtatagataaaaaaatatagtagactttcttaaccgtcttcttttgtggttaccatcgattgaaatgcgggtcatctttcatcccttttgattatacatagaccagaaaattgctatacttcttgtggtgaagcatcatgagactgaacttaacactcaagaaactgatggtggtcaaatttaattcctagttctactaatacttccatggttaccaagaaattatctcctttttttggactttgaaaatctctccctttgtggaaagttacatgatatatgaaatgcattgatgcctaacaacatgtacagaagggaattaaggacatcattttcacaaacgacgtagtcaagcaaagaacaacttaattattcaactagctatatctatccatgacttgtaacatcaaaattggtcaatacttttaacttcttgttgcagcttcaacatgctggaacttttattccacaagatccattgtttttcatgaccaaagtacaacttagtagcctaatctagcaatttattttccttagcttactgttctttgaaacaccaacttaacaaagtatatatttcttcaagtattgcaccctagttaaccctttggttaactttgcatttggtaacatatatattacatcaagtaattaaactttaattacatgcatatatatatactatatatatctcacatatatataaatatgactctatactaattgacatatctcaaccaccttgtagcacttaagtactaattggatcagcttgattaattaagtagttaattatttcttcgtgggattaattaacgccgaatgccagctagctcgccgcgagctcatgtccagagcggctcgtcgacccagccgatggggctcgcttgcatggcggcggcgccggcaccgtcgacgacgtagagcgcgtcgacgggcgcggcgggggaggcggcgccgccgacggcggcgcagtaggcggcggcggcggcggtggtggtggggtgctggggcggcgcggcggcggccatctccatgcagaggagcgcgacgaggtgggcgtgctgggcgcgggcgccggcgagctcggcgtgggcgcgcgccagctgcgccttgaggtcgttgacctgcttctgcagctggcagatggcccccgcgcagccgtacaccgggtcccggatccgcgcgttcgcctcgtacaccatgctgctcaccgcgtccgcccgctgctcctccggcaactcctgcaaccacgacggcgacattaacggcgagctcgccatggccggcaacaccgagcacacgatcgagttagctagctatagctgcttgcctgcaggagcttgatgatgttgctggcgccgaagacgcggtgcgcggtggtgaacttgtgcggctcggttggcgggaagtacggcgccagcacgcagcggtcgacgcagcggcggcgcaggatcttgcacgcggcgcacgggctgagcaccaccgtcgtcgtcgtcgcagccaactgcggcggcggcgacgtcggcgtcggggaaggaggcgccgtggcgacggtgcaggccgtgtcgctcgacgagcccatcttgatcagccttgtagctagctgatgattaattgctgggtttgtggggagttaagtggatttgtggccattgatgtggtatatatagagaagagagagtgtgagagtggcagcgcttagctgggtaagcaagctgctattggaagtgaagctgactgtttaaacctaatgttggtaggaatggatgtttggccctgtcattaacttgctatagtgccattaattggttgactggttggcacttatcagctctgacagttatttgaagtgtctgcctgaaaattagacagtggatctctgtatatatttgatcttgattgttaggggaaaaagattgataagtacaacataacatatactgtattgaagatagtggatcaaaataaattaaaattgtcgatgcttgatatatatttatcgtgtatatattagaagggtttaattacttctcaattaccttatttttatctaaatttcagtcttgtttcctacgtataaccctaacccactctatccttcttttctcatggttcgttttgtacacacgttatacaccaccacaatgcctccccctaccctcaccccctaacctccatctgcctatccacacaccgccgctctttgcctcgttggcgtgtctcgggctctcggcatcaacaaggctcgcaggacgcacccacctagctacctacctcataccgctttatccctactatactattgtggccgtagcgctcctctcttcttctctggtgcggcatctctcctcttccgtctctagcgacttacacaccagtggatatgccatcactactccctgcctcctaaccatttcaatgaggttccccgctactcgacagttcacccctctactagctcttagctcacaccatcgtcaaggtggtgcaatcgccgccacactacccaccaaatccaccgcctattattgatacatcttccacctcacacatgacctctctataaagacgctccctccaccaacccctctcctccaaaccctggggacctaattcgatacgtttttcatggttcaattaatttcagcgttgcacacatggatgcggcatgctgccatcagcgatatcttctctccttctagcttgccctcccctcccctcttttggttggaggttttgaaagactatgggtcatcccatggataactcccggcttttaccactactaaaatataattgtgcgttcagaattatagataaattaaatttagttaatatattttgagacggtaagtaatacatggagtataattttaccgccttccaaatattttataacaaaaattaacggccggccggccatgtcgatttcttaataaacaattttaacctttttttttaccagaaagggcttgtaacggtcatgtgaaagatatggtaacattagttaaaaatgcagcttgtgtcccacgtacgtacgtacgtaatctatgttgatgtacctatgtacttacgtacgcgcctgtacgtgacgcagttggcacattcatgcatttaattatagatcaatttctctctccttgacatagagcaaatgcactatatatatatatattccccctatataataatatattagcagctttgcaatacatatttttcacatgacaaatcttagtactaatttcacatgtgaaataatgaacaacgttttgtgatttgattgtaccatccattaaataaacttcatattgatctatttgaaaattaatcctgcagatgagagtgatcgacaacatggacatatttgaaaaaaaaaagggaattggttaactactgaaattgacacgtgcatagatttaaaatgaaaagttagatatgtgtagtatattagatgcataagagaaagttagagttgctgggcttatatattaggaggtagtacatgcacacatgggtatatatgttcggtagtaaaacatgtacctatatcatgtgcatgagactaaatctctcgaatccttttagatgtgtgcgagacgccacgcgggtgtgtgcacgtgagtgcggtgtaaaaattagagatgcacttgataatttagtggtaagaagtgtgtacattgtgatttcagcctgagatcacgtgttcaatcttcaacaccctcacaattttttcttaaaaaatgtttggagggacatctctccctccaaattctctctctgttttttttttgcgttttgaaaattaaaagtcctgaaaggagttgagtataaacttgaaagaggtataacgaattttcacttgtatgtgcatgtgtatatttggtagaaaattggaaaggcaggtagggatattttcaatttgtctcatctattatatattactataagattatatattaatatatagtaccaatcatcattattgccaatatactacgatattgggcacggcacgtaagcatgctgcagaccacaaaaacattagagcctatcctagtagagattaagcaattatttcgccatagaaattaaccaacacatatacatcgatcagcttgcaaataataataatttagcatgcatcatgtgtattggcaaggtagttgtagtggaatcccgtcgtgtatatatagaccaccactacgactaatgcacgatgatataaatttcgcctgcgtattgatttcttttcttgaagctgcatgcgaatttctaaagtagaaataattgtatttgcatcgccgtgtggactttacatgttacaacaacaatacgcttttactctaatcatcatcatcatcgatcatatcatctcccaaatcaaaccatgcatgcatggtgcatctggcccttttgattacaactcccttcgtcctaaaaagttaacgacgtcctacattattttgggatggaagagagtacgtaccagtgctttcgcagtcaaattaatagttgcactaaaaggtctgggagagtaattatgtttgtgccgatataatttgccgcggaaggataaagtgaaaattgattctaaaattgagattgaatgattcaaaattgtcttttagtttgaagtcatgaaattagcaactttttattgttcaaaatttatcaaaaaaaaagaaacttcttcacctacttaggccctatttgtttagacttataagccaacttataagccgaaaagtctaagcctaaataaacaagcagcttattcgtttggctttttttgaaagccataagccactctaacactattaagccaaaagctaggttggagaagctttttttggcttatgtgagatagatgtatgactccatcactaaacttaggacattaaatccatcgacttataaatcatataagccaataagctgacttaaaacttaaaagtctaagccaataactttaagcctaaataaagagggccttaataatctaaatcacaatcttgttagccccatttaatttcaccaacttttttaatcaccttctaaaatgacttcaaaaaatctttatattttaggatgaaggaaataacttacacagatatatgtacatacgtgaagcaccgttgctgcatgcatgcaattcatacgtatagaagtatatatatcactatcaagatatataatcaatagtagataatgagtcagtagcatattagtgtctgggtagcggattgcagataacaggtgctattatagatactaagttccaatagcaagatttaaattttaagttacattacatatcaacacaaacatcgaatttcattcaaaagtttagacaacatacttaaattactcatacatattatagcataaaaatataataacataaataaataaaatataaataagcatacgctacgttaagttcgtccatccatgtatgaataacaccatttaaacgcaataacagtccaacgaaaccgatagaaaactacagtagtgaagctgaacatatataatagcagccgctaagtttcaatacactaatctccagtccgctaccttaattatagcggtagccgcagaggtaaactgcgaacactatttattaacttgatccctacacattggatcaacgcaagaaattaatgactgtgcatgacacacactagagagagagttgatttcttgctctggtagatggatggatagatatacgagcgagaaattaattcagagatgaggttggtatagaggtagtagcttgctaaatgctaacgctgctaatgggatggctggagcgcactttgtgagacttcagttgagcccaacctggaacgagaaccgggattaatttagcagccagtagtctgtctgcacgtaatacagcaaactaaatcaactctctcagattatcctcgtcagaaattcagacgacgcgtatagacagatgcatcagaagactgcattatatatgcatgcatgtctgaagaaaaggtacggaaagaaacagagaaattggaaaccagatgatgagatgctacgacagttaggtatggtgatacacccacaaactcaaaaagacctcagctcgattcatgtaaaccctcttgtttctgttaagtatgaacgaggttttgcatgcagcatatctgcatatgtatacatatagtgaggctatagcatgagagcatatctgcatatttcatatttgcatgcagtggaggggaattgaggtagtaggcattgtgcttttgccatttctcaaatttttttccatttgtttttttatccacatacatgcatatattgatgcaagagtaaaacgcattggtagcatacttaaatttaaatgtgctatctaatttcaaaactaccacatatacccccttacatgttacaccctcaatggtactcaagagggtatgtggcacctccatgagtggcggatctacaatactaacatcggtgttaggcaacaccgatgactttcggtagaaactatagttaaacagcttatccatatattataacactatattctaagtataattagcatgctatgacattgatagacacattatgacaccaacgaataaattttctagatctgccaccatgacagttccatgataaggttatatggtaatttagaacctaattgttatactaacaaattccgaaacatagtctacattttcgatatttagagacctatataaaaaaaacacgctactaaatttgaggaccatcgatatattttactcaagcaagcaagatgcacttgacagtgcagtggtaaagggtgtgtggtttcaatcccgaggtctcgtgttatattcctaacacgctcacaatttcttcttaaaaaatatttggagggacgtctctccctccaaatctagttttattttactcaagcaatcaatatatcgagacagcgctagctgccatgcacattttcctcttacatgcatctgatgctttttttccccggctgcaaatggcagcgtaccgaactccaattcggcgcagacgcggcgagaaaatggtcagaaagacagacaggtccagcagccagcactaggactgtatcttgcactgttcatgcgtacacgtatgcacagcacacagcctgtttctgcacaggaataattaggacgctacctaagctacttatctctgaatctctgatatgatatggtttttagatttcttcagttaacgtactacagtatatatgcttctctcttctttttttcaaagcaccacttgatggatatgggctcatatgaatatgattccttcatgccaatggttgtgctctatcaatctaatctatccatctcaaaaaggaggcaacagtagtctgaatactgaatacactttcgtttcagcattaagattttggtggaaattacaggccaactgcaagtgcttttggcccagcaggatttgggccataaaggcccataatacagggccaatggatccttaggcctagcccagtatatccaaaggacaactgggccataaaattcatttcatcagatgagagtgattggccacagcgggctcaatccttgcataacaatgcagttttgattcctattaattactacttccatcccagaatataaaaagttttaaaattaaacacagttagaaagtagatagaattaaatagaaaaatgttgtgattggttgagaagtggaagtaggtgagaaaagtgaatggttgagggttgtgattggttgggaagagaatgttggatgagaaattgttatattttgagacaaatcttaaatgctagaaattgttatattttaaaacagagggagtatttaattagtggtcatctgtgaagaaggacacatgaacctgaacatagccattagccaggtctgcatttctggagtagtggtaattctcactgcatgactgcaattatcctgcatctgcagcagatggaaacaaaacaagaaacttttttctttcaggcaagatgatggccactgcttcccaaagttcagaaatcccagttaaagtttcagagtaccaaagaactgtagcaatggtaaatgctatgctagcaattgattgcactatccacatcaaacacatcaagggatgcaaattgcaaaaaatacccatgccaaccatcccctttggttggcaacttggcatcttgtctcttgcccagtaaccattgctgaacctgttcattggctccatgttgttcagggcagcatgtgccatttgcccttctgaccatgctgctgtatagtttatgaatgcatgtagatgcagcagaggagatgtcatcacacacatggaaattgtggttgggggttagtaaccacaccaccatcttttggacagtttttttggctggcattatactagcctttgatgacaacctagcaatgccattgttcagggttgtttctcttctttatttgccctaactaacctacctagtagcttttcttgttgttcacagatgcttaattcacatgtgaatctgttaatgctgagcttgtttagttagttgcctagcttacagtagttgagataagtagggatcaatcattttcttttgttaattaccattagattatatgaaaacaatgaaatcagaagaaaataatactgaaattttctgccatcttgcacagctgcatctgcaactccgtcgtcagaacaatctttcagttttctgaaaccaggtagcttttgatgcaactttcttgggttattaactaacagtgagtgctgctgggtctgtgtgcatctcatcgccagcttgtgcaatctgtccggcctacattgacacgtgtagcactgcctggatttggtcgttgggtgattatctcgattaccgtgcatggctccacttttaaggacccctaagtgtcgcctaattatcagtaaagtaaagaacagagctagcttacctgaattttcaagtaatgaaccccttttaagatgatagccactgtccttgtgcgtagcaatcacttatataatcccctgacaaacaacttgttttacaccatggaagtatatagtcaagcattcagtatgtggatcatgatgcttctgtcctctctgtcccatcacattctttttggacaaaaaattccataacattcttgatgaatgaatctcttaatttgctgctgctactttgatgcaaataagtttatgttttcagagctttggaatattgcctcacacgaatggcagtccatactgtcgcttgtacgtatgattttcggtagcttgtcattttcacagcaacaacttctccctttctgccattctttgatcaacaaatatacagttcatctcatatatatgaatttattcatttgattgttgcttacataaagtagttgaattacactcaagcagtaggagtagtcgtcagttgcagcatagctttcactgacgtctctttaacaagttgttaattagcacaagcatatatatttttctttgtgtccttttgtgtttcttatttttgctgcaattattcgggttgaaaataataagaagcgaccaatgagaaatccctcctcttttctgacagtgatgcttctgtttttccttctctgataatgcattgcttgctgcttgcttccacgcagtaggagaagaactgaagaagagtttcagagttcagacaaagacagatcatcgaaccagtagtcaatcagtcgtcgtcaaccagacaacgataattaagagttcgtgcacgagacgatcttggaggagagaatgagaagaagaacaaattgaggagaagaataagaagtgagagatggaagcaaattcagagaaacgcacacggcgaactggagatgcagcagagtgaccgactgacagataatacgggccaagatcgatcgagcctgaattttcttgcaagtggctcacatcagttaattttattcttctgttctagtaacaagtttgcaactaagaaacgggatcataataattctcctaatgagttaattcgagcgagtataagctgctagatgacagagtgataggtgagccaccctgcattcctgcagttcctgtctccaaatcgtcgtcgtctcccaaactctgaaagtgaccaaagccaaactctcatggaccagacctaaattaaccaaccttagcctgcacgatcaccattattacggagagagattatcatgttactgcagtagattatcagttgtctcctttaatttctccggttgcactacgctcagttcagctagctgaatggatgcattgtcaggttttttctgaatacttacttattttgtaatgaattaactattataacgttagaaaacactcttaaagagaaaatagtttttataaattcataaacataattttttttaagaaaaatacatccttaaaacttagaagctagggaaatgtgtcacattaatccattcttccgttccttgcaaagaacatgtaacacatatgttcttctttacttagaatattagaaacatacgtgcataaatataggaatggaaggaaaggcagatttttttttcttattcgaagcctccattgttctcccaattatgaggctgccaagttaggttttgaaatttgtttctttctccaacttgattaatcatcctaactgcaattagctcttaacttccatgcatgagcaaaagggagaggcctccaaccacacgcataactgctcgtggacaataatacacaaatggtcataatctccaattaagctagatacccatgcctaccaattgcttaagatgatcactttgctgaataatgacaggttggagaggaagaacaaatgctgaattattattagttagttcattaacttaccaattaccatccagcaagacaggactaaaccaacgcgtaggtggagatcgaacaaatattcctcaactacttcttgtccatgatcaaatgatcaccagctagctcgactgaagatcacgatttcatctaaaaaaactgaatagtttatgaattgttgtaacttagagtagacgtgtacagggcagaagttagttctttggacaaaatcacatgggctcatcgagattgacctctcttgagaagaaaaaaggaagaaagagattggaaagagtagtgagagtcggcctggctgacagggagagctgcgctgtctgaatcccagcacattcttccctctttccatctcaaagactaattaacacgcattctgatttgtttttgactggatgattatttagttgtttaatgaccgtttggttcctgtatgttttctcggcgctgaataaccgaatgatttcgagggtattaacaaatgaatttattattttaaaattgaaatttattttctcagaaattcatatatataattttttttacataaattataaatttagaagtccaaaaagcttgtgtatttagctctcgaggatattaacgatgaattaattctttttttaataatgaaaatggattacatctcctgtttctgtcataagacacacagctataagtttataagtttaataatattaaaaaggtaaggtaaaagtaaatcaaaatgagaaataaggtgatgggacaaacgatgaattaattcttataatatttaaatttgttttcttagaaaatcatatacacaaagtttttttacagaaattataacacttagaagtctgaaaaatgtgtgtatttagttgtccaataattttgttaagcagaaaagaacacacccaattcacatccatggctatgcttatgccttatcagagttcttgtatgtgactagtaactttttcatggtaaaactcacagcaatcatgcatgtctacagtgaattttgaaagtgttgaggggttcagtaattcagttcctgtctccatgtgaagtgattccacaaaaatgtaccgtcgatgcgttgatgacaattgctggtagctgacaggtgggccccaagcagtcctgcacctgtcctactacgtggcaaccgcacacagaatctgagtacttgaaggacgaaggacatgcaaattcatctcccatcttgtttacaagaggttaatccatactcctacatgctttcacctttttacagttctaatcaagacattgaaagttcttgagctcgatcagaaattcagaattcatcagaattttgcagatgcctggtccagactggtcatcctgcttgtcaaatactcctactttttgatgctaagcttctctgcttcagattcctgcacacatttgcaacaaacacaacacttgtgtggctaattgcaccattagagaaatcagcaacttttgttgctttttgagtaggttccatgttccaatcccaacaaactcagaaatggcctcttctccttccagctcaaagtctttttcctttggcttcaagagagctgagagaggaatagaattatgtggttgtattaaaagagagcaaaagctgcagctcacctaatattcttcatcctggaagtctgaataattttctttctggtaaatgccaatccaatcaattagttaattgccaaaaaatcttttgtataaaactgatgaaatataccactgatgacaatttggtgaatgacagaggtagtgattttataattgcattggagaacttgtgattcagttaaaaaaatcggaggctctgaatttatgacagtttggccatgctagttgttcttggctgctagcttctgaatctgtgagagctatgcttcatcactgcggaatcctcaaaaccagccaaagatccagcagctggtggtagtcctgcagtccatttccaaccaagttgagaagttgtaatcagcagctctgaccataacactagtacttttcatcactggtcatacactaaaaccatcattaaacttacttgaaaacactatttgctctcctaatggaacacagtaccacaacaataataaaatgtgtaggtgcagccccaccccaatggccaccagatccatcactagagaattggagaaacaataaattattagtactattccatatactacattttcttcttactaccatttcaattcaaccatgaatgaaaaatgtgaaaatttttgtgtcggtgaggtgtgtgatttagcaggagagagagagagagagatttggttgatttgtttgcaagaaagaaaagcaaaaaaattgtggggtgttgtggccgttgatggacaggcaagtttcaccacactcctcccgccttctttaaaccctcctcaccaaccatctcatctctctcaccatttcattttatttttcatttttcaccacaaatttttcaccattccaagcaccacaaaaaccttgttcctcctcctcatctctctccatttctccccatatcttgattgagcttgttgagattccccatgcacattcctccctccatttccaccaccaccccaaatcttgttgggtgatctatctatctatcatcttcttgtaggagtactagtggagtttgttgatcttcacccccaccaccattaatggctgcaaagcttcactagaggaggaggactagtagtataccatcttcttcttcttctagcttgatctggtgctccattggtggtgttggtgcatcttgatctgggattctggggagaggttgagtgaatctttgggcctccatggggacggcggcggtggcggcggcggagaggccgaagcagcggcggagcagccacctgtggaagaaggcgctgctccacttctccctctgcttcgtcatgggcttcttcaccggcttcgcgccctcgtcgtcgtcgtcgtggcgggccgggagcggtggcggtggcggtgtccagccgcgccaccagctcgcggcgtcccacgtcgcggtgaaccagcaggtgagcctggtgccggatgcggcggcggcggaggcggccggggtcgggaacggcgcggtggtggacgtgggcgacgacgaggggggcgagggggcgaggcggatgctgatagtggtgacgacgacgcggggggagcggcggcggcggcgcggcgagctgctgcggctggcgcacacgctgaggctggtgaggccgccggtggtgtgggtggtggtggagcccccggcggacgcggcggcgacggcggaggtgctgcgcggcacgggggtgatgtaccggcacctcgcgttccggcccgaggagaacttcaccaccgccgacgccgaggcgcacgcgcagcgcaacgccgcgctcgcccacgtcgagaagcaccgcctctccggcgtcgtccacttcgccgacgccgccggcgtctacgacgcccatttcttcgacgagatccgccagatcgagtcagtacatccatccatccatcccatttggtttctcacttttcttttttcttgcttgattactaggagtatactttcttcgtttatagattgcaaattggaatgtgtgctaatccgaatgcttcttgattgattcttccatgttgatttctaacctcaaaggttgaacctctcacaatttttgcttgattattaggagtgctctttcattttaggttgcaaattgtggaatgtgctaatccgaatgcttcttggttgattcttcctgttgatttctaacctaattgtttttttctaagtttttcaattcaatttgagttcttttcgatccccatttcttccatgtccatgctgttcttcagggagttgaatctaggaaagaaaaccttcaaattcaatccatctaggtcatacgttttagatttttttttccttttcagatgtccaccacctactagggcttctcttaactaatcaccacttcttaatttggtaaatttactcaagccaataaaattttagtagccgtgtggttcgttgggggaagtatcattaaaggcacaagctgtcattagtggaggagaattagagtaggttagtgtgtgttgtacctatatgcttttatcatcatcttgtgcacaatactctgatgtgagccagggagtcaattattggatctagctttacaccttatttattccatttctcccaacaaactagtatgcatctatgcttcttttgaagattgaagatctcttgcttttgctcacccccaacaaccaaatatgttgcaaccactccaattagtttaattaagaccttcaacgtgcctgtggctcatgagccatgagcaaagcaaaaaactattaaaaatgtgcaaaaatgattagttaacagtgcttgcagtacaactagctgtttgcccaccgacgtgtgggcccatccctgtgcaacctaatgttagaaaatgcatggtgaatcacacatcactctccctatagcatgaactgaatgttgcatttctggtgctccccaaagtgggtagcaaaatgcaggaagaaatttgcttgaacacaattttggcagaaaatagtaaccttatgttaggccatgaccattgaactcccaataaaaggaggccccatccccaccatctgttgctttctatggccttgaatggccatttcatatgcagaacgagatctgcccaccgtttcggtgtagagttttccggaatggcgtctagttgccgtcttggattcggttggagtcggcagaatggttggtcatcgagattgtgcttgatgatttttcttgttcatacttgaataattgcaaagaaggaaaaaacagcaacattttttggctggcagtttgatgttgaacattgttttccttccatgttagctgtactccagtattgtgatcttgcagccagagaatactactatcatgtccaattctgtttgctctgagcctctcaaatccaggtcaaatctttcttctattttcaattagacctgattcaacaactggcggaaatgcctgacgtttcaccttgcctcttatctttttcctatccagctaaaatatgctaaaaattgctgttagtcctataatgtgatcctcaccttatcatcatttcttccaaactagaaatgcatggctctgaaacatttgacttgccttttgcctttactttttcaatagcaacatccaaactttgatgagtagtactactacatccgtcccatattacttgtcgctttgagattttgtttgtaatatttgatcattcgtcttattcaaacacatttggaattattatttattttgtttgtgacttgttttattatcaaatgtcctttaagtatgatttattcttttctatatttgcacttattttttaaataaaacgaatggtcaaacgttacaagaaaaaagtcaaagcgacaagtaatatgggacggaggtagtaccacgttcagtacttgccttgataaagaaaagatgtgtacactttgttcagtactatggtactaccactactgctcatatcatgtgagtgaatagtggtaatattcccaggaagaacatagcttttgtgttgaggggaacatgttgagattaaagcgctcctcttttttccaaccaaacttttgtgcatcacttcatcaacccatagtgcttagtgcgcgcacatcagcaacaaatgtggcgcttgggcgtcaaccaagcacatcccagagctactagcatcgtcacattgcatatattcttcgttgccttgttaacagttcgatacgacctgggatgtgtcacagaatttaccgcttaatacaaatgaggaagtgcaagtgtgcaatactgtgttctcaccacactccgcgcacattttggggcatgggttttgaccgtggttaccatacctgtttacttggaattagagttcgagagttcttttaacttgagaagctagaatttgtgtactgtttatccaaagaagcttcgttaaccgagttgagtttgttaatcatattgcagatgacctgaatacatgctcaataaagttttgcatccatgttaacggtcgcctcgtcccatagcttgttctgtctagtttttttagccctttcaaactttggaatttgaatccatttaattcaatatttgtcacttgtccgcatgtatgggcaagtggtggattttagtctattcccacgtatgttgaggcagttgcatgcatgcaataactcaccttgtgttgtgttccatgcctagtgtctagtgatggagatgggtgacaaaaaaaattagcataatagtagtactagattttatgatggaatgaagcatgtggaagatatttcaatggagttatggtgacatattctccttaaaatatctcagtttgagtgaagcctcttattttcaaatcaaacccaattaacccatgtgtgcttagtgtcggtggatgctaattctagtcaactggcactgtactctgtctaagaaagatgagattgatgtcatcacaaataattcatgcatttcatctttgctggtgcatatttgtgtaattcttacttaactatatgctactacggtatatgtatgttctattctctaactgttaacatgtacagggcatttggcacatggccagtggcaacaatgtcggcaggcgagaagaaagtggtagtcgagggcccgctatgcagtgactccaaggttgtcggttggttctcgagggacttcaatgatgggaccacccgtgcagtgacatataacacagaggcggacttgaatcctgctggtgctgctggcacgcgagctcacacgattgacgtctcagggtttgcgttcaacagttctattttgtgggatcccgagcgttggggcaggccgacgtcattaccagacacttcacaggttagttcatctccaatcttgttgtcaaattgatcaagctacactgcattttagtaatagcatcacacattctgcaacacttaattggactatagcactaaacgtaataaatagtatgcaaattgaggaagatttgattggatctgagatcacaatagttttaggctgtccacatcatgatagccaaatagtgaacctcctaaaacagaggacccataattgaaaaaaccgtgtatttggaagtttgaaaggagaaggatcgtataactaaacacttatacttgcagaacagtaacagatttccccagagctgaaaatcaacagcagatttgatttcttctaaaaaacatgtgatggtcaaattttcagagctgttaggaaattttagtttgaatagattcattaattttggttcttaccttgaggggagggaatatcatactttctgaaacccaagatctttcttacagacaaacttatgtagaaaagactctcccactaaacaacttaaatagatatattaatttaggttcttaccttttggaagttgcgcatttcataacaaaaactgagttcattcttcctattgataaaaggacatttataattcggaaaagatgaattatctgaccggctgatttcattataaattatttcgtaatcatacagatttttctgagttgatttgaccgccctagtgttacgcaattatcgacttcactttctatggaacatggtgtgcaacagttggcaatcagatgctccaccatcactttcatgcattcttttcttaaacttcagatttttatcttgttcaagtcacctactgacctactggtcacatccttgagctgcatcccaccagtgatactgattactgaaagctacattgccattaaaccataacatatctacaccgactgctgattataacaagataatcgagcccttcgattactcatcgaacttcttgccctccagttgaattacgctacaggctagttgcaccagaaagatcctaattcgtaaccacatcaagtttgctacaatcctagacttgcaaggaatgtgtattgatacaaaacttgtgagcttcattctgaattatgagctgatgctgatggtattatacttttcttgcacttctcataagccagaaacagttctttgaaggagacattcggaataataatttgcttaccattcccgcatcaatgcaaccaaagttaaatcttccttctcccaaataataatggatatacttttcttgatgtgattgcaggattccatcaagtttgtgcaagaggttgtattggaagacaggaccaagctaaaggggattccctcagattgctcccaaatcatggtttggcaatatactatgcccatgcaagttcatgcccaaacctctactccaaaaactcacaatagaaggtagggagagaacaagcaagaggattctccagaaagggaaaaaagtgggaagttgatgtaaatgtggtgaaaacaaaagaaaaggaagaaggttgtttacactgagtttttttccctttctttttctctcatttttgttttctttttagtttggggggccatgaattgtctgcggaaaatctccccccaagcaatagtatttattcagattcacttgtgattctttaactctgctcctctcatcttcatctcatctcatctcctgggtaatcttttgtgagggggatgttgcttcaaacaaattccccttgtggattgcaataatacactgtagaaatgtgggtgaaaatttggcaatgccatgagaattcagaagattaaggccttctcagaaagaaaaaaaaagagcacataatctccttgctgtatattctgacattgttttcactcttattctggcattgtaaaagcagaattaaggttggtgattactgtctcggatactacttactgctttcgtcataaaataaataattctagtacgtgaatgttcattgtgtcactgcccatactagtactagtactggtggtagcaacagccaggttcagacatcggggacaaagcctgaaaaaatatggggaatttgggtgtgtgatctgcagcaagagtgcagctgcagattggcagattgctcgtgcaagttttacagcgacaaacttttcatgtgtcgggccggcatggcagatgcgcgcatcgagattcacgtctcctcgtactcttattttctttctttctttctttcttctcctcgtcctctgaagtccaaattgtgatggaatcagatttgggcaaattatgagcatccaaatcaattacgagcaccaatatctggactgaatttcatttttggaaaaaaaaacactagatcaatgttggtgtaccctttttggcccacgccagtacgtgcacatggagatggtccctttccctgtaaagccatataagcccatacaaactgtttaggcccacacgaccaaacttttttttttcttgcttgtttttgttaaccgatccaacggtctgatgggccaccaaagaaggagatatcctactatggtaaggtgattacaacggtaaccgctaaaaacagtatgaattgtatctctatgctaccttaaaagttgagtagtttttctttcgcctccgtctcccaccacgttctcagcatgtgcccacacgcatagcttatgtacgtaaccacttgtatgtaaccactgaatctaatgttttattctgtaatcatagttatattggtttgctccgttttataaagtaggggtatgttactatctttgaaaaataaaatctagaatttccaaatcttatggtaactcgcggttaccatgtagtaagcttgcacggtaagttgtggtaaccgtggtctttgacttaaaaaaaaggggaaaatcacatgaaacaaaaataaaaccataacaccacattagaaaacaacagacataccataatattgtaatatccacaactactatgattatagctccagaatatatcacccacgagcatcagaccttcatttcgaagtaacaccaccatttagtcatgcaaaaatagagttagcttagcatatattttctctataaattttatcaccagacatcattacaaattgtttgggggattatttcccttttcttttcttaaaatttgaattcgaacaaattttaccaaaccttatcaccggtaaccctttccgttcccccactgcccatagaaaagcatggctaacggtggtttggaaaatctagttggtgcattgtgcttatttttaaggttgatgtggaaactgaaacttacatcgctgcatttgattttacaaatcgaattatagttaaataaaatatattatccaactttcatgtctccccctattgtttcataatttcagcccatgatgatactgttgtttgcaacacagattataagaaacaaaagttcaccaaacaaccaaactgtcgaaaagctgttataacaaacgagattatcataaatccaccaaaatgccaaacggagcataagtgagaggtaaaattttgatcttttttttttccttttgtggggagtttttttgggaagcaaggtagttatttttgcgattaaggtaattaaatttgattataatgtattactctaatagagaaaaggtacaggaaactaggaacaatatgtttgtgttaaaaacctgttaatgctaaggaatttgttaagagacacaaaaaggaacgattaaagagttattcacgacaaaagaaagttttttatttatgtatgcatatacactgtttcactgtatgtaggcaggcacaagcagatcgagttgtatttattttgtggtccaaaaaagagttagtacagcgccaaaagaattcaataaattcacgagtacgtacgtacgatctgtaccatagttttgcatgtaatttataaatgctaccgatagacgtgcccctggatgtgaaaaattttcagtttttttgaataaagaaaacatcactatgtgaaaaatatcactaatgtgtgcgtatatatatatttagtacatcatctgtggaatactcgtgagccccatacatgcatccacctcactgttcttgaatgtgatatttatgtttgcatgacacttcacttcgttcctgtttatttttcagttttttacaacactgttttacattaattctacatttttttctggaatatatagtatgttatttatcatgcacattttatatatcttttagatatgcgaatgatttacatctctgatcttgctaaaagagacatggccaataaatctaaaaatataaataaaataattttatgggacaaaactctatctcctttctaatgatatttaactaaaataccgaataaaaaacacaaaaattccacaacgataatcataggaattatgctaataattaaagtggaataaaagatcctgattacattcacattttatatacaaagatgaaaaatataaactgaggctgtgtttagttcctgaaaaaagttggaagtttgaagaaagttggcagtttggaaaaaaattgaaagtttatgtgtgtaggaaagtttttgatgtgatatgatgtgatggaaagttgagaataggggggaaaataaacacggcctgacctgtttatgtggtgtttggatccagggacttaactttagtccctgtatttagacactaatttatagtattaaatatagactacttataaaactaattacataaatgaaagctaattcacgagacaatttttttaagcctagttaatccataattagagaatgtttactgtagcatcacataggctaatcatggattaattaggctcaatagattcgtctcgcgaattagtccaagattatggatgggttttattaatagtccacgtttaatatttataattaattttcaaacattcgatgtgatagggacttaaaagttttagtcccatctaaacagggtattagcagcactcaaataagagatcaagagattcagagagagaactcaagaaatgtgtcatgatcgaatatgcttcatatatgcctccaagacacctgaacattaaggaaacttgtcgttaatgcagacaaacactgaaacacacggacactgacacaagcaagcgaagatcgatccaacaagtacttccaacgaccgacacttgttccgacgatcgatatatccatttcttctgttcatcatcgatcagccagtgatgatgaggtcgacagcattaggatactttgtgcctttcgttcttcagatttcaaaaagattaaaaaagaaaagaaaaagctctgcttagctttcatctgcagtgagagatcacatagagagagagaggggaaaatttaaggcaagttgattaattaaagaggagaaacttaaaaaagaagaagaaagaaagaaagaaaagagaagacccaatgcaaagcagcaaccaccttgagagagatgatgatggataggtatgcatcatccttttccaaagcagaaaacgccctcctacctatccatccatatatatctttgatcgatcatttgggtcttgaaagcatgattaagtgtaattaattatcaccccatcaatctgtctggataaatttacatgaaccatctttaattgtaatgcatattaacttggatgaaacatgcatggaaaaggttgagcctagtctatccagtttggcagaaatttaatccaatttctttgtcaagtaacctgaagggctgaaagtagtgtgccttcacctaatctaaagggattaattggcttacctcttggaatgtaccaaaagcagttaatgagttaattaatcaattgttctttgattcacctatttatgactattaatatcaaaaatcaaattatgaattctttgatcattgtataaaaagttttaaccatataagttaaatattttttattttgctacagtagaaagtcaaattgattaaaggcatggttctgtaaaattataggacaacaataaatgggattatgtatcatttccaaaacccctcatacaaccatcataccataattccctgtacctgaaatttactctttattaattaacaacatagcagacgaatttctcatcacccactaattaaaccagtacagctaactttaattcagtgatcatgcatgaacaacatactcaacatatggtactggggcatatttgcaagctagtggcgcacaataatatgctcaagtagcatatatgcatcattggaggcaaatggtacgtgcttgtagctatccagtgcaaactctacactacactgctctgtgataaattacttccagctaatcttaaaagcgactctgatactatgattaaagaagagatgcacataagaatagtgtgtgtatgatcgatgcagcttaatcgctcgttaggctgtcgctttgcaactcgtgacattatttaatctctgatgggaaacacaatgaaaggatggctctcacttgcactatatatatactactatataattgcatatatatgtgtgtgtatcattagtgtttgtttgaccatgattactggtgcttgacatgtaatgtgtcagacagttttaaaaaatttcggttctagttaactatatctaattacagggccttcgtacaaaaaagggtatttatatggctgagataacaggacaaacactcaggttgaagatatatttcaccccacatgcatgtactttttatctagttttaagatattttgaccttgatagttgtttaatttaaaatttggaatgcatgcatggttgccactgtaacttggttaggaacatgtacatgtgacattttgcattttttttgtttttatattttgcaggagctagtgaaaagaaagaattgtatgaaatgaaatttgccatgcaagaaacatatctgtacctagagaagtataaatttgatgtgtccctggagagaaatttgtgataagattgaatgaatattttaattattgaagcttgccagcacaacagacatgcatatgggagccgactataaacaagaaagagaaatataaacagttatgatgagttggcacattgtttgcaacatgatccatcaaataatttcctgccaccttgcatatagagaatgatatgatttattttgttcattagcataatcatacaataacttttctttatttttcatttttttaggccacctttgcaatactatacatatatgctagtttgctgtcctttcacactgaactaaaaatcatcctctataatttgtttgctcctagtgtatatatattgtaaaattgtacacaacatagatgcaggatttattggctgtcacagcttaataagtaggatcatatctataactgattaatgctgacacaacttttttgttagctgatgaagcactcaatagagtaacttatgactgaaggcaagtctccactaactatgctgagtgctatggccattcagacaagcagggtcctgatgaaggcccggccttgcaagttgcaactaatctcctctcctaatcccaacaggcaatcactcatatgcttgtggggttgtgtcatcataattcagagttcagataatcactgttagttacaacttcagtgttttggatgatcacttgcagtttgttatgactagtagtgctacatatcttcagtgctacatccacctgatcctatcaagccttaagaatacataaatacacataagcacacaagtccaaaataaatcatactatgagtaattggatgccttcaagaaaatatttctatattagcagtgtattatatataatggagattccagttgtattattatttcacacttttctgtctccaagctgtccacagtcctcttcccactgatgagagagagttgcaagaatttgcaagaagcaccaagaaagtgtacccaaagaagcatcttcagctgctctcaccagtcaccactcccatccaagagatcccagcctctactacaacagcttccaacttccaagaacccatttttttcctttcctcctcctcctcctgctctggctggctctgggctggccgtgccctcctgtcagtcctagctccagctagaatccctccttgttcatccaccaccaccatccacatgattgcatttgtgcagattcctggagaattaagctgtcctctcatgccgatctgacacaccttgttgttgttgttgctgctggttgccgcacaaccgaaaggggggattatttggccctctttctctttcctttcgcaggaagatttggtgattcttcttctgagggctcctctgtatgtgctctttcccatcccattgtgccattttttgtaggatagatctggggatgttgcagatctgatcggtaattttctttggttttcttcagaaggatttgggaggatggggaagaaggggaagtggtttggagctgtcaagaaggtgttcagccctgaatccaaggagaagaaggaggaggtaaatgattcttggggttcgtttgaataggcccttttgtttcgaatttagaaagttcaatctggattcgatcaggatttgtagttttccgtctgaattgcaaacaattctgtttttcagtgaggtctcaattgtgttgtgataaaagtttcaattttttcttgttccaattagcgatgagcacattggttctagttttggacctggttgatatcaaaatctcacttttattgttactgctttaagggaggcgctcttttggtgaccattgcacataatttcaaaatcccaaggaattttcacccatgtcatggtttcaattggcattctttaattgccattcagtaatttgagaagaatacataacatatttcctcttgaaattgattgtcttcactgatttatatgaccaaattatcatattatcttccgcaattactatgtcttactccaatttgagctgaactgcaaccacaactcaaactttgtccattgaaatgaacagagactgaggagaaaattagcagctagtaacccgaacccgccagatctaaccccttcggcttctctggaagtcaatgtttcggtgccaccccctccacctcctccacctgttcaacagattgaagaggttaaggtccctgaagttgagcaggagcaaagcaaacatgtcactgtggaggctgtacctgaggctgtccccgtacccgcacagacatcgtcattgccacctggtgtatcaagggaagagcaagctacaatcaagatccagaccgccttccgaggttacctggtaatgtgaaatagctcttgaattcagctatctgattgcattttcattacattttactcagttgtctgagaattcgtcgtggctatttatttcatcagctgctttcatttaccactgtgttggtgcaaatattacaaaggtggttgtgttgagttttttatttatgctggctgctgattaggtcattgcaatttgaggttagacgctaaaagaacagttcttgtatagttttgtgattttgtctcctcatcaacatgactgcacatgaaagcaaatgtctgctggtggccaactggccatcctgagattttttttctcttttcctgtagaaattttaggtattggcagctcaccaatcaatcaaccggtagttggctggttgctgttaatttgaagtgagactcttgattgaagtatcttaggtatttacagttcctgtattcttttcataatgttgtgtggtaaaaacaagcttctatgattcaggggtaaacttttcttgtgtgacctgtgcacctggggtaacttcaaacttatagtttggttcctctcctttgaagtagtcgttttgttgtttatttgtttctgcatatgtttgttgacatgatctacgaaaaaatcttggcaagtattagaaattagttcttgatcaactggcagttggtggaagccacctttcattactaattttgattcttaatcattttttgatgttgatggatttgttggtcaggcttattgatgccccttgtcccttcatacaaagataacatttcttgaagtcgacttagcagcagtatattctcttccttggaaaacatgatagcaaattttaaaacttgacctagcgagaagtaaaaattttgttacttctataatatattgaccatttcatcgctgcaataatgcaggcaaggagggcattacgagctctgcggggacttgtcagattgaagtcactggttgagggtaactcggttaagcgtcaagctgcaagcactctgcgttgcatgcagactctagcacgggtgcagtcgcagatacgttcaaggaggctgaaaatgtcagaggagaaccaggccctccagcgccagcttctgctgaaacaggagctggagagtttgagggtaggcaaactatctcaaaaccttgcaatctgtcgataaaatatttcctaggatactattattattagttctattgtaaataaattttgcttgatgagaactctagtatgcagttgttctacatctctcagaaaatcataaaatatcattgggagcattaaacatactctatttgtgaatcatatcagatgggggagcagtgggatgacagcactcagtctaaggaacaaattgaggcgagtcttataagcaggcaagaggctgcagtaagaagggagagggcgctcgcatatgcattttcacatcaggtagatatctgtgcttctcaatgacagatgccaatctgtactctgactcactcaaccacacatgcttaaaatgtttcgaaacttctgtcttctgcagtggaagagcacttcaaggtcagtcaacccaatgtttgtagaccctaacaacccacaatggggatggagctggttggaacgctggatggcagcaaagccttgggaggggcgtgctgggaccgacaaggagagcaaccttgaccgtgcatcagcgaagagtgcaagcttgaatcttggagagggtgagatcacaaaagccttcaaccgtaggggatccaagccagacaagtcatcaccaacaactccaaagctgacccgtccagcctcccgtcaatccccttcaactccctccgctaaagtgtcaccgatctttgcaaagaagaaatccgcgacaccgaagaatgggctctcacaggttgatgacgacgcgaagagtgtgttcagtgtccagtctgaacgaccgaggaggcacagtatagccacgtcaaccgtgcgtgacgacgagagcctcgcaagctccccatctgtgccaagctacatggctcccacaaaatctgcaagagctaagttgcgcctccaaggatctgcagtgaccgatggtgcagagacaccaccggagaaagtagcctctgttggttcagtgaagaagaagctgtccttccaagctggaatggcgccgccttctccgatgaggcggcattcgggccctcccaaggtggaggtggtgaaggacattgctgagccaccacagccagaggccttggtgatcaatggtggaagcaagtgactcatatgacaagtaccaggagggagcaatggattctgcagatatatttcatccaatgaacaaaggtttaagattatatatcagctgtatgagttgccggcattgtttttccagttataaccacattatttgctctagcagattcgcaagtaccctgccagtcgattccatttgttgtttctgtaaaactatatcgatttgtcacttgaaacctttggtgtttgtatgtaaacaagtctcttctatttatgtgagccacatatttctttttgtgaagatccctctgaagtctgaacagtgcaatcgcagtttcagagtttgttgtattgcacaaacaaagcattcctatctgtctaaagaccatcagagaaaaaaaatattcggacaagtgaaaacctaatgtcaccagatcaaagcaaaaaatcacactatattaataatcataagaaatttacatttgaagttaaaattccacaatagcaaattccatgaagttatctcattgtgtacaacaaaaatattcctctttataacaacctgatcaacatctaagttataatgctgaaatcttacattgatctacatatcatcatcaaagaacaagaagaacaaatgaaagaacgaacataaggcgcttcaaatgttcaaattcatcgctacgactggttcttcagtcaggcgtaaaagaatctcactaaactttgacctatagcaatcttcaatgctacatttgttttttagtcagcaacatcttgatgtggaagcatttattgggcaattatttgcaaatttgcagaaactgcatttccacctctcttcttcactcacaaatttaggctcccgtgctccttgccagaagctgaggacttcctgaaattgatccttgagccacctagcatcataagagaactggtattcttcaagcagggaattgtccgcttgtagctcatatctgcaccagtttagcatgtcatttgcaagagctcactacactagtgattaggcattcagtagtcaggtactacaggtcatgtgcaggctgtaaacctgtaactcatatttacctcaagagcagctgttcctgagaccgtggtagtgtatggcaggtgaccttgaaatatttcaatacatcttctaaggtctacaaagagaaaccatgtcacaagttacaactcgcaaagatactagaattataactttgtcaaaaagtagcatgagcatcctaattttagcaatcacttgctggaatgttcagtatagtatattagcactatactgctcatggaatggaatgatttcccataaacagctggtaattcaaatcagagtgcctgtacagtaacaggaaacaattcaaagtgtagaaaatttgaggcatggaattggcacctttgcattgagccccaacaatctaatgtattgcttgatatcgtctgataacaagtaaccggggtccaggtcaaaatagctgaagaaattctctgctgggaatttctcactgatcaaattgtcccatagatacttgtaacacatcacctgaagcctgccacaaaaatatcaaccagagaacgatacaaacttcacagctgcaagcttgcatcatcatagagaggcaaaacagtaaaactagtagagaactccacatactgatactacttatcatctgaattttattcttaaacagtaaggctcaccaatttaccttttcattttttctagataatgtccaatttaccttttcatacgaaataagatatatctgtctcttagatggcgcaataaatgggataccagtgctactcttttttttttttttgtaaaaggtgtacttgccaagtatcatcaacttggattaatttatccacatactgaataattgaccccagagttgcttcctaacaatactcacaagatactataatcagaatgaaaggatactaccagtctaccattacagatctaggtacaagctaaatttgtttgaaagaaaaatgttaagtatttaagtgtgctctagcaaaaaatgatctttgaaatcttctttgtaactatggtgtgattgtcaatggcactgttaatataccaatcaagcatcaaatacaactttgtataattccagatcaaagcagaagtcacttgaagggaatcaccattcaccattcattattcaagggaacacgcatttgaagctaagcttaactatgtactactacctgccaataatacttttgtggtgtctacattttgtgattaagagcaaaccttccatttcttttttgtgcttctaagggaactgttggtttgtaacgtgtctttgtatccaccaggataggatggactgaaataccatctggaggcattcggagttcatcaataacacctatcatccatgaaccttcaacgaccccaattctgcaatgacatgatatagaatcaattttactgaaagtaatgttaacgaaataaaaatgttttctatcctctgtaaatcaacaccgcagccaagatgcactactggtttggagaagtatacacataagaacatgccaggtgcttacacggggatttccctagtgatgccctccaacattaactggtttgctccgacgataaagttcatgaatttcactgcccacgattcttctgcggatctaatggtgacttcgactctctcgataacctgctccaaaatgaagtaaatcaaaaccgaaataaatcggtagttagctcccattcccaaataaaggaacaaatggttgtcttcttcagaaattgagaaaactcaatatggctatgaagctcatgataacatcaaatcaatcatacgcaatcactagaaatgtgacttaatttcagataagatcctgcatggtataacatcatgatgaacaaaacaatggcaatctcaatatggcattatcatttcagtgcatttcaaggtagaaaaatgtgaaggcagcattctgcttggaagatcccaacactgcagtgcagggctcacctcttgctcgagctgggcatggcgctcggacccggccttcatggcctgcgtcatctccggcttgccgtgctccagcacgaactcctgctgcttatcgcaccattcctgccacaagggcgcacgccgccgtcagaatcactgagaatggaagaacacaaacacaaggcgatgcagctttaccgtggcggtgatgtcggtgacggcgagcgcgcggcggtcgcggaaccgcgcgagcagagaccccctccgcggcgtcgggagaggtggggagtcctcgatgtcgccgccggaggcggccgagtaggccgcgcaggaggagagctggaccgctcggcgggcggcggcggaggagaggaccgggcgggatgctgccgcggcggcggagagcgcggcctcgatgagcgccatctcctcgtcgctgacgatctccacggggaggtctccgatctcactcgcggtggcggggggcggcgcgtcggcggcggaggagcgcatcggagtcggaggaggagatgggggtcgggtcaccaaccacacaaaaattttgaaaattttgaccactgaccgttcaaaataatcctctaaattcaaatttaaaatttaaaattgacgtcacagccatttaggcctagtactatactccctccgtttctaaatatttgacgctgttgatttttttaaaatatgtttgaccgttcgtgttattcaaaaaatttaagtaattattaattcttttcttatcatttgatttattgttatatatatatatagttttgcatatttcataaaagtttttgaataagacgaacagtcaatcatgtagtgaaaagttaacgtcaaatatttagaaacggagggaatattaattaattgatcaccgcaatccattgatcataatatgaatttcagcaacatcttctttttcttcagtctgcgaaaaactaaccgactgaatcttaccctctctgaattctgaaacatgaacggatccgaatttgcagatatttcgctgtgctcaatctcttcataagaagaaatgtggaccgaatggctcaaagcttcaattccattgttcaacacaatgcccctgcgttgtgccaactacatgaacagctctgggttcttccccatccagcaagcagcatcagatattgtcactgagggtgttcttccactccatcttgcagttgagcatgcctgtatgcataagtacatgttgaggatagtttagctgatgaccacaagaatctagagcatgactaaggtgtaccatatcaacaagctcatccatctgctgtgcctccttgagatggtttgttgcctgaaatatgaccctacattttcatcagttattgttatactttggtcagcacatgacacaatagtaatgaagtttattctgttttattatgcctcaaaccggttctggaacaaatattaattgtttgctgagtgttaacttgtgagatatatatagttttccttagctctgcatttgtgaaaatctcattcggttgaaacatgtgtcttgagggaaaaataaaggggaaaaccttttagatgcccaaaaaaaaactatgaatgtacagaaaagttgcttttgtttcttcagttttatttggatcatggtttaatgggattcagagaccaaatgcaaccattataagttataacactgaaagatcttgtggtggtggtttctgcagaagctcttcctggataccattaggctacttgcaaagtacacagagaagattatctgcagcaacactaggatgcttcacctagtgcatactggtgtgatggtgtcctctgattatctgtacaaatttgaaacaaattttcagcaatgtagttgtaattaggttttgatattcatcacacaaccggcctgcaacacaatctctcaagcatatggaggaaacatcacatatatttcttttcacaagcaatacaaatattgttccatgcaggaatttggcttgcaacatagtctgttctatctgtagaagagtatgagaaggaattcggttctgtaacacaattattctatctgtagcaaagtaagtatatgagcattctgctagtttaagaaaacatcactcataaagaagcaaacgttgattatataaataaatgtaagtctgacaaaaaaattgaggacaatgatgacaggttggaacaagttacatactgttggttttttaatcaaagctgatagtatccatcatccgactgttaccaaagatgcaaattaaggacaacaattgatggactgacttgtggagggacataaatattcaaaccaagtggctgataaataagattacaatctaaaaccatatcaaagtcagccatacatacaaagagtaaattaaccaactacacttactaacaataaatagtagtggtagtaat

SEQ ID NO: 6460 - DNA, 14646 bp, Oryza sativa
attcctgcagccctgtctcgttaaaattcgaagttttttttttctaacaaaacgatcattttcgtatttttttccatgttttgtttttacatgtgcttcttaaaatcccgcgtttcgttggtactgcattccttttcaattcagtttgttaactggaattccttttcttttagtagaaccaattgttgtgggatttaataaacaacgagaggtgctgaagcgatactagcatgtgaagatataaaaagattttgtgctgctttcttttttccaattcagtttgtttactggaatttcccctttcttttagacaccaattattgtgagatttaaacaagaggagaggtggtgaaacgatactaagccattgtttagttccaaactttttatttaaacctttaactttttcatcacatcaaaacttttttttttacacataaacttctaacttttccgtcacatcgttttaattttaacaaaacttccaattttggtgtgaactgcccctgtttagttccaaagttttttttccaaacttccaattttccatcacattaaacctttcatacacacacaactttactatcacatcgtaccaattttaattaaacttttaaactttagtctaaactaaacacagccctaaacacaccctaggaagataattgaccctgagcacacgaagcgtgtggacgaggaaggtcctcacgtttcggatcgggacgaggcactcactcacacatatccttactcatactagttgtccgtgactgggacgggtgtatacattaaaaaaaaccccaagtacgggtgggccccacggctgcggccccctcttcactcctattgggcccaaggtccccgaaagcgaaacggaccatttccagtaccccccggtgtggttcaccggcggtagccggtcgccgcccacctccaccctttcccaacacggaagggaggctccgatgagggcctcatacgaggtcatgtaaacgggtaggtttaaggtttaccacatctggcaagcctagctagctagctagtcttcccaattccttttgttttcccttttttataattttatttacttttaccatgctgttcaaggtggttttcttggagtcccattggatcctttgctactattgtatgtttctttttccttggtgggccccacatggcaggatggttttttatctttgcctgcagctgctgttgtgtcctgtgtgacctgtggtcgtttttggagctgtgtatttgtatggttcctgtcagcttgcttctgctatcttcttctatcgcctttttccgtcgttgagagattcatgcctatcctccttggcctcctgtagctgccatccacacgatctctcaaaatgccatgcgcactatatgctgtgccgagttttatatttgttctgtgtctacgtcaacctcgaccacattagctatagcagcgagtagtttgaaagaaaatgtgaatctggagacggtattctgtctgcaccacacgaattttattttctgttttcttttttccttttcttttgttcattggggaaaaaaatatcctgtgaattgaattgaattgaagctgttgtcgttacgagttatgaaaattatgtcaggtagtctgtgagtctctgtgtgcgcttcttcatctggctttggtacgcgtgaagcacgccttgtttttgttgtcaggcggcaatagatagattggttggccaatgattgacgcattttccgtgggcttctcgaaaactttgggtggacgaaaccattgtttttaataattattgctccgcttcctcttttgagcaagtccctgtggtcctttttgtcggtaggcaattaggcattgaagtatctggtagcactagtgtgattttgttggatggagctaattaatataaaacctcgtttagctcatcattcgatcattggttcttggataactataaatatccgcaactactagtattgaaaatatagatatgaaaacgtatcttcctgcaaatctgcatagcaaatctttatatttgtttttttaatcatttttcagttatttaagatcttgatatttgattgtgcatagcctaggaacgctgtgaacggagagagtatttggcaggtgcacatcctcttcaaaatatataacatataatagtatatatgcgagtaaattattcatcgatccccaaaaatgttttgacttgaatatgtgaaatatcaatatatgatggccatgtatacacgagatagcttactgttttgaatcaggcctgccaataatctttacttggttgaacttcaacctactaaatctctaggtatccatcgatatatcatccattgaactggcaatcaacagctatcacaacatataggtccactatgtacactgttcaatagatattaactactattaattaattataattctgaggacacgtagacggaaaataacagccacgaaataaactaaacacgtatccttttcttttgttatctagacacggaggaccggatcgctcattgatggtatcattttgatctcttcgatccgttcctttttccggtaccatctatatgtattaactcaaccaagccggccttctaaagaaatgaaaatatcgtacacacacatatatatacagctactccgtatttacaaatacatcttgtatatataaacagttagtgtgttcgtactctcttatttatcaacgaaatgaggcagatctcttctgactattttcatcaaagaaaataaagagaccatgtgatgatcatgccgcgtgcgtgcatgctagctaactcctttctttccgggaaagaaaatctcttctttaatcgtcgtaaagaggctacagtgttaggataaagtagtacttttggtaccctagtactccctccatcctaaaatcacttttgtacttcaacacggttttcgagattctattttgaccaacgatatttataaaagatattttaaataaaaagagttatatactatgataatttatttaatgataaatctagtaacattaattttatatgattgatcttttttatttttttactactaataggtaaagttataaatatttgacttaatactatgctaaaaatacttttattttagtatggagggagtagtaaagggtacagtccaggtccagctcgagaaggcactatacactgtatagcactgtacattgtgtaccggcataggcagagagataagttgcaaattaaaccaattggattcgatcgatcgaacaggggtcccatgatcatcacatatatccatgatcatcacatatatctagccattgtatgattaattgcaaccatcttttgactgtagattttgtcatcctgaaatttaacaaattgttgttggatcggtttacggttggtagtttgcacgtccgtgtcacgtagaatacgacgtactgtacgtacatatataagtacttgcaaattaagcacatgagaaatatatatataaaggtttgtctagctacctaattaagatggattattgtaaagatatttcttacacatttatgattgggagagttcatatgtttccatttatttgcatgaggggatggaaggctagatatagaaagtcttcgcacgaaatatatcgtttggcggagttaaaatctgtatcaattctcctctaaaaaaatctgtatcaatcagaaaagaacggacatatacgggtatacccatttatgagtaagtacttgcaaatcaagcacgtgagaaatatatatgaaggtttgtctagctacctaattaaggtggataattgtaaaagatatttccatttgcatacgcatgattgggacttgggcgagttcacatgtttccatttgcaggaggggatcgatcggacgtattccggccggccggcgtccggcgccgcccgtcggcgcgtggccataaaacgcgacgagggggtacggcgtggtcctctacatgcacggtgttgggtcgccagccagccagccttatcttgctagctgtgacggcgaccacagtacctgccaccctgggggaattaatctagaggtaactaactcagatttaatttataaggctttgatggatggaagagaaaacgtgcgctcagatttagactttgatggagaacatttcttgtgctatgtctccctgttttccctcggttgatcatgatactgcactctttttcatacaacaatataagtatttatagattggtatgtactccctccgtaaaaaaacaactctggagctgtctagattcttgtaatagtagtggttggctttttttttttggggggagggggggagaggggggtagaggttaaggttagaaaaagcaaactttagtgcttctaagagtaagtttaatagaaatgcttactatttactctttatttctcttgctatgaatttaatgaatatttattggagcatttgtagaactgttcttacatgagagcatcacctcttactttttattgtctttttcttccatataagtatataacttgcttataactcactgttgtttttctctaattaaatgagagatgaatgggggtgagagaatagttagaggtaagattgaaagaaatttaaatgaaagatttactgatgggtaaaaatacttatattcctggacaaaattcaaatactttgtattattgaacgatggggggactaaatttgccgacaaccacctcttcattcttactgttcaagcgttcatcctttccctctcttatctgtgaccccacggcatctctcgccgagttgattgctattaatgcctcggccaacctcttcacctttttgctagggccatcggtggcgaagaagagcaactcatcggagagaatgaatacgtacgctaatatgacaatcatcaaatctttcaagatccaggtgacagaatcttaagcattctaacatagtgccacgtaaaggaggtaaaattgaaacctcggttggtccctttttgctgccaacactgatgctaatgctttaataatgaccgtacaagtggatccttttacagaagatctagttgccccctcccccatgtgttggtgtagcgtgtttagcagtggcggtaagtactccagtacactcactctgtcaaaaaaaaaaaaactatttccctttcagaaaacttaaccaataaaacgatgtgatcttttatattgtctagattagttgtactagaaaggattagattcccgtataaattaagtatttttagaatggaggaagtatttatctagattaatttgtcagatcgggttcttttttagagagagagagggggaggataaaccaaatgtgtatatgagaggacacaccggctcggccccacctgtcgtacactatgaccacatgccagatttgagcctgtcatgtgggcttcactcccccggcatctaaatctacctctcattttcgcctcttggaaccctccaggggcaggccagcaaaagactccatatgatgcaggtcgctctgtgattgtgatatcttagtactgtctccccatttctgaataagttcatttttcattcatcacatgcatataccaatacaaagttaaaaaatattaaattacttcttatcaaatttcaatataactattcatcattttataaacatttaatataattattttttattctcacaagctccgaagtgacgattattctgaaaacgaatttattttgagataaatagagaaaactaaaaatgaatttaatatgtaacggatgaagtaggtttcctctttattttcttctctctttcaacaaagttgtaggagaaataccagtactagtagtactatatctgatgggattaattagttcttcgttgggtttaggaggcgttgattacttgttagagcactctgtcctgatcaaacctatcactgtctggcaccgtgcctggaggtttgcctgtcgacttgtgattggctgctggtggggacacgtcacccttagaggggttaatttcttgaggtgacctgcagcagctggggaccgatatggaatagaaaaatggcaagataccacatatgggaggtactcccaccgtaaaaaaaaaaaagctaacctaagataataatgaaatataatttagaacaatgaatctggatataaaggttaaaacccgtgattcgttattctagattatatttcatccttatttagattggtttttttttaggactcagagggtagagggtagagggaagaaagcacatgattttatttaagagatttgacacacacacggacgatattggtttgttcgttggagaggaaaaagagatactgttccaatattttctcagtagctggatttggccctctcttttctcctcacatttctgccatgtttattctctttctggaactgggtactattatatataatatggattttttttgcaagaaatatatcatatggtttgtttaccacctgaaaataataagaggaaaaaacttaagagggtaattatactcactccttctctaaggctgtgttctttagatgatgttgggagctaatctctcgcgcacacaaaatagagtgacttattaacgcatgattaattgagtattagctattctttaagaatggattaatgtgatttttaaaattaactttcttatagaaaatttttataaaatatatctgtttaacactttgggaagcgtgcacgcagaaaacaagtaacttgagttggaccttgtctagttccaaactttttcttcaaacttccaacttttccatcacatcaaaactttcttatacacacaaactttcaactttcctgtcacatcgttccaatttcaaccaaatttctaattttggcgtgaactaaacacacctttggtaactgcagctgccgaactcagcctaagtgcactcttgtagttcaaatttaaattagaagagtgttcttattttagaaaggagaaagtatatcggtactgtttggtactacatctgctaattgatttctggcatcgtggttgggtaaaagtggacagaaactgatacctcacatgcatgccacactttttttttaactgcttgtatgtattatagtagtacaactgtctctgcctaagaagatgcctgaattggcaggtgactatgagcattccacccgtactggcggtcccaaccgtccaccagtaggaagagggcatgtattgtattcctagttgttgcatctcattttcgctgttgcttttattttcttactcatttgtactatttattccctagctagatagaacccttttgtatgctccacaccaaagctaaagtaataaaatgctttctctctctctctctctctttatggggaaaaaaatgtatagaattgagctccattgtgtatgtctctggttcagcagcaagaagaagatggagtgatggacacctgagcatatcctaagacatggtatctttgcctccattcctttcaccagcaggtcagtgtcttaaaacaactcacatttgctcaaaagatagcattcactaacctgtggtagcaatatatagagatattcatatttttttgcctgtacaatgatttaagagtttatgagatgctgctgtgaatttggatttgcttttcgaagcgcatttgttattattttcttctactaagactgctagtcaggcagtactggagttagctagtacaagtgccgtacataatgactcttctttagttttcttactaaagtgggaaattgaaacattacatggaatatttcgtgggtggggccaaccaccccgaaatggaaatctggggccctcaataatttcgcgcatcgcaacataaaaatagtggctgtgctgtgcgtaggttctccattggatggaactgatgggccaaccctagttttgcatcttctccttttgtttttgcatcttttctcactttacttgctgtcaatgcaacaaaaaagataggataactttgcctcatcaatcccccaacagttccttgtctccattgctatacagtccacacttcctttcctgtagtatgcatctatcaggaaaaaataaaagaagtttgtctccactaaagagagatataagaatgattcaacaaggagtgatttggtctatcacaatatgattagtaataattaagttgtgttatactccatcagtttcaaaatatagaaaaatattgaattctaattttgcaccgcaatatagtacttctacgcgatatccatggttctcattccactaatccaaagccaaccagatgcctcgaaagggaattcaagcaatccaaaattcaaaaattgacaactaaaatgactaaaaaggaatcttttgacataaccttagtatctgccaaagaacctatagcaatccttatattttagtagaacggaagaaatatatatatagtaatcttgtttagtactgtaaatgttgtaaatgtttttagacgtccctagtttggtaaactagtttacaaatgataataaaatacacaataatcgcgagagacatattataggtggataatatatttctgtttcaattttcattttcatttaataaattcccgatgggattggttgatctcttgttgggcgacaccaatcgtatatgtactatcgatgaaaatgcaaccggccaagcaacacgagctgagttgtacgtgttgctggcaagacattggcctggtagcaaccaatcacttgcacacacgcggattacagtatcttattctctccaatagtcttgtctatatgtacaagacgtatcacagagaatcaccggtgacagcaatgttgatgtgcggcctagattaagtagcttgtgctatatacgattccttttgtttatccaatgttagtttcactttagatgtcaattcaactataactagctaacccagtgttttagtatgcgtttggttggaggaataggttaggtcggattgggtcgaacccctttttcataatgattggtttagggatgggtgagatgggttagttcccttagaatattcaccttcgatccgggtccaaatcatccggcaaaaacaaacaaatgagttcgacccacctgggttgggcgcacggcgtgagtcgcgtcgcttcaccccgcatgcttgcgcgctcggtcgcctgcttgctcacaccgttacctgctggtcatgctcctcgacccaccggcttgctcgcctgcctacgctgctccttcgcccgtaaatgcaagctcctccgttcactaggccatcgtcacacacctccgcccgccgtcatccatcttgcaagcccgccctcaccgctctttcttttgctagttgttggcttgcttgtccgcccaccggcctattttgcataccgcttctttgcatgcttgcgaattacaccggcttgcgtgctcgcaagcctgcccggttgttgacggtggttgcaaacaccatccatcccatctctcccttatccttttaataaccaaacaaaaaattggaatcgtccgatcctacaaaccaaacatgtgagtgaaatcatcctaactctaaaatcaggggatgtttcatctcatcctatctagtcccgaaaccaaacacatgcttaagtagagatgccatgaagttgtaactgaatggtatcataaacattttttaactgattaatgttggatctcgatgtatgcaatggctggtaactgttctcttatgtttcttatagtttctagctagttctcaaaacaagttcgttctagctatatatgaaactaattcgatcgctgattttatccattgaaacgatgatcctacactacttttgagatattaaaacagcagggaggcccctgatcgatgatcctactttcaggcagccgatcaatgatcaaaattaattaaaaaattcttcccttttttttttggtactgaaaggaaccaaatttggtcaaattttgtacaaactcaaatgacgaaacctcgtgcgttttccataattggcgtgcattgaccttccgtttgggggtaggatagtgcatcactatccgtgcacggttactgtgtgccgaaaacggcaactctgtataccaatttctgccctgttcaaatccaactaagaattggtcgacccttttttttttaattccaagtggttgcatgttcacgcaaacacaaatgcatactattatatgatttgaaattaattaataagaagtgtttttctcgcagattgcgatgtctgcatcactgcaattaagccattagcatacgtgtattttgtgaacaggtttctgctagtgactcatactgctattcccagctaagcatcatcaccttgcagaaaagatgagacaaattaggatgcatgcgacaggataatgtaatgcctttgtcagctctgatagggacgattttctcccccttttatctctctaaaagaactgataaaagggacaatcttttgtgaatgtttaatctacaaagtataacatgcaaacactatggactaatattattactgaattgagaagtacaagatggtaaatagtattatgtttgacttaccatcgttaataggggtttgtgaatccgaaataatctcaaaaggaatgcaattgtagcattttttttgttgattttataatttatactccctcgtctcatattataattgttttgactcttttgctagtaaaatttcattaagtttgatcaaatttatagaaagttatagcaacatttcccatataaaacaaacatattaccaaaatatatacaatgttatattcaatgaaactaatttgtatgtcgataattttttctataaatttggtcaaacataaacaaatttgatgcaaaaaagcaatttttttaatgtgaaaaacccttattggaagaaacaacaggtgtcgactgataatgatcattaggcataggttagtttctctggactcataagtctttctagcttcgccactaaacacaacaaaataagacgtcacactcttctcgtgcggcctacaaaagatatataaatagaataaaagaccaagagtcctaatagcaaagattagaaatcctactagggaactaatctaaatatattacatgctgaaattcggatgacatatttaaaatatatataaatcaaacttaatagttttggataacaattagtcaaattgcaaatatatttggtgtataactttaattagcatatccatatttcaaagtactttaataagttgttgattttaatctattcaaactatatatattagcaatcaatggtaaaagtttaatttgaatatgtttcccaaatatattaaatacatcccataaaaatcgcggaggtaatttgtgagcggagattgatttcggttactatatattcatgtctctaatacaactattaatttggctagatttttaatactatgttataacaagtttatatattacaataaataactactttgcaagaaaaatccaatgatcttatttctcaatgccaataaaaaaacacgagtttcaaattgatgtaataacgataggtttgatacatcacttcttagcagttgctttctcttggccctatattaatcattcataaacaggggcggatttaccgtgggggcgggggggtcttgagaccccactaccatccttgggaccatggagacccccctaagcccccactaaaaatttcttccatggatgcgccgtttgtgggagttgagatcggctggaggagaagctggaggttgaagacgatgttttggcgacttgggccggctatgaagagcagcccatgagcttaatcttccaattttggcccggcccactcctccaacctgtagctcaagcgcggcacacggccagggtttcctctccctctcccttctctgaattccccagccgcccagccgccgttctctctccctgtctaccaaatccctaacactagtgtagtagcgtttgaccggccatggacgcgggccgatgggcgaccggcgacgggaggcggccgtggtggcgaggcgcccgacgcccggtggcgacaccggctgacgagggcgggagctaggaggcagcgtggcccgtggccccgtgggcgtgcggcgagcggcaagcaggcggcggcggcggctagcgagccatgagcggacgaggggcccggagggcgggaagccgggaagggaggcggcccgcggccaggcggcggtccagcgccggcgcgcccgccggggaggtggcaagacgggccagggcgccagccgccaggcggcggtcctgcgccgacgcgccgacaggaggcggctaggtgacggtccagctccagtgccgctgcgcgctcgcgccgacggggaggtggtgacccgcgagccagcgaggccgcgagggcgcaaggacgctggtccgctggacgcagcttgcagcagcagcagccagcagccagtgattgaatatttgaagttgaaattgccaaattggtaacctatttacctctaatactaatagacagtctaaatttgtgtctcaagtgaggtagtgattaaaatttataattgtttctacatttttagtttgtcaacatgccaaaaggaataatgcttatgtattattctagtttaaacaacacagatgccagtaatcctccacgcaaccacgagaatataagtccgctaaagaggtctagggtagagtctgttcagccccacctactattttttcctagatccgcccctgttcataaacaattaatttacacattatctccttccgtacctcgttgatactccctccgtttcataatacaagggattttaagtttttgcttgcactgtttgaccacttgtcttattcaaaaaaatttagaattatttttttttgacttactttattatccaaagtactttaagcacaacttttcgttttttatattgcacaattttttttaataagacgagtggttaaacagtacaagcagaaactcaaaatctcttatattataggacggagggagtatatgattgtcatccaaaggcatgtagttattatgcgtccaaccaacagtattttctgtcccaataatgaagtgattcgcccctagcatagtgcatacatatatatgtcgatgcactcagcctatagtttaactaaataaactaaatatttatgtgcgccagaaaaattgcattttaattaattttgtaataattaaactagagtgggtataacagttactccgaaagtgattcgtgcccatctctatacctaagctacttaattagctttgctataacaagtgtgttcgatcgaaagcaatgctagctatatacagtatgaagcttgagcagttaattgttgctaatgtttttcacattagattgattaattgaaccatgtgcaggcgtgcagcctcacgtgtcctaaaacctaattaagtgtggcatctttttggcgtatatgtacatcatattacttctagaatagcatggcctatcaattacttactccctccgttttttaaatagatgacgctgttgacttttaaacatatgtttgacaattcgtcttattcaaaaatttttatataaatgtatagatataaattatgcttaaagtactttgagtgataaaataactcacaataaaaaaatataattacgtaaattttttgaataagacgaatgatcaaacatgtgataaaaagtcaacggcgtcatttattaaaaaacggaggtagtacttatttatgtgtgtacgtacgaatcatgcgtgtatttttaatgaataggcggagtatatgtatacatacatgcaacttggcttatatgtaatattttgtatagaatttgtagcaaaaaaataaattatgtgcgtgagataattccaagatatatgcatgggaaacaatatgatttgagagttgatagtatagcttgttcattcaataggatattcgagagtaatcttgctatatatagtggtgttctgcattttgtgcttatgcaatgagagctttgatttttttaaggttgttaattgataccagtgataattgacccttccagctagctacatcctagtacccaaatgttgagatccaacaggtaatatatataaactatataacaagatcgagatatatcagaatactttctcaaggactaaaagcatttcatgccgtaggagaccaagttaaattgtccgtgtatatgttttttttttcatgcgaggcatgtataatattgatgagttaatttaattagtatgcttgtcatagctagatccagtgatcagtagtaatatcttggaagaaatagtaataatgtatgccataactcataagcaacgtacaccttgccaatatagttgcaagtggtggcatgtaacccttttttttttgttggctagagcaagtggttgtatgtcataatgctctttatgtatatattacctttatgtatatattactttcatattttaatgtatgacgccgttgactttttatccaacgtttgaccattcgttttattaaaaactttatgtaattatcatttattttattgtgacttgattaatca

SEQ ID NO: 6461 - DNA, 29002 bp, Oryza sativa
aaaaagaaaaactaattacccagtttgcatgtaaatcgcgagacgaatcttttgagtcttattagaccataattagccataagtgctacagtaaaccacatgtgctaatgatgaattaattaggctcaaaagattcatctcacggtttacaggcgagttgtgaaattagtttttttattcgtgtccaaaaaccccttctgacatccggtcaaacgtccgatgtgaaatccaaaattttttatttcaacaactaaacatgccctctattgaagataaacaggtgtagctcacgctggaatcttaagtccctctcaactaacatgttactattggcagtcacctagtagtagtggcctcaaaggcaccaagaatcttgcagataaatagtcttcgtcgcatccattattgattagtatatatagtatattatatatatgtaacttctctctcccacataccggactttctatttgcgaggcctgagtttgtagtattataaagcaacaaataccatctaactaacgcaagggatctatatatacattaaacatatcacatgtgcacataaaggttgcagaatactgttgtttagttggtatatattttgcaaagcattggtatttaaaatagcaagaatgggtcttacgttgctgcagcagtactggcaaataccgtggtcaaattggctgttgggcctccttgcacaactaggggtgaggtggtgggttagcatctctgatggtacaaggattgcaatacacgccaatcttctaggaaatcgaggataattttttgcctgcaagttggacatcaacaaatatatatatatatatatatatatatatatatatatatgttagtacaagactacaagttgccaacacacagaaaaatattgttaagtataagatacccagcttgctagccaaagccacatttgcacaatactacctccatcccaaaatgtttgacgccgttgacttttttaaaaatgtttgaccattcgtcttattaaaaaaatttaagtaattgttaattctttttctatcatttgatttattgttaaatatacttttatgtatacatatagttttgcacatatcacaaaagttttttaataaaacgaacggtcaaacatgtttaaaaaagtcaacagtgtcaaacatttagggaatgagggagtacaatataatcatagggttggcaacatgagacaaatatcaagtttccttttttaaaaggaaaaatattatcaaattatagcctcatgggcaatatagaaaagcaaacggcctggatccaaggttcctccacttgacttgctactattgagagcaagttgtgtgttggtggtactactaccattacactgcttactctctttttttattattgaaaaacctaggaggttgcattcctgtgcaccatttatttcctcgtctctgactctgagttataagtcgataagaggaaaactttgacctggcctggctcttaacgattgccaggagacagcactgactgcatctatccaggggcccaccgccagtagctaattttcctcgagtataacagtatccctttaggatcaacaagtccaaaagggtcgtcattatctgacttggctaatcatgcaaggagatgctacgattctagacctgttttcaaacgttatgcaggaacaaaattgaaagaacatcaatacaagttgctcgaattccgggaagagtcaagaagaaagctctaggattcactgttcctagcaaggacggtaatttgaccactgttcagtttacggcacataacaactgccgtcaactaaaaaccttgaatagtagtattgtaaaagccaagagaacattgtacttgcacgagttgcaagttggaacatgagtcttttctaagttcaaaatggagcttaaggtcatagattgcggcggtctagctagcatcatcatgcaattgaaaaaaaaaatgcaaaaagttcattgagaaactgtagctttcaactacgtggtttacacgggtgggttggactacacgagctctagtggagaagacatgatggctatatagacagggtagacatacatgagacctggtttttatccttagacgtacgtcctggtgaaaggacacgtcacacaaccatatacgaagaaactctaggaatctatcgctaatgaaagttcaaagtgttctttataaacccagataaaaaggtgtgctctatccaatctacctagctcacatctgaagtaaccagaatcagaaagtccatgtaaagaaagtagaggtgtaaacgattagtatcgtccggacagaaggcaacgtatccaaaacacactgaacatataacatatagcgcatgaactactccagaactagagacaagaccgtctggaacatctgaaatatgttttatcaatggtttcctatgagcatcactctttttggacgccaacaggagtagatccaattactggtaaccaagaatggtagtgccgacacagtgtgatgcaaagagaaaaggaccaccactaggatgccccctcttttcatccaccggcccctatcagactagattggaagcccatcagatcaatgggaaagaaacactttataaatggcctcccacaataaatatatatcagatatcgtccctagctgactacactatacaataaagaaatgtcaaaatgatttgttcttgctcagccaatatgaaaaatatcatagttttattctatcgatgctatggttggtttgttgggtcactctgtcgtgtatgtccactataaaacgattagttgttcaatttaggtgtcttgtgtcaaagagttcagggataaaatcagttcagcaaggaattataaagactactgccatgtaacagaatatataaaagtgtgaaaaagaagtggcagcggctataaattacaagtatctatctgtatacccaggcaattgccaaaaacagtaggtgtagcatgaatacagactctggtagttaaagaagataacttaaactttggccaacttttttttgtgcatcatatgggcaatttcttaggcaatcaggttactgggttgcaacttgcagtgcggttgctttaggatggcggtccccagtcacacaaatacttctctgttcagagctttcaaagggaccgctcggataaggtaagggaagcagctgggggatgcaactgatgaatcagggaggtgtacttgtaacacctactcttatggaaaaaggagtaactctatgcatggtcctagctcctatgcaacaacccaatctaattggttggcatctcgctctcgaacaaacgttgctagcttaggctctcatgccaccttccaaaccttggaccaggcaactaatggccaatgcaagacagccaaactactggacacccatgtttgactcctaggttagaaacttagtaacactttctctctttattcttttgtactaggcctcaccatgtttatgtctgagacgggaaccaatcccgttgtgccaaccgaaaggcaacttaatttagctgagtcagcagtgaacaacttaacagaagtggagaagggggtccacggccagttaattgaaaaaagtgctaaactaaaggcgagttatagagggaaaaatactgcatgatgagacatgactcatgaggacatgttcaaataccgaactctacagccaggccaggtgctttgtactactattagacaaagcaccattagaagaacccgcatcctggggagcaaagctgtccctggacagaatccagtcttcatgcattcttatattcttaaataattatgttccgatgcacaattaaagtcaatgtcctcaaatggcagcagccatagcaattattcaaataccgaatcaccaaatgaggaaatccaccagcatatatgttgaatactttctgctttttgggtgcatttggcaaataagttgtcaggtcatccgatattctggcaggtgcatattatttctgttagtgctttagatggcctattagtaatcatttcatgcccaaatttgatgcttctagatgcatgcccctttaggccaaccatgataaacaaactgctcagtaaactagtcttactagcgatccaagatgcaacccatcaaaatcgcacaaaaggaagcattagacttttagtttaattgcccagcaatcaagacccagtaaagtgattcttcatgtctaccaacaagacagtccggttgcttcacctcagttggctccccttttttctgaacgaaacagtaggttcccctagaacctggttccgtttctttaagctcacaaaagcaaaaaccgttgcttagtatacactaattcttcagtatatgctatgcatataatagcagcatgatgaggatagaaattttcaagataaatggttttatttctctaggatggagtgattagggggacaactctgcccagggggggcaaatggatgagcagctcaactcctagatttgataaacaacgccctcaggaggattaaacaagccatggtttagtcatagttgaggattttaaagagggaaaggagaacccacaaggtagcaactgtgggctgtggcttcttttattctgtgggtggaggtggaaagaggacctgatctggcacacgcaccatacgaggtaatgtaggtatataaaatggtatagcaagacgtggaagattggtatccgttcttagaaagtccacaactccagactaaacgggtcagacccttttttcccactaactaataattcaaggttccgcaaaaaatattaaatgtccaaatcaaggattttataatactgtgtacgttgcctagtaagcgatcatcagacagcagagtcaagcatatggaaacgcagaaacagaaacaaatttactttttatgtaaataaacaaggtaacacgtaaattcaaggaataatttcctgtacctcaattcgacaccacattatcagatgtcatcaaggatggaatcctgcaaatttcagccatttcaggaggtgacttgtagatatttaggctgtagtatgtaactccaatatcagaattgtgccaattaactgatgatcaacataatggtatttttgccatttttcttcagctactgacaacaaaatggtattttaccttcttgcaaaaagaaatggtattttacctgtgaagtttgagacgcaatcagaatatctgagtttcattgtaataagggagaacagcaatacacagcatatgggctgggccatagatgggccaattgggtcagagctatctataatacctattaccctaacattactaatattaatccagaaaaaggcttagttttaacttatcttgtaatgcccatatgaatttgcataaacaaccttctcataccaaaaatattatctgtttccaaagcattttttagtttaacggttttgttgggaaattaccatattttgttagaaaagtatttgcctgttgcaagtaatttttgttcatagttaaccattttttacctgcatgagcttgatcatcagccatttgtgccatccctggggactgaagaaatatcttcagttcttatattgcaacctgcagaatccagaagataattgataaatttgttatagaagtcttcacttaaaaaaattacaagggagccataaaagaacaaaagtcgaataaagtgtggtttatatacataataaaagtatacagcgccggcggaaccctcccactaatgcagcaacaaagaaactatattacccacaatgaccttatttgacatatccatcaatatggatcaagcttgtaaatcattgtaatacagctcattgcaaataaagagccacataaccagtgaagttaatgatgttaaccataataattacgtaaagatggattggtaactgtctattacagtcggaatgcaattcagtagcaaaaattaaagattatgctattacactctttcctagattacttacaatttaagctactctctaaataaatatacatggtatgcaacataacttctgaagttgatgcagagtgcgctgagattaaattggttttccttaactgtagatgtggtagcattcaaatggtcattgagccaggacattttctcctgaaacaagttcattgttaggattaacaaaaggaacattgcaggcataaactctttatgcgcaaataatataaaatacaaattgcaattcatattcataccttgacaacggattgaggttatttcaggagatggcacatcaatgccctcatcactaagtaatattattcctgatgactccacagtaaagggaaaagctaccgctggagtcataggggatttagctaccttgatgtacctgtgacctatacaagtgcagcttgtataactcatacaaaactaccacggcaggtaaatataaaacagatatttgatttgttaaacatataatgaaagaactagtaatactgatgctataccactgcattcaatgcagaaagctataccaaatccttacgtacaggtcttacacagagcaagttcaaaagacaataaacattgttgtggttcctcaagtttaattatgccacttaaagtgtatatcaaaagtggtatacgataataaaataaaggtgtaaggagataaataatgcgtgtacatagatgaaattgaaatcaaatgtagttgagactttcctattgcattgtcatgcagcatatcagatggtgggtgaaaatggcgttaataatatttataggtgtctgtttcattgtgaaatataaaaataattagacagacctgagtgagcctcaaagactagacgtatagttacagcatgagcccactggattcctagagcagcaacaagatgagattcaaagccttcagcattattactatcgtatttcttctcaactgcaatagagtaatagaaatgttactcaatctcaacaaagtgtccaaaagataatttgttttcttggatgcccaaaccttcaaatgaataacgatagccatcatcattactttggctgcgtacttggtttgtaacaacaacaggaatctgtgagaactctgctatagatctgcatgttgagaaaaaaaaaaaggaaggtagccaaatgtaaactaaaccaatgtagttcaatattatgaaataatagtagaatgctatgaaatactagggtctaggtcactaacttaagaaatgaaagggcccatcttagagggtgttgtctgagacctgttgcgcttttctcaatctcactgtcacataagcaaataagatgaaacagggattcaaaatattagatagtttattcttaaagaaaaagataaagatgagatcttcataattctcataacataagtaatggacagtattaacagtagacaaatcccacatgtaattagttcgtatggaaacatggaacctatttgtgctagacatcgttacagactacacatcatagtaactgtattaggccaaagccctctatagagctaccagtgcaagggtacagcaagatatttaaaacaatggtgttgctaattgaaaccaacacataacatcgtgcacccactgctaccacacttgggattccacctcccccaacaagttatcccttttcaggattcagcctcaatattatttaaggtgcaaagtttcatagaaattatcttagcaagttgaagaaccaatattttatataatggaaaccatcctttatatatctgaaacttatacacattatatagaaaatactgcaatacattaaagtttacctctcatagctcattgtatagatgtatttaaaggcccactaaaatccatacatttcagaatatcttagaagtttaatttttcaaatctgctaaaaaataaatatgggagtaacatttatcatacatgtagccacatattaaggatctgacaatccaaaattcacattatgatatttattaatcaaaataactttctaaataagtaaaacaagaatatgcttagaacgtgattattactcatcatgatgactatcattgtttgaaagtaaggcagtatgaaagacaaaacaatatgtactatcatgcatttcttacgatgacataagagcagccatgctatcaacaacaagtagcttcacatcatgctgaagaagagtcaccttcatctgttccaaactgtagaaagattggaaagaaacaaaaaggaagggagtgtttcatgcatattctgctgaatttttgcacatggaagcaatggggaatagttctaatcattgactagcaaccacattgttgggtagaataaaggtattttgaaaatgtgctaccggaagtctaaagatttgtaaattgacccttcaaccctcaaatagccctcctagaggcacagtaattccctgtcaacttcctatgctgattgagtaattccctgtcaattggcatataaggaattctctcttacaaatatgtatgtacctcttggtaaattcagataatgatgttgggcgcaggactaggatcctcccagccatctgtacaaaaaatacaagataacagcccatgaagtccaatactatgagaacaaaagtacaacaccgcagtgaattttcaaagtgtcgatgtatatgtacaaggtgaagcataagaaccttttgggccaagccttcttgacgaaatatttgaggaaagcttttctcaccaatctcgatcatcctagatacatcatgcaaacattttacagatagttctcaattggtgtgcttgggagaacgtaatagtaagcagaaacttcagttacctccgtgaagagaatttggattcagtatcaatatacaaaactcgaccatttaagcctccatagcattctggtaatgttgctagcaaagcaagcttcagacagaactgcaaagtttgtgactctttataaaattttactgaatgtataataaattactcaatgtaatactctctccatccaaaagtctaaggcatatttcttttgtcaccaagaccaaggagaaattaactcattccccatgtaccaaaaccagggaattatttacatgcatgcaaccaatgagtattaaaatggttacttgggttccgatcaacaatttaatttagcatatggagactacaaatatgaccgtctcatttgggaaaaccaaaaaatgaaatatgctcaagacttttggatggagggagtataagagaagcacttgatattctctacacggagaagactattaaacaagtgccatttgaagatccattaattggctcagtgaatgcctttgcactagacagaatcaacaaaagcatgcattattatgaaaatggaaattttccactaaccaaccagccccgaataaataggttcgaccatgaccgctgctggctggaataataaaagaggataatacttaggagtagtaacaagggtttctttaatcgataagatagcacacgaataatgtcaaaggggattcaagtgctaggctcagttcctatctttgatcaatgaaataagaatgcagtaaccagcacacagcaatgccataaatcgtaatgccgcagcaccctgttacatccattcacaagatccatttgcttttggttccctatcgacaccaagcgatcccagaagtcaagcagacacaataattggttcgtatccatcacagacacacaaatcccacaaagcatcattgcataatgctgagctgctcacctgggtcttgccaatccccgagggcccaacgacctcagtgagcttccctgcggggattcctccatgcaatgcctcatccaatccgcggagcgtggtggccagccgcccatctcctcttgccctgaaggcctcgaggagcgcaagcgcctgcagatcaacaagcacagtaacaaaccccgatcataaacgcaaatgcactgtcccaatcatacacggatcaaccaaacgagagtaactcgaatcgaatccaaacccctcgaaaccgggggacggcgaagtggggggggggggagggtaccgtttggtacggagggcaggcgatctcgctgacgtgggcgacggcggcgcgggcggtgtggatgccggcgtcgaggacgcccatgagctccacctccggcagcgacagcacgtcctgggtagaatggggtttagcggcggcggttggtgttggagcagggggaggggttttggagggcggcggcgggggctgaccttggcggtggtgaggcggcgcgcggcgaggatgtgggcgaggtggggaggtagccgcatctccgagaccagcttgttcgccatggcgatcaccgccgatgggttgtgtggggggagagagagatcgggggattggatgggagacgggttttgttgggggggggatggatttcgaatatcttttgtttccgcgctctttggaattgtttcggtagtttttatatgtttttagtcaatgacatgtagtacccacgtgagtcaatgacatgtggatcaggatgacatatcttaaattttgtaaaattataatggcatggttctaatttttcctttttatataggggcaacgatttagtacggtctggtttggtttgatgcccaaatcagttatagtaccaaaataaattggcattgttaaagtttgtacgaaagagacaataaaaactcgagtgtttttttacatcaaacaactcgccaaagttttgacgataccgtaatgttgccactaccataaatttggtagggctagacatggtaataaacataaccacccctatttaataggagtaaattatgattttaacattgatcgttcctaaatccaaacgacaccataaattttatagcacaaaagctataagatttgtcgtcaccatggagcactttatgaatcatgccaagcatgaaaatccgacgaaattgtattgcctcatactctgtgacgcatgacgcattcggtgtaccaccactcccaatacctcctcccatccattacatagggccaacacccctccacccaaattatggtaaaattgtcttcctcctcctttagactccaacagagttggaatcacctccgtccttcttttgttggcatcgcctcattccttccttcccctaatatgctactccatctaccgccccttcctctgcttcggtgagacgccatcaagctcgaaacattgacttcctcttattccttcttcatccttatttctcaaggtcgaggacgcccatgagctccaccttcatcagcgatagcacatcctaggtagagcggggtttacaggtggcgacagtttgtgttggagcaagaggaggggttttcaagcgatggggctgacattgtggcagtgaggcaacgtacagcgaggaggtgggcgagttgggggtagctgcatctcagagaccagtatattcaccatggtgatcaccgatgggtgggagagatatggggattggataggagatgattttagggggacgaattcgaatatcttgttttattttgtttccatgctatgtggtattgttttggtagtttattgaattaggtgcaccggtttaatataaagccttatttggttcgatgcctgaactatttatatcaaaataaatagcatttttgtagtttgttgagttaggcgcaacggtttaatataaaaccttgtctggttcgatgcctaaactagttatatcaaaataaataacatttagtttgcgattaacaaattgacattgtacagaatttggcaaaaaggacataaagactatatcgtttctaaaaacttgacatcaaacaaattgccaaaattaccatgataaaaagatgttgtcagtaccataataatttgggcataacatagacataaaaaaataaccgacgtcccatttaataagtgtaaattatgattttgacacctatccttccagagccaagaccacgctataaattttatagcacaaaggtaataataacatttgtcatcactacaagttatcatattgtatcatgcgatcatgccagacattgtgatatctcatcccttctttctatatagttaagacccaaagctacgttgtggttaagccacgtcatcatcagttgtgaatcgttggattaatacattagattgtttctcagccgttggatagaaatgcggcatactcaaatgaaacagagcccaaccagggtaaggcccacctaaatcgcaggatgacttttagggtttatttggatcggtggggttccccggctcagaggggcggcggcgtctgctgtgtcgccctttccatcgcgcgcttgtggtagggacagcgctcggtggtgggagagttatcgcgccagatgaacgagcgtcgcctgatctggaagacggctcaactccccgcgagactgatctggaagctgcggtcgtttctcctccccgcaccgcgaatgcttctcctcccccatccaccgcgcgcaccagcagtgggtccgccagccgcggcgccgcttctcctcccccacacaagcgacgaggtcaccaaacgcctcaaccccctcagctctggtcatggcgtgcactgatccaatgattcaataaataccctaaacccactcggtcgcgatgtgcatcagatcaaaagcctccacccgtagcaacatgagcgagccaccgccagcatcagtgcatcagcagaaggggatcgccggcagtaggccaagcgacggaaacgagccataccacccgtaccagttcaagggaagttatgggcggttcccagtttctgtctatccctcttctaatgacctgcattatttggtttgttgcatctcttcgtgtcttctccatatgtcacagacatgttgctgtttgttgtgttgctgcccgctctgattacacaggttcatggatccatctgctagggatgaggttgttcccctttcatgttgaattgctgatccctatttttcccaggtcatccctaatccagcatttcaggtaaatatctctttctaatcaacattgattgatgcacatcgtttctcaccacttcagctattatgttcttgacaaatttcaattaatatccaaacttgccctcttttctttcgtacaacagtatttgtgcctgcattttacttactccctacttcaatttttgcacatatttgattgcaggtttatttctggatttaagtaccctacaatgttgaataataaataaattggcgcaaatttcttcttatggtgtacacatcactaaatttgattgcaaacaatacattttctgttatgctcaattttaaaatcattttatgttaccttgcaactgtccataaaccttatattttatattggttttagtattatgtacaaaacactaagtaaacttacttactgatgaatcgtccctgcatataattcctaattttctttcagtgagctgaacaggttggtgaagtaattattttatatgcaactacggacaattatttgaggtgaaactttacaattaaaaatatcatctcacaggcagcaggtgatatcacacaggtcacaggatttttgtgattggagataattttcatcatatgcagcacaatgatcaatgatgtaagtgaaaggtatatactgccgcgcaggtccctccttttggtttttctttataaatgttaattgagttcataatttaaactatgatattatgatctcaattttttttttgaatttccttatcttccttattatgtattgaggagacttaagaataagtcacctatattgtataaaaattttcaactattcatttccattttctcatatgataggtactgtcagtttagttaatcaatatgcccaccccttattatgtaaaccatcagtcacacaagagataaagactgttctttagttgtcacctggattcatcctgctctagacatttgtgcagctaaaatccttcaatttagaatctattcatggatgttttaaacccatgccaatacataatatcccgcatcaacgcgctggatatcatctaatataacatataacgcatctcgcatccggtgtatcaccactccaccatacatcctcccaaccattacacaggcccgacgagtcccccaattgtcctacacctatcttcctcatccctcaacaaagacattgacaaacttgggaccacctcctttctttccctggcatggtactccatctgcctcccttcccttgcttagcttagtgagatgccgtcgagctcagaacatcggattccccatccctaaatatttaacaccgttaacttttttaaatatgtttgaccgttcgtcttattaaaaaaaagtaattattaattattttgctatcatttcgttcattgttaaatatacttttatgtatacatatagttttacatattttacaaaagttatttaaataatacggacaatcaaacatattttaaaaagtcaacgacgttaaatatttagtgacggagggagtagtacgtaacaagaggttttgaagaactccaaagcaagcccatgaaccagcccaagaaaaaggcccaacaacaacccaacaggcagctgcaagcccgcgacaacccccaaaaggcaaaaaaaaaaaaagaagaaagaaagacctcccaaaattcaaaccatcccgcccatgtaaacaatcaccgcccttgactcaaacgaggacgcagtaatcaacacggctcgagcctaaacccacgcgtgggccctacccgtcagcctctccccgaaactgccgcacgcgtctcccaattcccaaactttcccttattattcccagaaaaaaaacctctcaccgccaacgtctctctccccagctcgccgccgccgcctctcccccaccccgcggcgatctagggtttggacccccgcctccgccgccgccgtcgctgtctcccgcgcccggccggacggcctcccctccctccctctcatggaggcgctctcgctcatcgacgtggccgcggaggacgacctcctgctcgacctcacctcgcccccgccgctgcatcccgatccgccccacgcaggtgagaacgaacgaacgaacgaacgcacgcccgttgctgtctcttgcgcttcgttttcgatcgagatttttggggggtggaatcgtggtgtctcggggttgattggtgctgtggggttgcttcgatctggggatctgacggtttcgtgctgcgattttcgttttagggtgtgatgaggtgatggccgccgaggcttctcgcctggatcccgccggcgattctccggagatgaggcgggttgtggatccggatggcgctacggaggaggcccctgagcagtcggagtctccgaagcggaggaaagcgaaggccggcgttaatctccgcaagagcttggcttgggacagcgccttcttcaccagcgaaggttgtgcactaaccaaattccccacccatgaatgaaattgctggtgttcagtagtatttgtttcttgttgtagacttatagtagactcctgcatcttttgatgtacatttcgatttagggatctctcccattcctcactgtcgtgatgatggaaacagaagggttacagaatcttagagggaaaaacagcaccaggctgcagtttacaggcccagcaccagatggcatgcctgtaatctgtgtttcttcacaagcactaacagcaatattcggtcacacgctgcatcattatagaagaaccactcctagttcccaatgttttggacagtgaattttttaaaatgctctcgtactgctgttgatctagtccttggtttgtcagcctgtcatccattttccgttgcaaagctaccaattcctttcagtctttgagcattcacttgttttgaggcagtttgatagcagctctgaagtcctaacatttccctttctgttttttttccctgcctgtctgatgtgttcccattccttattacagtaggcaaatatcgtaatgtagatatgtatcagttcctaatgttttctggtttgagcaggtgttctggatactgaggaattggctgttgtaaacagcacattccgcaaggcacagggttccaggttgcctggaatcgctgaggaaatgaggaggtcaggggagtcaacaacttcgactcttgaaagcgaaagctgggtgatggaaaatctggagactgagctgtttgacaacgtccgtgcttcgatccagagatcgcacggcaatcctggaaaagccccaggtgttactgctgttatctcaaaacccccgaagtccaaggcaaatgttcctcgtgttgcaggtaagaagcttcttctgagttttattatctgttggtttcatgtttgtaactgatgtagttattctttttgctacttccagcaaggaagggggttgatctgatgcctcagagtaaggtatatagcacaattcatatatggtttgatctaaaattatagtccttgtccatcactgaccaaaatttttcgatgcttgttcagataagggcccctatttccacaagccagggtgctgctggaggaaaacaaaggatccaagctaccttgaaagagcctacaactgcaagagtggtatggtccatgctagcagatacattacattaaatgtgttgtagtttagttgtttacattcttcatagtcccttaacatttaaaagttaaggggctatgaatccttctcaatggtttgaatctaggcaaaatttgctacaggacacttaaaatttgtgtaacttgctggtagactcacggctgaaagacatcacaaaaaatttgctggaggacactttcggctcaattgtaaagataaattcttcaaaaagacgagaatgcccctagggtcaaaagcttttgagctcaagcttggtactaggggcattctcgcccttcttaagaattcatctctccaattgagtcgaaagtgtcctctaccaaattaccaattttttagggtgtctttcagccgtgacacgtttttgcgatgtctatcagtaaattacacatattttgattgtcctgtagcaaaatttgccttgaatctattgtatgatggttaagccaaaggcagacacaaacagatcacaaagaactagaatgtgctagtttaaatgaataggaaattatgtggtattcttatcttaacaatgaaaatgctgcttgttagaacaacatggtctgctgaatcgttttctaagtgtctaagttcttactattatttattgaaatctgagcgatggatatacaatttgtgatgtttcagtttgcgagatgtagcttcactagcttccccatttccttatcttagttatgcaatattctggaattaatttcatttcaactctctgcttgagaagcctatttcaggatctacagaagtaaaaccatctttgaaacctccgagggctctaccaagagttgctacaatgagagcgccaactaatacagctgtggcttctggaattccagacaaaaggagcagcactggtgcgtcaacaatatagattctatctgctataatgtttataggtggcaagactaacatgtattctcttgtaggaggtgtggtcaacaggcagacagttggtaaatctgtcaacaattcagttagcgcacattctaggcctggtggagtgacaaaatctacttcaacttcaaaatcaggtgccttaccatcatcattatcatcatcagcagcagcaacagcagcttcaattggtaatatgctaggtcaaaaacctaaatcatcaaccctaagcaacaagagcagaattgctcaaaggattcctgttcgttcaacgtcaaggactgatgtcaacaaagctaacccagcaagagcatcgagaaataatattccaactgggggcaaaagtaatcgtgtatctccaagcatttcgcctagcagttctgtggacagcttgagttctgtggtttctggggcttcaacagcttccactgtagggaagatgagccatacatctgagagcttcagtacacggtcttcttcattatccccttccctcagaaatagcaatgaccacgctccaacaagagcagatgcagacacccagggaaaaggttccaaaccatctggtctgcgtatgcctacacccaaaattggttactttgatgctgtaagtaaatttagtgttttcttttgtctggtccatttagtattttcttcattgtgatcatgaaagtattcttaattgatggcattacaaattataatctgtgtcgtatgcgtttgtctccagaagtccatcgaccaacagattggtgcacatatgcaagtgcagcccatgaagatccagtgttcacctcagctatcttctgctcaaatgggggacccagcatcgtctatcttgagtcagccggaatcgagactcgcagcctcacctcatgagaaaaaaagcagtgtccagagcaaggcatcacctttactcccccttgaagttgtacagatagaacttgagccttcccaggcgatggaacatgaagtgtgcacaccccagccctgcccagtggtagcagcagcagcagcagcagcagcagacacagcaaaggagaacattccggctctgcatcagaacatccagccaaatgatggcgctggttcgttagcagttgatctgatttgccagagattgtccaccatttctcttggggacgccaccgacctggcctcttgatcttgtagagggatttagtcgtatggtatgctggttgtttctgatacatccttattattggaaggcaattgcagctgaagttctttctctggcatgtgttgttttaactcttatgtcttgagtgtaaaatcctttttctgtacatcgcatgccatgataaggatttcgctctcggttgtaatcagattgcagaacacttaagagagttgacactgctatgtcaactacaggtttgcaagtaatcgtatatcagtcacatttgttcatctctttccctacaaattgttggttgaattgttcttgttcatataactctagattgtagtatctgaaagtagttaacataacactgaaattgtcatgcaagcacaaacttacaatgattttttgcatctcactgattacagtacacatcattgttactacaaagcatcaatacatctgatctaacagtgtgtgatgagctagcacgatcaccaatgcctacactttaggatcccagattgcgcatctggacttctggagcatgtagaaaaagattgcaaattgtcatcttcatcatcccatcaatgattaaatcagaacacatcaggttggcagtgtaagaggtgcatatgcataatgttatcagcagcattttatgtccctggagtgcaggagctaccaaactgatgaggtcaagtgactctttttttaattgggctcatctcacttgctcctcttcttggcctccccgtaaagaacaacgcctgcgactgttatcccgtagcctagcatccccatgaaggttaccgggtttctgaatatcaggatggaaaccacaacagcaacagcccctttcgcatttccaagaacctggtaagaatcaagcaacgcgttgaacattgttagctgcaaacatatcgacatgtgcctgaatgttaggaagattgaagatcatcaaagcatcatgctaacagtgcaggtaggagggaaggttggattacttggagagtgagtgggctagtgtgcttggtgactaggaagtttgtgaggttcacaaagtaggctaacgaggaattgcaaagcagtatccagataaaactcggatcctcccgcgcaagcgcagtcaccatagtgagcacattgcgctccatgataaacgttgctggaatcagcagaacgacggccaccggagccatgtaaccaagaagctccatgggattgagcttctccctgcatatcaaattaggtggaaagggaataaaattagctgaccaaattagttagaccaaaatgtgggtagcacaataattcataaaggattgcgatgtgatgaattattactcctccgatgacagcaagatcccctgcaggacagtcttgagcgccctcgcggcggttgcgccgatgcacatgatgaaaccaaacagatggaagcttggctcaccctgaaattgttgagattgttcaagaattggatcgtctctgttcaagcattgcaggttgggagagcaatcaaggcagatccagtgaggaatcgcggccgccttaccccggtggcgatgacgacgccggcgacgacggggatgagggcggcgtaggtggcgcacgcctcccggcgggccgcgacggcgtaggcgaggacggcggtgaagaagggcgtggtggcgccgacggcctggttgaacgacacggggaggtaccggagcgagacgttcccggcgaccacggaggcgcagaacaccgccccgagcagcgccaccctggcgagctgccccctggagcggcgcggccgcgcagcccgcggcgcggcggcggacgcggcggcggcggcgtaggagaggagggcgcaggcggacatgtggcaggcggtgaggaagaccgggtagcggaacccgtaggtggagaggaggaacttgttgaggaggagcaccccgatgttggacgcgtaccacgacgccaccagccccgccgtgaacagcctcccagccgacgccgccggtgaagacgcagccgcggcgtcggcggcggcggcggcggaggaggaggacatggggaggagggtgaggttctcctgctgctgctgctgccccatctcgactcgagctccgattcggactggctctgcctcgttaatggagagagagagagagagagtgagagagggaggaaggacacgtggcgggggattggggtggattaggaggctaattatgaagctctgtgatgtgatcctcactgttttttctttcttactccctcactcctgcagtttcacattgttcatcataaatcatattctttatgattagtaattttactattattaatgacaaaacattaatagttattaatgatataaaataatgactcatattttcttttaaaaaaataagacagacaattaaagttgtacacggaaactaatggctaagcttattttgagataaagtgagaactatttttttatattatttttaagtattttattgtttggtctggagcgtgacacgagatgtggacaaacatgtcaatgttatgcaaagtatgcaacctgtcgggctttggaaacgtagattattggactatcgtttctttatgagtttagggtgtacaactagctatattattttgctaatcacaatttctatggttttttttgagaagggacaatttctatgggttggtgtactgtattttagtgatattagcatatacatgtgccagtagcatatacatgattttatacgttcaactttatttattttatcttctagttggtttttttctagagacactgatttttttatgaattgattttcttgtgaaaatgtcccttttatggtttctgaaagggtggtttttaactttttttactttgttttttatagtagtaaattgataattacttctctcactccgtcctataaaaaaccaaaatatgataatgtcagggttatggataccacatacctaatagtaattgactaaatctcggcaggatccactacataccatgtcttatatggaaactgacctcgagggagttctggataaggaaagacaaccagagttctacatgaaaacgacaaggactactcagattgtatccatattggtttccctagttctacttggacaagaggacacctatgagtataaatacagggcccctggagaggagagggggaacgaccatgggaaaagacaatcaacacccaacgggatcaacacacgacaggatcaacacccaatacaatcaacatagaagcctacatacgccaagacacgccgccggatatcgacttcaaggataagcacggctaataccttgcggtgtctccggatactgtcaggagaaacgaaagcgctatctctgatctcgccgggcacggattcgaggaggaaggctaccctgttgtcgactacgagtcagatcgtcagactgccatgtcgacaacagttagattggctacccaaatattgtactggtgtgattatcatgaataagagcaataccggcttcggccaacaggatggcttcggccaataggatgtagggttattacctgacaacttaggggcccgaacctgtataaaaatccctgtctccatctcttttacctcagtcttgcgtatagcctagcaccgacgatccccataccatgcaaatatcagaattgcgacatcaaacgtcgacagataggatacgatgttttctataaataaatctgaagagagacaaagggagtacgtaacaaaacgtgtactcgaataaattatgagagtattttattttgggattagctaaaaatactgtcgagtgctttttagggaaaactttcaaatctaactatagtatataattttactagaactatactataataataataacttgtatatatgtattaaaataatatatgcaactttatatagagatatcaatgtagttatagtgtagttacaccatagttacaatgtaatgtaattatagttttgtaactacaatataactagaatgtgactttgatgtaatttgaaaaaatctgccataaacatgtgatgatgggactagcttgtgaaaagagggtttagattcgataataaaatatctcattacaaatcttagcgcggaatcgatggctaaacactcatgaaaactgtcgaaagtcagctagtagttccgtttatttttcatagtagtactaatactaatattaaggacaagtagaacgtctcacatcagagtactccagtggataaagacagctattaccgacgaacagatgggaagtcggaagtacccaagcaaaacaactgatgaggcgaacgtgtatcaacaggcacgaaattaaattgttttggagtaatttatgacggcttcttctccgtacggactttggaatctcctctaatgaatcgacttgacgtgacagtcgtagtagtattaacagatgattcaagttgacccgattttgcttctttttttttcctccccttttgctggcgatccaccaataattaacacaaagagcaaatgccccactggtggcatgcaactatgcacgaaacttgcacgcctctgtgaagtataaatttattatatatagttgaagtataaatttattatatatataaatttactcactacaatgtgagagaaaaacaggcaataagacatcgaatgcttcctttcaacatatggttatatacactgtgaaagttggtagtagttgttacccggtcatagcttgctacacgcaacaagtaaataaaaagagcaattttatggtacttgagggaggtaccaaaaattaagtataaaattttgtacctcatagtatctagataccgagaggaaccaaatttacaatagaaaaagtagtatctcatgatacattctcaaggactgtaaaattgcttaaataaaaatgaattatagttcagtcacaagctaacgagaaaatggacatttggccatgttcaaaaaccagtttcgctagaatgccatcctgaaaatgcgtttcgctaaaatgccaatatgtagcgcgtgatcacaaccactttgccaatttcctccattttcaccattttcaattccatttttgctagaatgcagcttgatgagaccaaattgcccctcactagctgaaaggggatcaagatccagctcctctgtcacctcctcctcccatgagctcctcgacatgggcggcgacctacttgcggcggagctcctcatcgaggcgagagcgtcgagacaccatggaagccgtgaccaactccaccccatggtgtctagccccttgagcaggccttccacacgacggtgtcgggcgcggcggcgtccggggcggccactagcacctccgcgtagcgcggccctgcccaacacgtgatatatgccggcacgcgcacggtgatccactcggccacctccagcccaacgagaaatcccggcacgattggcagctctcgtaggccgacgatgtccgggacggggcagagcatgcacgcgcctaccggaccaactccccagcgccttcacgaggctggtcgtggtggggacgtcggggacgaggaccgacaccctcccggccacgtcgccgcagagcctggagaggaatgtggcgtcgaggaggtctagcctcatgacagcgtggtgccggagcacctgctcctgcgtgtcgaggacatggatgacgtcaggaggttggacggcgtggatcaggacctgctcctgtgcgtcgaggatgatgtggtcgccaccaccacctccgacgacggggcctgggcggatgacctagaggaaagggcggaaaatctcggtgagccggggcaatttggtctcatcaagccgcattccaacgaaatagaattgaaaatggtgaaaatgacaaagtggctatgatcgcctgctccatattggcattttagcgaaacgcctttttggatggcattccagcgaaaccgcttttttaacgtggccaaatgtccattttctccaagctagcataggtatcttttgtgtatgggcctaccttgtttttctcgtcataggcttatacattgtggggctcaataacaactactaccaccggatcaatggtcacatgttgttacccacttgtttttgttattccattatcttaaaaaaattacctacttgtaaaataaaaattgtgcatgccctaaaaatatccaaatatatcaggggaattcaactttttgttgaagctataactaaactcagttgagagacacgtcatttaaatagctacgaagaaattaagaagacatatcaatatgtcatatatcacttcacaaacaggggtgaagctagagcaaaatggagggtggtgccacttgcttaatttactccactttagatcgagtttaagctgatgcgggtgtctaagtttgcataagggggtgcatacatggtgaaaatagataaagtatagccctgggatccccctaacatatactagctccgcccttgttcacgaacatataatttaaaactatacttttgcatatcataacaaaaaaacaaattaagtatttttaatacggattggctactcttctgtcgatagattttgctgggctccatctttcgttttttgggccgtccatcatgtttaagattcgtgcaataattgggttgtgggatggacttctctgtttgggctaccgatcttttttatctattgggctggcctttttattgattcctcgtgggtcccatagcaactgttcaattttgaaatccgcgcctgcttttttcttttctcttctgtgggtcccacatttgctgaattttctcatttcttccgacatagagagagagaacgcttttaggagaggagagcagagagcgacgacgatttcgtcgtcgtcaacagaaggccatttcgccggggcagcgattctggcggagcgatgtgagggcgattcgttggtgagtagctcgacgtgagggtgattagttggtagattcgtccattattcctccattctccctttggagcatcacctgaatctgctcaactgcatgcgttgatgagttttctcgtttgcgtttgggtttgctgctaaccagttttgaggggatttttttgctgtagatgagtggggtatccgttcctgtctcctgtgtgggggatcttggctgttaattcgagcacaaaggtgggtgggtggtgggaagggttgttgctgctgttgaggttttgagtggatttttttctgttgatgagtggggcattgttactgtttgatgtgtgggggatttttgctgttgattgggggggggggggaggtgggtggagtggtgggaagggttgttgctgctgttgaggttttgagtggatttttttctgttgatgagtggggcatttttgctgttgattggggggagaggtgggtggttgttgctgttgaggaggagtggattgtttttgcttttgatgaggaggggatttgttcatgtttatgaggaggggatttttgggatctcgtttttttggatgagtagtagtattttgtgtgtgcttatgttttttgctttggacattgtgttatttggctttcatcaacgatgtgatgttgttcatgtgcgattagatcatgttgtttaattttctcttaggtatttgaagcttcgatctggtggattcagttaaggttagttatttgtctgaacttgatgtggtgtagatctgaaaatgaatgtactaaattatgtagaacactatgtgtgatctgaagttgtttttaactggatttaatagagtttgatttctcatgtagatctgtttaccaatgccctagactgatttacttttgttttggttttttgtttggatgctcagatctgtagttttgcagatatgtagtttgaatctaagaatgatttgtgtgatcctaagtgagtgtggttatatgatttgtgttcattggaagcaccataagacatagctgtaccgaatttttaattcaccttggatgaagtgtctgtgtgtgcactgatgaaagttcatcctcagtttcctccgtgacatcagttgtcacttaaattgatgatttaatgtgtgtctgttttggattggaaccttttgtcatctcaagtggagctggcattatatctctgctgaacatgcttaatgaaatgatgggttgatatgtggttgcacctctttttattagttaactataaactataagctcacattcatgcatgtaccatgattcaggaaatgacagacaaatgataattaaatgaaatgatttaatctgtagtagttttattttgaagttaatttaagttttttcattacttcaatctgttctaactgtatttcctctattctatttaggttttatttgtaatatttgatccaatagtactatacctatttcatttcccgtgtttgttgagtccttacagtgtttttttttgggggggggggggctgtgtgagtgtgacagtttatccagctatataaggttcatgtaatgcatttggtgctatcctccagcaatgcacttaataacatagtttcatctttttcagtaactgaaaacattattctatatacggactttttttttctgtggattaatgtttgaacaattatgttacataggttacttttgtccaagtacttttgcagtcttcttgttatatgtaatttgattactttagcattatttaaaatatttgctcctgcttttgtttgctattcccattgtgtaatcacatttcttttttttaatagatggttcacgcaaaggatagtgatgaaatttttgttgattctacttcttcttattctcaaagttctgaaaatgatgatgttatttctgatagtgaagtgagtatttctgtcttaattttttttcctttttttttgtacaatgaagcaagagacttatatgtgttttttattgtgttttctaattacatgattaatcttcactatttttttgtaggactctaaaactagttgtgatgagatatcaaaagaggagctattgcgatctttgaagctgaagttgaataaaaagaaagtatctgttgactgcaatttgaaggttactttttttttgttatgttcagttttaattattatttttacagctttcccattttttgtattcacttggtaaatacatttccagttttttttttaaaaaattccctattcttgcgcagagaaaaagatctgaaacaaccagaagttgatttccaaaatcagttggattcagcattacttgaaatttttagagacaatgttttgattggtatgaaacgaaaactctactgccataaaagcaaggtaaatgtaatatatcgaggcaagaaattgaagatgtgcactgcccgtccataaattgttcttttatgcaatttttttttatttttccaattttctttttttgcagaaaaaatctgtcatgactgatgcaacagaagaaactaaattgacaagattctctgtgaagtactttctgaagttctggaaaagttgtctaaacgtcatagagatatcatttccaaatcttgtttcaaaacccttttgttgtttgagaaatgttctgtgccatatagacttgctttatggattgcccaaaaagttgatgtcaattcttgtgacatcattgttcgagacaaagtaattccactttcaaaagaatctgttcatatagttttaggtcttcctgttggaggtttacctatcagttccaattctgaaattggcaagcagaaaattcttgacacttttggtctctcttctttgcctactgtcaaattttttggagataagctgataaggaacgaatcaatgtctgatgatcaagtgttgatatccttcatgatggtttctttgaattgttttctttgcccaaactcatccattcaacctagcacaaaatatctcagtgcttttgcggatcttacttctattgataaattggattggagcaatcttgtttttgaatggttgatgaaacatcttagcaagcttgagaagtccaaaagttttggtggttgtcctgtaactaccttgtggttagtattattactctatctttttttcaattgctttgcttttttgtaaccacttaactttatatttttgctttttcttattaataggtcaattacttggattttcttaactttggtatgcgaaaagtgttgcaagatactccaagaatcaaagtatggaaaggaacaatgatcaaaaaa

SEQ ID NO: 6462 - DNA, 37028 bp, Oryza sativa
ggcgtcatacattaaaatacggagggagtacgcaccaatgcgaccaaaatggctcatcaagtaaagtcagcatgtgttgatcacccccaaatggcataatatacaataggcaaataataaattcattgaatgtgttgaatgcaaccgtggcatatatatcaaccaagggagatcgatcgagagagaagaaaataaaattagaacaagagattaattaattagtatgaacttacaatagtgctcatgagtagtcctcctttgctactacttggataaaaattccattgttttttatgaaagatggtgatcaagttgttgggttgaatgaattgatcgatcgatcgatcaatcgagggcggcacaggaaacctaggccgtcagcctagataactccgacgcgtactacgttggatcgatcacttgcttaattattagctatatggatggttaattagatcgatgggtgagctagctagctgtccaattatttaaacagtgtactacgtacatgtgcacataatttatgcttgtatggcgtcaagttggcaacaaaataagttaataaactaatctctgccagtaattaatttagtactgatctccatatatatgtttgttaataatttgagatgtgctaagtatgtatggcgcttttgtgtgacgaaaaagttgagatttcaccgataggaactaaatcctagtgttatagtagtatataattatgaacacggggcatatatattcttatattcttaattgtaatagaaattcaataatatgttatgaattttaaattttttttagataatgaaaatttataaaatccagcttctacaccaacgggggtccacaacttatagtcgacttctatctaactataagtgtgaattaaaaattgtaatttattggctcttgtaacataaaaggaagcatatttgtgcactgttaacatgtttgcgtctttcgtgtaatcgagaacccgagaggaaaaaaaaacaaagataacttatctgcatatgcatcttgatgcgtacagatatcgatggatcgaacggtggaacagcaagtggtccgtgcaattaggccacgcgcgtgctcctcgtggtccattatactaaaacaaaaacgcacttactaggaaaacaaaattatttgatttaatttggtgatatatagtcgtacttgtacttcctccgtcccataatataagggattttaagtttttcttgcaacgtttaaccactcgttttattcaaatatttttgaaattattatttattttatttgtgacttaatttattatccacagtactttaagcataacttttcattttttatatttgtaaaaaaaaattgaataagacaagtggtcaaacgttacaagtaaaaactcaaaatcccttgtactgtgggacggagggagtagctaatatagggcctgtttggggagttttagattatgagaagcagctgtttggtagccaacttctgagaatctggataagctccgaaacctagcttctccagcttctggcttcttagttcattcagcttctggctttttagttaatttttcagaatctataactacagattctcagaagctgtggactgtttggggcagcttatagcagaagtagcttttggaaaaagctgtagctaggacaagctcccccaaacagggccatagtatgcgtttagtatgtagctaggagaggtccacgtcacccctctggctaatttaatcgccatccacgcaattgggctctatttttctccgctgctgctctctgtgttaaatttgcatatatttctatgcgtgtgcgtacggatgacttaaatttttctgtgtacacaagctaacctactcatcctgttcctaattaacaggagttatcatctcctccttcctattcttaactagatgaacaatttagttcatctaatgcatctaaactgttcgacaagtctatttagtataccctcatttacaaaactggttgcctgatactattatattaaaaaaaattttgggccagcaaattagttcacaccgggtattgagtgcttgtttgtttttccgcagcgggatagatctgtggtgtggctgtcactatagtctcttaggactatagaattatattttcttaattttgctatatcaaaagaaacgtctctcactatcttatacgtgttgttcaaaaaaaaattagtacacaccagactgcactttcaatggtgattattttattgacaaaatctaacatagagtggctgtaattttgctttgctagtgaggaagcaccggctatatatagtgatagagttggggcctcgtagtcgcatatctctgcgggcctcgtagacgcataatactcaatagttttaaatcctggtactaatgagtattacacaagtgagtgcattttaaataggaattcattaagaccatgattaattaccatcagtctccatctatttaaccgtgtgtagtgttgtgtagagtattgtactcaatctaattgtagattcttttttataatgttgatggccgttttgatgtgttttctataaggatattaaacaagactggggagaagagggcgacaaaaaccagagggtagattcataatgtggtaacaaaaagggtcaacaataatttaaatgtcagcatgcgtgcccactcatcaaaactcgatggtatgaccatcattatgtcaaaagaaagattttattttggtcatttagtatcagtatgtcatctaagaggacacacgagtacttactacactctgaaacccttgtcaagtaaattcatccaggattgtacaatagtggtgataaagccttggatatccccttgaaatatactccctcgttccctaaatgtttgacaccgttgatttttttaaatatgtttgactgttcgtcttattcaaagttttttgtgaaatgtgtaaaactatatgtatacataaaagtatgtttaacaataaatcaaatgataggaaaaaaaataataattacttaaatttttttaataagatggacggtcaaacatttttaaaaaagtcaacggcgtcaaatattttggaatggagggagtaaatcctccttaacgactatgatatagcgaaatatacatcgtactatatgcatttttcattctgttttctatcttgtccttgctatgttactataataaattacattttttccaagtgctataaatgaaagtaactgaccccattaaggtcctctcgaatgtagaatttttttagcgatttgtgaactgaattaatatctaggaaaaccctacaaaattcatgtgccgttttgaaatggaaagtaatatacgctcttatatcgtctgcttggtggcctatcggctgcggacaaaatttaaattgtaaaactaaaatttaaagttgattttgatgttttgttcatcacagtctatattcgaccacaagattttacaccataagttagtatttttaattgatatttctacagcttatcatcccgagcccaaccaattagaacaatagactcttttgagccccatctattgccctaaaaagaataagttaaagccaaaattcgaattttaaagtttaaattttgaagttgactttaagatatttttaatatagcttcttctttagcattgacttttaattttttaggatcatatatataaatattttatgcacaaattatgttttggtcagtaataagccattacggcttataataaacttttggtcaaccgacaagtccgtttttccacgatgtatcgcaccaatgaaattcatgtgtataagtaaaggatgtgaaattcatgtgtttaagtaaaaggatgcttttaattaaattcatgttatcaacctttgaacataaatatcctaaggaaaaaaaatcatgtgtagtaagtctaaaggaggagtaattgatcgaaagaatcaacgcccacgtttcgtttatttggggaataagccaaagccaaacgatatatttgcaagcaaaaattaatttgtaaataaaatttgtatatacatgttcttaacgatctaaaagcaaatagctaaaaaataaacttcaatgtaaaaaccctaaaatcatctccaaatttaaaatttaaaatttatattttaactgataagtacaagcataattgaaaagatgagaccgcaagagtaccataccttaccttacatacgatggaggcagccacgtagcttcatatttccaagctactcctacccttggccttgggccctctgtcaggaaagatattttgagcccagagcaagcaaccaatggcaggcgcacgcacacaccaaatgaggctaccatcaaatggcctaatcaatcaaagaaaaagtcaaattttaaattttccagcttaattttaagatatttttaatgtagtttctttttcaatattaacttttaagtcaccaaaagcatatttataaaagtttcacctataaatatatttttatttcctaataagcccttttggccaaacgaggacctgagcaaatgagagaagagaagggaaaaaaaaagaaaaaagaaaagaagaaaaacggggcgcccaaatcgggaaggattttaaggataaccggctgcccaccggctacttcccgccttctatctatatatccccccctccctcctttttctcctcctcgccaccgctcgccggcgccggagaccaccaccaccacctcacctcacccacctctgcttcttcttcttcttcttccccgtggtgtggtgtggtggtgaattgttgttctgttcccttcatttttcgttgattcgtgagcgcggcgacgtacgtacggtggtaagcatcgtcgtggattcgtctccggcgacgggggggagtgggtagggtagggatgttcgtcaaggactgggactgaggtgatcggctaaatgtaccgccagaacgagtcggccctctcctgcttctacctcttcctcctctggttcttcttcttgaaatagactccacgccgcgccaattcccagcccgagcgggagccagctgctcaatccgtcgttgagattggttgcggtttgctctagcttgtgaactcggcggagatttttggttttttgttttggttttgggtttggttgggtgagtggtcgatcgatcggaaggtgttcgatcgattgcttgcctgctttgtgatggagttggatctgaacaacgtggcggaaggggtggtggagaagcatgagacggcggcgaggagcgactccggcacgtcggagtcgtcggtgctcaacggggaggcgtctggcgcggccatcgcgccggcggaagaggggtcgagctcgacgccgccgtcgccgccgccgcctcccgcggcggtgctcgagttcagcatcctgaggagctcggcgtcggcgtcgggcgagaacgacgccgacgacgacgaggaggaggaggccaccccctcgccgccgccgcaccaccaacaccagcagctgctcgtcacccgggagctattcccttccgccgctccctcgccgcagcattgggcggagctcggcttcctccgccccgacccaccgcgcccacacccagacatcagaatcctcgcccacgcgcctcccccggcgccaccgccgccgccgccgcagccgcagcctcaggcggccaagaaaagccgccgcgggccgcgctctcgcagctcgcaataccgcggcgtcaccttctaccgccgcaccggccgctgggaatcccacatctgggattgcggcaagcaagtctacctaggtaatttcatcgaacacatcatcttcctcctctcaatccaacgcgacatcgccatgaacaatctaacaaacaccttcatcttctcccaaacaatcacaggtggattcgacactgctcacgcagctgcaaggtaaagaacacatcacatcattcatcagaacatgagctctgtgtttgtgaaggagattgagagaattgaatgatgatggatggatgcagggcgtacgacagggcggcgatcaagttcaggggagtagaggctgacatcaacttcaacctgagcgactacgaggaggacatgaggcagatgaagagcttgtccaaggaggagttcgtgcacgttctccggcgacagagcaccggcttctcccgcggcagctcaaagtacaggggtgtcaccctccacaagtgcggccgctgggaggctcgcatgggccaattccttggcaagaagtaagaacaccatatatatatatagctctctctctctccatcttcttcttcctcatcttttcatttcaacatgttcttgatttattgtgattgtgatcatccattttgagtagggatgatagtaagtagagatagggtgtgattagatgcatagaacagataagagttaagctagaaattaggcagtggatagggaattcctcaccggtgggaacgccatgcttggctgcaggtacatatatcttgggctattcgacagcgaagtagaggctgcaaggttatcatcagcttggattctcttctcttgtacaattgattcaaaccaaaaaaaagtcttttcttttttaaaattttactttctcgtgttgttgattttcgatggaccttgtaccgactcgaatctcctctctttttttttctcttcttttttctcttctcgttttaaacatcagggcttatgataaggctgcgatcaaatgcaatggcagagaagccgtcaccaacttcgagcccagcacatatgatggtgagctgcctactgatgctgctgctcaaggtaacatgcgtgctgaatctgatttgattaaattttttttctgtaactgattaactagctgatgaactcagctctgaacagatttaattaaatccgggttcaattgtgatttcttattatttttaggagccgatgtggatctgaacctgagaatatctcagcctgcagcctcacagcagagccccaagagggatagcggctcccttggcctgcaaatccaccatggatcatttgaaggttctgaattcaagagagcaaaggcaagttgcaattcagtcaaaattcttccgatggatgatttgtttgcatgtcaagcaagttgcagtaatgcgaaagaaacacaaaagcataaataatcaagattcgctttcaccgtggtagcgactaaagtatgatgtgcaaattgcatatgtagtcttctacctagtgtacttcatagaccccatttctattgctaccgtctaaatttgatttctctattgtcggacccaccatacgtacaaattggccccaaatttcatcaaatagtaacaagtttctctttttcttcctgattacgttgtaggagcatctctttcatgaaaactgtaaatgatattcaggatcactgcttagttgatatttcaactgaaaaacttgtgctttgctgtgcagaatgatgcagctccctctgaacttgctagccgccctcatcggttccctcttctgaccgagcatccgccaatctggactgcccaacctcatcccctattcccaaataatgaggtgaaaattttgtagctttcaacactgtatttagcttcatccacttgcatttcttgtgtggctatcagtttagctcaagtcttacatcaatgtgcttcatttccttccggcctgtcgacttcagtagtattaatgcctggcacaagtttcatatgtaggttcttgaattttcagaaaaggcctaattagggtagcagtactagtctatatgcattataaatatgtttgattttttcttcaaaaggaacttcctagagagttgacgatttcgcgttaggctttttataaatcgtcagtccaactgttcctctcaacgtgctaatatcttataaaattagtgtcggctgttgttcaaaattccccattgggaaagaaaaatgatactctgccatcttgttattattcagaatgattagtatactacatcaattggttattaaaagaggttagactggtttgccgttagacatttggacctgggagttttgttcaaatttacctctgagacttcaaggatagcttcagttacgtccttctcttattttccttggacggaaaggtgatctcgacgtctgtagctgagatttctgtccaattgaatcgtcgcaaatccaatccgataatcatattttatccaaacaaaaatacaatataatagttcttggcaatttgtacacctgtatcttgatggatggataagaaattcagcaagctaagctaagtacaatttttcactgtttgatgatgcaggatgcatccagatcatcggatcagaagaggaagccatcagagggggtagctgttccaagctgggcatggaagcaggtgagccatcatcaccctgctcctcctcacacgctgccattgcccttcttctcctcctcctcgtcgtcgccgtcgtcgtcctccgctgcagcatcatcaggattctccaaagccgccacgacagcagctgctgcccaacacactgccaccctccggttcgacccgacggcgccgtcgtcttcgtcgtcaagccgccatcaccaccaccattgataaaaaggaaagaagccatcaccaccactgtaaattttgccgggaagccggcaaatttttttttttcttggccgtcgccggcgtttcaacgttttcgtctttgcgccggcgggccggccgggtggtttcttgtagtgattagttaattgggattcatgactgtatttgcatccacacataaaacgcccaaaaaatgttccaaatgctcctagtctctttgccccctgatctcagagaacagatcatactaacctgagatgtattgatccacacaccttgttgtagagaatttgttatatcagttactgagattactaaacagtacaggcatcaactctgactttacttagaactcgttcttttctgattaagatatagatacgattttttacctcggttttcgttagcatgttttttcaaactgctaaaaggtacattcagtgcaaaaaaaatttctaaatagaaattgattcaaaatgtcagataaatctatttttaaaatttataataaattaatactcaattaattatgcgctaatgtttttaatgtccccccttaatcttcatttacgataaaaaacgagcacctttacctagtagtttattgtggatagggaaaaaaattaaaggtttgcataataggagaattattcaagttactttcttggctgtcacttggtgttgttgtcctttcttagtttggtgccagctaccaagttgcttccagagcaaacactagggatggcaattgtgcccgtttgcccgtttacccgcgggtaaaaaccctattagggttgggtttgttctccattttatacccatgggtatcttattggttcaaaagctatgcccgatgggtaaatgggcatgggtatgggtaatcactacccatgcccgctttgcccgtttacccgcgaaatctaacttacatgtaggctaggagtaaaatccactagaatacataagccacgttctttgttttctacgatttcccttttatttcccttattatttctctcctcttactctatcgccgccagaggagagacacgacaccgaggtggagaatatttgatgttttaagttcgattcgaagttagtagcttgtagactttttgttccactgcttttgttgtggcgggtaaacgggcacgtccgcgggcaatgggcatgggcaaccatccttacccgtcatgtagtaatgggtatacccacgggcacaaataatctcacgggcatgggtatgggtaggcactacccgtgcccgtcacacgcgattgccatccctagcaaacactgttcgtttgttcgttctgcactgtgccaagatttggccataatggacagggaagcatttggtacttgtaagaatatatgcatgtcccttacagtacatttggaaccacacagttttttctctttcctgtactggagtagattagatttgtctgcaggaactttcactctctgatggctagtagagttaaatttgtgaaaagaacactgaaaaattcaggcagatttggtacagagaccgggtagaaaaaatctacaaaggacaagaggacagtgaaaaggaaatacagtggcgaaattttgacagattttaacatgaaggatagtttatggagagagatactactcacttttagagttgaacacatgtatcaaaataggtaaaattaaatgtgaaaatattgtgattgattgagaggaagatgcaaatataaaatttaaattatggaagattacgattgattgagaaaagaacgtagatgaataagtgattattatattctagaatggacggagtatattgggggaataataataactggtgcatgggtgcgacctcgtctggtgttacgtcgatgcgatgctgctgctggctgcgacttgtgaagctttttcaatgttttgttcgtcgaatttgacggtgaaattaccagacggacggcaggcagctgtcggcatcgggtcacccgacggcaaaaagttggtgccacatgaaaagaatccgtcacgtgaagggacatatgtaaactattttccatgaattccgactgctactagctagtatctctacactagtaaaacataatataagttttttttgattgtttaatatttttgtcttaaaatataagtatatttgatcagggccatcctagggacgtgcggccagtgcgcccgcacagggcccccaattttcaggggtcccctaggtccaaaacttcaacactatatattcaactcagtaagtaaattggtagcctaactagtcctgaaaatctgttatttttcttgtcgttttggcttcgattacgcctttgccggttcacacagttgcggcggttcgcaatctttaatcgcctcccactgtggacctcgccaatcgccaatcgtaactaacgagaggagtaaacgatgcctcacctttttctctcgtgcggtcataccgcctgacgcctgccacgcccctgacataattctttctagtaatttctaatccggtaatccctaattttagattatcattttaggccattctagatttctatgaaatatattacggagtataaattattttcatattatattatcaattaagtttttatccttcaactttgcacagggcccccgaatttaacgggacggccctgtatttgatcttttaacaaaatgtatggttctggaaaaaaaagtttttgtttgagacagtcaccttagttgattaaattttaaatttttaattgtttatacttctctcatgattggctgaaaatatatagatttaccctagaaaatacttataatatgatacaaattttaaatcttaaaaattcttatacttaatttgaaacggagaaaatgtctttgaaaggtatgtaaatggaagacatgcgatcgatacaatgaaaaataattaaaattataagtagataggttttaaggcaagcattatattagtggtgccttgcccgccattagttctccggcacatgactataaacatattggcatgaagtataaaatgcatccacaactataaaaaatcctcaaaagaagtagagtactgctataagtataatctaattgtacaactcatgtacaactagagacatgcaaccatagatgaatcaaaggagagcatgttcatatgcactgcagccgtttataaccattggtcaaattcaatcatacgtgagccgcatagttaggttgtatgcatagcaatttccaaaatagtaaatgatcccatgatggtaaacaggtcagacgctagtagtgcacttggtgttaaatagtggatatcttatgtgttgagatagattctctcttggattgtgaatgactgtaccaagaaacgtgtgagcaattgattctatattccttccatcatattggcataatgttattgatgtgaatatgagagatggtggcaagctcatccatgcatggtaagcatctcaacatttcaacgttcaaacatcaaactttgcaatctcgaccagtgataaccagtaacccgtaataatatagcctctcataattatttgattgttagccaaccaaattttgaattttagttgattttttttatcgttgtatatttttcagccttggtttttaaactgcggataaaataaataaataaataaataaataaataaatatatatatatatatatatatatatatatatatatatatatatatatatatatatatatatatatatatatatatatatatatgcttataattttttttcttcgttcataatataaactgacattttttttaaaaaataactgcacttatgtacatattataaagggctctgacgcactcttcctattatagacattaacagcatattttgaaatcaacttgaaggtgcagtttttaagatcataccttataaaaatcaaaagagatgtaccaaacgaccaatgctagcaaaactcttggttatgatgaacatgcatcgttatattggtactagctagatctactggtatcctccaatcccattgctcccttcctttaattgttctttaattacttgcttccatgtaaatgcctctgaatttgtttacaaggcacaaactgcagcacaagttggcaattgtttgttgcttcgatcaggagaacgatggtggttcacatatattttactatagcagggaaccaacatgagatctgaaaatgccaagaatatatatgatagcttagttattttggtctcagcagaagcagacttacttcatttttttctattttctcaaaaggaaaagtagttaatattgcttaatttttataccatacatagtgatattttaaatttaaaaactgagcatgatttgaccaaagttagctaggtgtacatcagtagtactcctacatagctagtggatcgatccaattatatgtgaacatcaagaaaagaatactagatatcatttttttttcatatggaatatcatggtagctaacacctctgggcaacatagtaatagaagaatacagagagtacttttctgaatggcaatgagaagctgtcgtacaggtgtcgacgtgtaacattatagtagttgtgttgatgatgcctccccagatgagattattattattaattattattcctttcttgaaagtattgcatgcatgatacctcaaaatattcaaacaaacagctccattagatcaccgacaaacgaccatcaggtcaggtacgtaccatgaaaaagataactaacaacactgaaaggacaaccacccttaagcaaaaaccaagacaccacaacccccaagcattttaattagtactgcaagcattctgataattaatcccttcatgtacctaaaacaatatcttcttttcttcccattaaaatattagatttgaccccatattattggtgtagatatggaattaagaaaataaaggtagatctgatatggacacaatatataggcaattatatcaccaggaggtgggcctcattggtgaagtgtatatgttgttaaggtacccatgtcaatgatgattcataatattagcttctcaggataaaaataaagtttccatctctttaggggtgtatttgtgagtacttcagtttgtaatggcgtgcgtagtaatatatgtacatatatgtatttcatgcaatcgtaaaaaaatacacacacaacgatagtgatgctattggtagacacgtagattgagaaatggacgatccagattacgtgcagttgctattattaattaacaaatcacaatagcaactgcggcggatctcaattggttcgtaacggtctcataagaggaatcatccttatgcatgatggcgataagaaaacaaagtataaataatacttcaatttggattttttaaggattgaggccgtccttttttttttcttctaccatgtggtgggtctctctctccttttggcatgattcctcgagagcaaatatattgctatttttatttcgaagcgcctatatacgtcactgcttacgttaattccctgccggatagtaataatctaagtttgcatgacatggatcagaggagactaatataaaaaatggacaagaaaaaaatagattaacaatgggtcatcgtactagtactatattgggactaatcacattgttaatgctggagattgattccttgtattagttgtaatcgaacgagttctttataaaagtggtcttattgtttgtactctgctttttgtttattggggataatcttttatactatcaagacgtgtagttatactatgaacacatgtactgcttttagtatgtcctttattaaaaaaaaggcattatttattttgtgtgtagcttaatcatcatgacacacttgtcttgatcactttgattatatattttggtttagcctaatcttgatttttttattccctgccagattattcacttttagtaccaattggtttcagtaattattttaagttaacaagtggggcctgccctgtctgctaagataacatgggcaagcaaaattcaacatatatttaaaagagccagatgaccatcgagttgaaggaaacagctgcatgttaattacttttaatttgattagatttgtcagatccaagcttatttttctactagctggttacaatttgttatctatttagtacaacaaatcatgaagggtctggatgtgtgtacagtacctattgccagctccaataaaatttctccttttttttgcttaatgataatataatacaagagcctcgacaagcacaaggaatccgtaccacatattaattatgaaaattttactagtagtatattggtagacttaatctaaaccaagtaataattaaacaatgagatgatatcaaacaccacagctccatccactgtaaattatagtaaaaacagagcgtttgtccgaaaccagctagctgtcattttcgtttagttaaaatacgtgggaattaattttataatattttaattcactaatatatgagaagcattaaattttagtacatgaaaatgatatcagtatagttaatactactaatatattttataaaaggaaatagagcaagctactgcgttgttgtaaaatagacgtccttgcaattaaattttaagattttaattcacaaatatattagaaacactaaaatttaatacacgaaaatgataccagtatattaagatagttactttgatgtggttataaatttaacagctttaatacaccaatgttgacaaagtaactgccgaaaaacctacacattaaaacccgtatcagtatatatcttgattgacaaataaaaaaggaaatgaagaggagtaagacagtactatcattgttagtgtcctaattaggacgatgacgaaattggatggagcacattgatggcgacgcaacaccagcaagctagctagcactgctgattgcttcatccatcaccatcactcgtgccagctgatcatatcattgagttcacacgtgtagctagcttaattagcttgctcacatgttttaaatttcttttcttatgtaataatataagatggtttaaactctccgttcaacgatcaaagattcaaattctttcaatgatcaataaaagtcgtaggcagcgatggagctagaaataattccaatcctgaagaaattcaactatatcaacaacgaaaatttgaagggagtatttgacggtgtgcctgggaggttgtctaggatagccgggcttaaataaaatctacaagaagttatacaaatatgaaaatatctcgtattttaagtcttcctttagtaaggacatcgctcgtgtaaaaatcctataaaatttatgtgttctgaatcggtagatggtaaaatcagccagtcagtcaagtgttagaaaattcttgggccttttcttgccatcagcaataatcccggggcctgttattaatgataaaaaagtctactgactccctccaatatagatcgaattttgagagagtcaaattggactttttacttaatgatgaccctgagctctagttgcacaacaatacacagaacggcccaacaaagctcaattcagcccattacacagtgttaagctgctggtttgggcctattcggccttatttaggaataagttcactttgtgacccttaaaagtgatcgaaatctaattcgtgaccctaaaccacaaaaccggatatctcgacctctaaactcttaaaaccggtgcaatttgactccctcggctgttttggaggacggtttcgctgacgtggcgcctacgtggcgatgttgactcagtcttcggtccacatggagctgacgtggcgcttatgcatactagaattgaaaatatatatgcagaacccacttgtcattcataccaaaataataaatgtatagccattgacatgtggggcccatatgtcagtcatctttccttcttcctcttcctcctcccttcctgtcccttctctctctcctatttctcttcttcttcgtctgcaggaggtggtgggtgctcgagggtccgagtggccgcggcggcgagcgggagcggaggcggtgacccgacggcggcaggaggagacgccgctcaccgggtgatgtgccatcccggagtacaacgccattgagctcctcgcccaccacgacacgctccacctgcgcgctctcgtcgagcggattcataccgccgccgcatgccaggccgatgccgcttatcctcaaaagaatcctaccgtcattaatggcattcctagccttcttgtttttgctttgacccagcaagcaagaaactcctccagcgtctagtcacctcaaccacgaacttgaatccgttgctctgctactgctgctgtaacggttgcgctttgagtgtgactacagtgtctgctgctactactactactactctgctttgccactacttggttcgcaggaaggtggtgagagggaaagtgtaaggatgagagagggagagggattgggatggagttcttggtggctcaagcgctcctcctcctcgtcgtcatctccaactccctcccgctcccttccttgggtcttgctgcaaatggtggcacgccgccgccgccgctgggtcgccgcctcccctcccgctcgccgcggccgctcgggcccgccgctgcctgcagacgaagacgaagagaaatgggagagagagaaaaagagagagagaagggaggaggaagaggaataaggaaagagggcccatggccccacatgtcagtggtcccacatttttttttgtgtgagtgacaaatggtcccgcacatatttttttaattctagtatacataagcgccacgttaactccacgtggaccgaagactgagtcaacattgccacgtagacgccatgtcagcaaaaccaccctccaaaaccgctgagggagtcaaattgcaccggttttaagagttgagggatcgagatatccggttttatggtttagggtcacagattagatttcgatcacgtttgaggatcacaaagtgaacttattcccctcgtttatatggatctcatttcaggcccatccaacttgaaagctactagtaatatttcggcccactaaggtgacacctagatgggttgggccatagtccatggatgagacggcccaatgggctgaccagtcttcttcaaccctactcctccaaggcaaagcaaagaaaagctcctcgtctccgcgttgccgcacaagggaaaccctcgccgccgccgccgtcggggatgacgtccgtgcgcgccgtggggtccacgctgccgtcgatccgcgcggcggcggagctggcccggcaggagctgctgcggcgggagctggtggagtgccagctggtggcgggcatctggtgccacgggttcacggtgtcgcagctgcggagcatccgcgccagcctgccgccgacggcgaggctggttgtggcgaagaactcggacgtggcggcggcggtggccgggacgcggtgggaggcggtgcggccgttcgcgcgggggatgaacgcgtggctgttcgtccgctccgacgagatcccgccggcgctgcggccgtaccgcgacttccagaaggagtggaagctgcagctcaacgacttcactggcgccgtcttcgagggccgcctctacagccccgacgacttcgcgcagctcgagtccatgcccaccagggtccagtcctaccagtacctcgtcggctgcctccagatgcccgccgtctccgtcctcgccgcgctccgcgctcgccaggaggccatggcgcagccgccgcccgccgacgagccggctccaacgccaccggcggacaagtgatcaccgcatctctcttctcatttttttttctcctgcaaatttgtgttgcagaaacattggtagcccataaaaacgcattgcgttgcttgaatatgatgtatcatcttccaatattacatgttgatgttttgcaaacaattgcgaattcgcgagtgatgccgcatcgccattgctccaatctcacgctcaccatcgttttggcactggttgatcgtgggttttaattgcactgatgcatgtgagagtggagattaacggtgtttgaagttgcttggaattactgatgtgttcatgagcttgtgttgcagtgaagctaacactgttactggtagcttgaatgcttgaaatgccagtgatgtgtagagtttgctgatttttttttcttttttcaaaagttagttttgtacaatcgaaagatcatgaattttgaaatatgacattgaactttggtggttcactttaatagcaccgaaagattatgttgcaaagaagacaaggattacttagcattagcagcacgccaacactgacggcgaaataacaaacttcaggaaccccaagggggttgaagcataggaggttgatgccttcaggcttcattcagttaagaaactatatccagcagaattgcatggtgagcaagccttactgaatatagcggctttaccaatgcaatcttcaggtagatgagtcggaacgacgagcacgtatttacactgtagaacaaaccaaccttgataaattaccatgcctgtcacaagacattagggtctactaaaattcctttcacttttcctatacatacaaaaagagagaacgttgctacctaactagcacataaacacccttgagcatataaagatctggcgtttctgcattctggacttctggtaacttgatgtctgagacagtacatagaggtcttatcaaaattacttccatgttttacctatacatgcacaaaggaaaagaacgttgctactagtatctcaaaccatatcaacacccttgatatccaaagatctcacatttctgtattctggttcacgacgaatcagcctgagagaagccatctcaaatactcagttccatcatcacaagctggggcatcatcatcaggagcagctaccctcttccgcatcaaactctccacaggtatggctttcctcttcctcccacctgcttgacgtggtcgttccccgtcaatttcttcgaaattagcctgcacataatgatgggaaaattataatcatcttaagggtttaacaagaagaagataccatcggtcagctatttcatagcagaattgttgtttgtgttacctgaacgtacacatgagcactagatttctcatggttgtcccttacatgcttgtacgaaaaactcttgccacacccagagaatccacatacaaagggtcgcttctgctcatggactgctttcacatgcttgtccagattggatttctgcagttcaaagtcccccccccccccccaaaaaaaaaaaattgaaaaggatggaacgatttgcaatttattggaaagaaataaaaaaattctgtgaaacagaatcaaccctgaaagattgaaatcctacctttgaaaatgacaacttgcagtccttgaggtggcatcgaaccctctcagtaacacaggaaccttcatgcattctctgatgacgtttgaagttcttcttcagctgtttggttccacagacatcacagacaacatgtcgatgacaagatttgttatgggccttgaggcattccaagttggtaaatgccttcatgcagcctggttcacagcagataacttcactataatccaacttgactgcacaagtaaaacaaggtatgtcacggcacaattaaccaattctcacttctcaacttctcacaggaagtaaaagcaggcatacagcgcatgcacagtataagtaaatcatgcatttgatctgaagagataaatgatctttaaaagaaacaggagtatcttgcaggatactttgaagagtttatatcagtattctagctcagaaatagaaaaagtcagagtgtcagatgacataaccagtctatatatgataaaattgatctaggagggttgctgagctatttaaagacagtaagaaaaatatggcacacaagtatctcaccatgtgattcctcatgcttctgtaacttagaagcatatttaaaagtcttcccacagttttcctcaggacagatgaactctttcttgctttcacaaggagagccatctttatgcatttcctgaacatgcctttggatattaccctttatagtgaacttacggttgcatccttccatggggcatgcaaatagctttccttgatgtgtaagtagatgccggttcaaatggtccttcctgctatagctgaaggggcaaccatctacatggcaggaaaagggcctctgcaaaagcatataccttaaatgttatactgaaagcagaactttatgatttacttgacataaaataagtaggtcaatgtacacacatatccattcagtgcaatatgctaaaactgttccgataatcacactactatgctgcaaatgagacagctgcatgaatagtcaaataccagtgacaaatatacatgtgtatcttgactgagtaattgcatctaagacaggatccttaagtagcttgagaataacaatatctcagtacgtacatatcactgtaagtaataacaacagttggaacaaaatcaagtcttagaatgagcaatttgaaatgaacaagcaaacctgaaaaagtgtgtgaacgaggcattcttgatggagcttctcaggagagtctccccatcctgatactagtccattcaaagccttcacgcattttggagttctttgggatccaatgcttcacgcagtcatatatagtctgccaaaatcaaaatatatcagaaaccacaataggccatgcactaatccaacgaaacagagagccaaatggcacctatacctatatacttgaattaactttcaaatgagtaattgttttggttgttgtgtagaatattcactgaacaggacagatacacgtcttttacactaaaggggaatacgaggagctggttattccatcacaagcatagctatctcttcagtgtacatgctctacctacttggttaactgtttgatcaaaagaccatcaagtggtgcttgcattagatacaaccaacagcgctacgcatgcagttcttcaacagtagacttgcgcgtaagaaaagatccttcaatagcttggaaaaactaagaatgcagcgcacgtaacaataacagcagtagcatagagcaagcagttttttgcaacagaagaaatcacctgaagaagagcgtgaaagaggcattcttgaaggagcttcccagaagggtctccccatcctggtactagtccactcaaggccttctcgcattttggagttctctgggatccaatgcttcacacatccatatgtaacaaaatagtgaaatagtctgcaaaaatcagcatagatcaacaaacctacccaaccaaaaaaggagtgaaacgacaactattaactgtccagggaaatttgctgtcaacacagcataactatcaccatccctagtccctacataggacagagcatctatcacagctattgcaagtaatactctgaacagagaaacacatagcatctatcacatgcgccaaagaacttgatcatttcagtgaacatgtatcgaaattcagatacctcaagtgaatggctctgcatgtgttgcctcaaatgggccggcttcttaaaactagcaccgcacaccttgcaatcatggtccatctctttgcacgtctcgccgccaccacgtcccaagtaatcatccaaatcatccacttcatcctaaaaacacaaatagcagcaccgacaaaaccaaacagtcaatcattcatccatccaagtaaccaaccaccgtggcgagcagccaaagcacggagaatatgaccactagacgcatctgaggttctgaactatgaagcgagagacgccatgagcgaccttatggtgttcgaggacgtgggcacggatcaaccccttcttggaacggacgacactgcagaaatcgcacttgtaccgcctaatatccctagcaggaggcgccgcccccttgctccccccctccccgccggcgacctccctttcctccgctccgagctccacgctccccatctctgaccaaaccaatcccccaaaattcgcgtcacaaaacacacataacgagcaaaatcacaaccaaatcaaccaaaatcaccgaaatccgcgctacacgcggcgtgaataagcagaggattacctctaattgcagaggaattcgctgaatcagcggctccgcgaggctccagatgttggcgacggcggcgcactgggagaaggagaaaccctcgactcgaaccaagcagtagaagcggtagtggagtaggcaagtcttagcgggttcgggtttgagaatgcgggtgccgggttcgggtaccaccttaaacccgcatgtgtgccctcattctcccctaccacagttccttcacgtgtgcccggggatggcaattttacccacgggtccgggtatccgcggatacctggcccgatgggcatgggcatgggtgtaatattttgcccgtgggcatgcccgcccgagacccgagaacatagcgagcagcggccgggtattattttttgcccgcggataatccatgccctactcgatacatatgtatttgctaattttggcccatctcttatgcctcataccctttcctcttggcccatttggcccactaaccagatacatatatatatatactcaactaatagaaaccctaacctaattccccactccttctcctacccaatccccacagcagctggcggcggtggcggtgcgagctattggcggctgcacggccgacggcggcggcgacgtgggctattggcgtcggtggcggctgcgctgccggcggcggcagcaacgcgggctagcggcagcggcgcggctggcggcggcgcataggagtaggcggcgcacggcttaggcggcgttacacgacggcggtggcggtgcacggcacagacggcgtcgcacgacggcggtggtggcgcacggcacaggcagggccgatgggtacccatcgggtatgcagtgcccgacgggcatgggcacgggcataggattttgcctgatagccctttcgggcatgggtcgggcatgggcacatgggtctcgggtcaggcatggaatcgctctacccgtgcccgacccgacccgttgccatccctacgtgtgccctcattagtgtggtgtgtttgagaaaaaaaaggggaatgctaggtgacgggataccgtcccccaacgggatagctcctctccacaacgcgattcttatccatatactcactggccgccgtcgctgtcccccgccgttgtcgcgcctgtccaccgttgcctccgccgccgccgccgcgcccatccccaaccgccgcagcgcccgtcccccgctactgccgccgtcgccgcgcccgtcctctgccaccgccatcgccgtcctcgtctacaagggacggctgcagggggcgaccgcgcgtgtcgaggtgctcctcccccaacgggatgcccagccatatctagtaggaatcacctgatacctggtaggtatcatccgatacctcgcaagtatcacgtgatacatggtagaaatcgtctgatacctcgcgagtatcacatgatacgtggtagaaatcgtctgatacatgataggtatcgcatgatacctcgtgagtatcacgcgatacgtggttgaaatcatctgatacctgacaggtttcacatgatacctcgcgagtatcacgcgatacgtggtagaaaatcgcatgatacctgataagtatcacatatgatacttgcaggtatcacctgaaacgtgtgtagaatcgtttgatacctgataggtatcacacctgatacctactcgagatcatcctgttgtgtagaatcgtctgatacctgataggtatcacacctgatacctactcgggatcatcttgttcgaaaacgggattccgttatatagcagcccaaaaaaatgaaaaacaagattgggaagatatgtaaaataaaatagagcacacatcttgaagtctatctgaaggacgaaaatttgagtgtaaacaaattttttttcacacgagtgatgtgtagcaaaaacaaaaaaaagtcgaaaatgctttcggacggatgtccggacactgtaaaatatcgaacgtcggctttatccaaacattctctaccacatgttcattcttctctctctttcttctcttgctgcttcaccagcattgttggctatctccaccacacgaatcattggtggccacacagtggtagcgacgggggcaagacgacacggggtagggggaggcactagagcttgctaggagccacacggcgatggaggcgatgcagcaacgccggcggggttctaatgctaaagcgattggtcctagtcgaggtcacctacctcgtgtcgttacttgtccgagggcagtgcccggagttgaagaagaagacggaggtgtcgggggacggtatcccggagttgaagaagaaaatggaggtgggtttcctcgggggtcggaaccggagttgaagaagaagaagacggaggtgggttttctcaggagccggcgactggagttgaagaagatggaggtgggtttgttttgttggagttttagggatgttgcatcctactattttagcttgttgcattctattgtattaaggtgtttcaatttgttttgatttgatgttgcatatattgaatcttcatgttacaatcaatatgtttcgattgcatttggttgaaacacttccgttgaagcgatgaaacaattttccttgattgatgaaacatctaaaactttttcagtgaaacatttttcatcgagcagtgcaacatgtgaaacattttacaataatacaatgcaacaccttcctagattgatgaaatatctgaaactttttcactgaatcatttctcattgaggagtgcaacatgtgaaacattttgcaacaatacagtgcaacaccgtccgatgttttgaaaaatatcaaatgtcctatttgtagcactcctaaaaaaagtatgtcccgactaaatgaaccaattctcagttctctacttctcacaggaagtaaatgcatgcatacaacgtgtgcaatgtataagtaaatcacgcattggatctaaaatatctttaatatatacaagggtatcttgtaggatactttgaagagtttatattagaaagagagagtcgagtgtcagatcacataacctagtctatacataataaaatttatctaggaaaagaaaaaaaacaatctgagttgctgagctatttagatacactcagaaaaatatcagaccctaatttctatcggcccctgaaatgtcaagaccggtcctagcaatgacgaagaggtggtgaaggttgtgtcaatggccttcgtcgccaataactcaccgttgctctagggcaagaggtcatccgacccgtgcggaggcaggtggcacggcgtgacatgtaaaagagctccaaggagcgtctcgcgttgtagggatcaacatctccgggacgaaactaaatggtacatttccagcaaccattggcgagttgaccatgttagttaaattgcaaatagtgtacagtggattgactggaccattgccttctctggcaaagctcgatcaacttcagtctctacgcatagaagggaacacctttgtagggcctgggcttgttccagccgatttcttcacttgtctcggtacaatgtcatacgtcagtctaggcaacaatccattttcatcctggtcctttctagactcacttcagcttgtggaacctcctctgataaacttcagcgttgatttatgcattctcaccgggcgcattccccaattcctagcaacatttgctcagctgacatatgtcccagacaaataataagcttacagggattgttccgttgtcattaggggttaccccttcatgtagtactttgcctccataaccaaaccctctctagcattatagagtttgccgccaacctaggaaatgttcaaactttaagacttgatggcaaaaatttcaatggtcgtcttctcgacttattaaatttgacggcggagctggaggaactatatcttaacaacaataggtacatgcgtatgtatatatgcaggtacgcttatatatacttgggttacgtatgcatcttggtccaacatatttttaggagctagctcaattgcctcgttaattgtgatgccatcaatgcaataggttcactgggcttgtgcctacgtcattgctaaaccttgggaagcttaccaaggttacgctttcggagaacctgcttcaggggcttgtgtcgtccttcccgtctagatttactgacatcgataatgctctattaaccaatagctgcctaccgcctaccgagtattggtgactgggttacactgtagttgctagctacaggctccgtggggttaccatagaggtttgtagttaaatggcaagtgaacgatccctgtgaaaatcgttgggatgagacatcatgtgacaaaagaggggtacactgtcgcagtggtaaaagtgcaaggtaacaaggagttgaacaacacgaacacctccagccacaataacaccggtcggtccaaatagtagcactgcaaagtgacagacaaggacgacaacgccacctgccggtgtggttctagccactacctgctgttgtggcaataatcggcaccatggggattgtagtcataggtgttctgatttaccgccggtggcacaagcctacgacaagggaggtggtcaaggtggagatgattcaggtgccctagaaccctccggctagtccagttctacaaatctctttcgagatcgtggaaagagccaccgggggttcagcgacgccaacttggtagtcaaggacgggtgcggcaaggtctacaagggcgtgctccccgtcgaaggcgactgcaagagcgtgtgtgcagttcgaagctgagcttgggtgtgctccggcaccctcgcatcgtgtcactgttgacgtattgcgtggagaaaattatggtgtatgagtatatgtcataggcggcgctatcaaatcacttgttccgttaggagtaatatggtctgtgaagagatgaaggagtgtgaagattgcatttggtgtagctgagggcgacgtctcacatccgctgggagggatagggcctgcgaagaggtgaaggagtgtgaagattgtagtgtgtgggtggaggggcaaatgcccccatgtggtgtggctgagggcgacgcctcacaaaaggagctcccctcacactcacacaatgttcagccataaactaattgttgttttgctacagtagaaacacgttctacatgaaaatgacagaaaatgacctgctcggaatggagttgcatcttcacacaggaaactgaaacaaaataccaattctcacaaggcctattagaaaaaaaaagtttcatgtaaaatactatgtcataaatatgcagtgtctatacatttgttgtcctccattggtggagatctaaactctacttttatgtgatattcttgagagcaaaaggttagaaaggggttcctacatcttctcctgctagtgccaaagacaggcctagcattattcatagttattcacatgaatacacatttttcattttttttataaaaagtatgtatatgcaatatatattacgtatgtgtataaggaaacaacaaaagtgccatattaaacattaaacatatgctatatattgtacctttagtgctatgtgatattatatatgccaaacatcaaacttttggcatttaatctttttcttacttttgaatacacaacttcaaaatcctaagtccacctctgctcacgcctttattattatgaaagagaaggaaacggctccgataaaaaagaagaagaagaagaaaatggacctggtgatccgctattagacgagaagataaaagatctagaccctatttaggggaacttgtagttctcagccgcagctggtgaaaagctaatcaagtcatcatatatatcctagctagctgcatatataattatatccatgcatacacatttgtcatgcctaaggagctagtattcactaagctgatcatcatcataacaatttcaaaagcaaaagctgattagctctgagtaggcagtacgtcctgcatacaactgtggtattgtttagttacgtgacgtactccgatcaaccgaactgcccagcggccgcttgttccacatggccagcggtggaggaaggttttgccacccagtgttgccgctgctcctcctcatctgcttggtggcggcggcaactgacggcaacaagtaagctactcacgctcgctcatcctcttgatatctctctttatatggttacaaacttacactctacactacatggttctccaagaaacgtcagtgttgatacatttccacctgtaattcgcctccaagataatttatataattaacagaatatacaatccatatttacatccaaaaatccccaaacatatgtacacatatttatatatgttgcatgctcaattgattttgctggaagaattaccatgcatgtatatatggacttcaatttcatctctacataacacgacttgcttatgtttattacttttttaagttatcatctattcaaagtacaatttatattgtacactaccagactagcctgtagaaaaataggatttaccatcagaaattatttttctatgagtgaaccgacaggaattgccgatagaaaaatcaagaaattcaattttcctatgggttccctacagaaaatcaatttctaacggttctttcatgtaggttaatgtcaatttttcgttaagtaggaccgtcacaaaaattagttttactgtaggacaactgcggggccatcagaaaatatcctcgcccacatgatagatcacaagtatggtagtggtacaagatttcaaattgtatgcatgataaacttattaggttatgggaaccaacgtgcgctccaattccttgtcttttacatccactacaccgcaacatagatatagaagcactcaatctgtcggtataaacatctattaatggcacattgtctgtcaggaaagagttttaccgatagtcattttgccatgagcgtctgctaggggttcagcagtcggcaaaagtttttaccgacagatatcctttttactggcagaagagtgccggcaattctttagttttcccaacagacaaataattactggcagacaaactattcatggcataaaatattagtcatggcagattgtctgccttcttataacactaccggcatatagttagatactaagaactacattagctttttttaaaagaccatataatatattgcatcgaatgtaccattgccaagtgcaccaattaaattaatgatcatgaaacaaacacatctatttatgaaagagaaaaattaatttattgttgatgactttatccttcacaaaatatatctgtttacaatcgaagaaatataggtcagatgcccacaccacaaacacccaatctagtctagagtgccacctgcaaacacaaaatagctacttctgatggctttgcatgtacaaaagacgatgaccatccttccagtagatttctccatccaaagcaagctatcctacatgcagttcttcaacaagatgtgaaacattgctagaattggttcagctatcaaccacatcccacctagaaaagatattacacataataagcacaagaggaatgttacatgatcattttgtaatactgaaagtaaaacaactatacataagaaaaagggtatttgttttttgagtaaatttcataaaactacacgttttgtggtccaagttatagaaaactatacacactttgacacttgacgtttaagtacatatattttggtagtatagtttcacaaatccacactatcaatgaatgtattcacccgtgatatgacatggctgttccacttaggacgaggatgtggcatcctattatcagtcattgcacgaaattaataggatgccacgttctcatcctaggtggaacaaccacgtcatcttataggtgaatccattcattgatagtgtagttttgtaaaaatacactaccaaaatatatgtacttaagtgccaagtgtcaaaatgtgtgtggttttctgtaacttggaccacaaaacatgtagttttgtgaaatttactcttgtttttttttaacagtgtagctttcttgtggtttgcagatcaaagataattgcaatagtagcattgatcaacttagttgcacattagagaagctagaaaaatctagactgtttagggagcttctagcaacttaagattctaaaagaagttgcagttgccagaaactccctcaaacaggccgctagtacatgttgctttataacaggagattctccttagactcatcagtagtagtaaacgagtatatgagtctgatgacgaaaaatccactcttggccgatggtgccagatctgtgttggcgcgaactaagtcgataaacacaacggcctaggagatctgcttagctctagtgcaggttcaaaatattgatgagatgcgggcgtgccagttagtttgatcctacaactgacaagatatataaataaaagggtcgatcggctcaaaagtcgatagagcgatattagccgatgccgatactagtggatgttgatagagttttgatcaatcagctatgtgtccaatatagagtttgacacttgatataagaaatgacataaagacaatcaacgatgacaatgtaataaaataacaatataattcaatcgaaaccccgatgaatgatacgatagagtgcgtgctaatgcgatggttaaagcatatatcggctggaggtccgatgtcattaaatccaaacgattagataaacagtgaaacctttattgcgatcagctcaatccaacttgtatgtaatccttataagccaatgcaatgtccagataactcattggctgaaaccccgatgaaacccttgttggcaatcaagaagcttgctggagattatggttccaagcacgacttagtagatcaaacttaactgatgtaatactaagtataaaaagaaacataatatctagacaatcaagcatttgattgattttcagggtggtagatacattatataatctaagccagcaaagaaatctagctaatattgacaaaaccctagatagagatcggtcgatgcaagtagaagacactgcgaatctatattatataatgtatatgataactcgacgtcttacatggacaagattagagtgtggaagcgatggaagcactaatcccaacaatgcaagccgccataacaagcctttatctctcgccggagattgaagccgatgcagcccaacttgaaacaagaactcgtcgaaaagtaaagtaaaaagggtggcgacgcatcgaagttgtattgatcgagagatagattaaaataaccgcatatgtacatatttatacccatagaccgacataagtccctataggacatgacatacaattttataaagataaaagaaaaacataaagtccttattgaaaactaaacacacttttttaaaattaaaaagaaactaaatgagctctgcctaattaatatatagaattaagccgccatgacatggtcttcatgattcctttctaaacttggcctcaatcagttgattgtgctttttacttaaccgaatctaccagataatcttatcaaatttttacattaacacttgacgggtttggttttcataatgcggaaatcggattcgggtctaaacccgcacgtgagcccccactctctccttccccttccaccccactcgtgtcgtgtggctgagcaccgtacgacgcctcccccgcccgcctctccccgacctcgtcgccggcgatggcctccgcctccaccgccgtggccagcgccaccgccgggaccacccgttccttcgagaagctatctgccccatggatgataggccggggacacgtggcgctccccccgtcgccggggcgttatcccgcggtcacggtggccgcggcgtcgcgtcgcaccggcgaaggtgggaggaggcggaggagagccaggggtgctgatcaggaggatggcctctccctcagctccggtgagttgcgtcgtcctcaccgtctcccactctccagcctctcctacctgactagctagctccatgtatccgtgctaattaagtatagtaccaattaaccttctagttgaaaccttgagcttggaattgttcgacgactcatagagagtcaaaggtgtgattagatgatttctaatcataaaacgcgcaacgattttgtttatacctcaccgagcatatatttatctgtggtgaaattaagttttctggttccccttatgtataactgtgagcagaaattgaggcaccaagttccactccccccgttcgcactaccgacaaggagagcacgaaacctgcatcagaaaccggaatcacaaagaaaggatcagccattagaagagttactttggtggttagtgtttgacgatataacgcttcatcagttgattttcagtgctgcgcttgattcagtaaattgaccttttgcaggtccttgctgcggttttcttcggcgttagcatcgccctgagggatggggttgggaaggcatctgaatattttgctgggtatgtgttatgcgtcacaactgaatttttatactgaaaaatgttttatggaactgtcagcatttacccatccaccagaacaattgtaggattcccgccggcactattatgttagcaaagccatctaggaaaagagttggtgaaaattaaaaatgtatgggctcattcattggtttgtgcaagttagtttgcccagttgcgattttgaacgtctcttacttgcttatttacaaatagttaaatgattatttctgaatttaactatgcttcttctttttgtcctcatctcctgtcttttaaattttatgtgtaacaatttgatatgtttctgttgtataacagatatttattggaacagagtttgtcagtagacaatctctttgtttttgttctggtcttcaagtattttaaagtgccacaggaataccaggtatgatttagtagttagtttggtatataatgcccatgtctatttcatccttttcttctcacatttttgtggtattcaaaacaagaaccgggtgctctcttatggtattgctggagcagtgatcttccgcacggtgatgatcaccctaggagcagctacgattcaggttgtttttttctcacatgttaacatcacttatcttcttagttctatgatcttgcagtaattcttcttaacttctcttttcctgtagaggtttgaagcagtgaacctattattggctttgatcctgctattcacttcatataaggtggatcgatcaatgcttcttttcttctattctccttttggtgtactaagttactttaccatgtttgaaatggacatatatgatgctattattgctcacccaatacttccttttatgagaatgacaagttctcactgtcattttacaaaaatctacctgttttatttcctgtgaaatttcagtcccatcactgtctctaacaacaatatactctaatactcaaccaatcctggactccaggtgcatgtattacattattaaaaaagtatttggcatataccttccatcagtcaatggctaacagcatgatgacttgcatcttttggggattcttgtttgttccagctatcttgttatagttcaacctagtccttccatcatttagtgagcactaagttgtcacacttcaaaaatattatgttttgcttaattgtaatgaatggcacctcaacatgttaggcaaagcttctttcgagtaacttcaagtgcattaaatataagtgatgtttacggatgctaatattcattcttaacatgatggcagttatttgctgaagaagatgaagaatctgatctatctgacaatttcatagtgaaaacatgccaaagattcattcctgtcactggtaattaacttcattcgatgattttcagtttctcttatgacattacatttatattatttggaacgaaaccaatctccactgtgagctccagatcatagccatactgaccagatactcactgaaattttttccacttccttcacaagtgaacttcttatgagtagaagttaatatacactcgcttgcagttgcggttaaactcactcttatgtttcttttgtcagattactacgatggtgatcggtttttcacaactcaagaaggtttatggaaagtaagtgtccgactgttgtccagtataagctggatcattatcacaagttcacagcagcttgtacacgcttgttagtactagacatgattgccttcttagtattagaaaactgacctgtctacatattaaagaatctgaagtatatctatttgtcagtacccttacaacttctgcttgtgcagaaaagattctaactacaatatagatgaaattgggttgaccattcaatacaataatctgacatcaagagctaccttttcctgaagatacattttcttttgttgttaatatctgcaggccacacctttgctgttgactgtggcagtgatcgaactaagtgatattgctttcgctgtaggttcctttgcaatctttttcctgtgcaaagtttcattttctattttatgatcacatgaatggggattgacatttctgatttatagattgactcaataccagcagtttttggtgtcacaagggatccacttatagtgttatcatcaaatatttttgctatttctggtaatccttctttcttttgtgtttatgaacacatcttacaacaatcctttctttttattcatagcacatatcagcacttaccaatgtaagaaattttacaagagaacttttaccactagctaggaacttcccgtgagcttgctatttatcaatgaatatttctgcagcctttacttttgttagcacctgcagcctgcattcattcagccagttgatgctcagagttagttttcacaattttgcagttatctgttccataaaagtactgtttcttgctgtaggtatttgggctgcattcagcttgattgtttcatataaaatttaaatatactagttatatatctggatattacagacgatggtctaatgtggcacacatgaccctattatgtcctctcgataacgccaactctaggtttctagcaatctttgatgtttatacctcagtttgcagacaagtgattgatttggtaattgagtaacttctaatgatgtaattgggtaaatgataaattgataataacatacatcatagttacatactgaaagttgaatgaagcatgaaagaagacattagatatcagctagttttgatgctatatattttatatgtcacacattttatgcactcttcacacattgttaagtgcttaccttgaaaaattactctataggtttgaggtcactctacgtactcatttctgaaagcatgtctgaattggactatttgcaggtacaaatccacttgctcttttaaatatagtagagttatttacctatttatgaatactgtggtgtacctaatacttatcaattcctttagctatttcatagttatacttaataaacaacttggcattcatcactattgatattcgttgtatagcagtgattactagcaggtgttactgaaccccatggacattagcatatatccatatatttctcaattatctacttcttgttcctcttattgctattggcttttttttttttgcagcctgcaattggtatagttttgggcttcatagggacaaagatggtctttgacttttttggtgagcaactagaaaccacattagtgcacgcaattgtcaatactttcttatatacattgcggttcaagctatgttttggtttctccattagcaacaccagatgacaatgttgatctgtggcaggttatcatataccaactgaagcttcgcttgctattgttaccacgtgtctaagtggtggagtaatattgagtcttaggaaagcatcaactgaagaaaaggacaagtagccggcttgctggagaggaggtaaaagggataaattaacttggtgtttctttcacaggtagtcatactacaacaaataaattgtatcaatcatttaataagctagaaaaaagtacatcttttttccgaatgttacttgtatgcctatgtcaaagaaccagaccgacgaaacatgtaataagtcatgtatgtaggattaattcagtctt

SEQ ID NO: 6463 - DNA, 11571 bp, Oryza sativa
tgacatgtgtaagtaacatatcaacatcatttcaggttaagaagagtccaaatataatttttataaatatttacatgcatttaggaaagggaaacacatataagagataagtcttactaattatctaaaataatttgtgcaagataaaatcacgggaaaattcttgtaggctattctcactacattcaactcactgtaattttggtataatttaataactacatttgatacctcaaataaatcagacaaaccagtcaaaaactagattaactatagttcttaataggctaaaacaatagctaactaaaatatgcattaaactgcatagaagtatatagaggaaatagtttattcaaatactaggacatttatgatgagtaaatataaattttctataatttatcttctctgtttagttctcctaaaaattcaaactatttttcaaagagctcatcttctcataatttctgtaagtaatctatccataatttttaagtgcaaccaaagaaaatggaaactaggtacatacacctacctccagtaaaatccacatgaattgatatgcaccacaaattaatctatgaattaacaaagatggagaagataaataatcctgaaaattcgtccaaaaccaagttcaccaacctttctacccacctctctcactccaaccttgttcccttcgccctgggcccacctggcagtatccctggcttgcccacacactgtccacttcctcctccaccgctctacccgaccagcagacgagataacagccgggagagagagggaaaccgagagaacgatctgctcgacgcgtggactcgatgtggcgtcgccaagctcgccttcaacctctcccagacgcgtcgccctcgtctccacttcatttccacaccgaggaagccagggagagagcttcagctctccctctccacctcttgctcgtcgtcgaccgccaagaaggaggagctcgcattcatcgtcgagccatcgtcatcaccaactctttctcgttccatattcctcacttcatgcctaccactttaccctttgacaccatctcatttcatccattgcagcgacggaaacgccgccgtggcccccggagctctgcgcaccgccgcagccgacatcgtcgtcgttccgaccgctgtagaccaagccgagccgagccatcacgccaacgtcttctccttgaagtcctcttcaaaacccctcaataatcccaggcaatggcgcagcaagtacggagatcggccaccgtcttcttcacctccggtcgccgtcgccattgtcgattccgcctcctccggtgagccattgtccgattcttcgcgtatacactatccctgggacctcactaacctcatggacacacatgcacgctagatcttggagtcttttgagctgtcgccgtcaacccgaaggagtttgccgccgccggacctgttcgcgagctattacggatgaccaagcttcgccaaccttttctagaatctcggtgagcatcctgcagcctataaaacatacatgcatgcatttctttgggtagatcaagtctatagcacgacatgcaccaccacccgaaaacgttttccgcccggactcgccgccggcgttactccgatgtccactaaccgagaaaagtagagggatggaatcgcaataatatgaccttcattttgtcttttggtcgcaccctcaaacgagccaccgtttgtcgctggcaagcttgagatcgagctcggccatggcctgccctgtctctgcccgactggagaggaaggcagggactttgttttgaaaatttgaacaatcatagggttaaatatgaaaacatacaaaccaatgacatgtggatccatggacctaagtgaacttcacatgaagggcctgttcactttgttgccaaaaaaaaaccttactaaattttagcattttggcaactgtgcagctaaaattttggtaacttgtcaaaattttgacagaatttcttatatagttactaaaatttggcagcaaactaaatgtagccatttttttgacaactttaccaaaatttggtaaggttaaaaatggcatcaaagtgaacaggcctaaagtctagggacttctttgaaagatggtaagagactgacagtggaccgcctggagataaaatctgagaatatacaagagagatacctagaacttgtaaaatccatataaaatcaaatatagattattttgagatgattcaaatttcagtgaactcaccagaatatgaactttaaagctatgaaataaaaacttgcactcacggtacaaatttcacctctaaaatttatctaagttaaatcagacataaagcatgcacaaacttataaaatgcatagaaaattaatttcaactcaaattgaagcaaacttagtttctacagatacaccaacatattctctaaaaacaaagtaaaataaaacatatacacactttatatcaaatgcctctaaaactattacctctaaaatgactagttttagataagctgaactttagaagtttatataaaattcatcttagatcctttttgagtaaactcaagttctgtagaatcaccaaaatatttatttacaagttataaaataaaaatatatacttgctgtataataaaagcttctaaatatttatataaggaataaacaacattagagcatacgttaatttgtaaaatgtgtagaaaattcatctttagtccaaatggagtgaaccaaatttctatagaaccagcaaatagtaagcttcaacatagtaaaataaaatatagcaccttttgtacaggttatagctctaatatttaaatagataacctagaagttaatcacctagtaatggttaagcaaaaaaaatgtgtagaggtatttaaaatgtactctagctatgaataaaccaaaacagaacttgttagaccagagaggtcatatttccagccttagttcccaaaaacttagcatacttaactcatataacaatttctaggttggtatgttaagtaactaacatagaacatccctaattataaaatgtgtcgtaaaataatataaactctaaaattatgaactaagattagattagtcaactaaaataatcattttaaacatcactagcaggatggagcaagttatggacctaaatctccaaagccatgtacacatagcggactatatgcctagaacacgttataacttgcaaaatacataaagaattttggaaatacagatgagtcgtataagaaatctctgtaaaaaagacttgcatgataacttgacatgattttctagaaaaatatatattcaagtgaattctcatagtgaactaataataagattaaaatagccttcactcgttgttttttttgcatgctaacttgacatgattttgtaaaaaaatatacattcaagcgaattctcatagtgaaataataataagattaaaatgcggaggggggagacgggtatgtttttttagttactagcaataaaataaaaagcgggtatgtttttttttttaaaaaaaaagcaaagtggggggggggggggtttgggtttaataaaatgcagtgtgagagatcgatccctagtcggctggatgtaatggcaactcacccaccagcatgctaatctggttgttgtgaaatataatgaacagttaataaataatacatagaatggtggaccgggaacgtccggcccgagtccgagtaactcggggaaccgaacccaccaccggttcaactatgtattggagttgtattagctttggtaacatccacaacgtactatttgaagtgtcaagccaaaccaaaactagccctaaaactcaagggtaccccaaattccccatcgccgccgcccccgatccggcgatgccgctgcgcccgccgcccccgcctcagggattcctcaccgcgtatccatccgcagctttccctccggtgaagcggccgcatgaggacgacctcggcgccggtgacgtgctgaccttcaggttccactccctcgccgtcttgaaattattcgaccgcatccgcgagtaccgtctgcacgattaccggtaccaggcaacgcgaggctggtacagctccgggacggcgccggaggatgctcttcttccctgtgcggttgctcgaccaccgaggatgtatgggtgcgtgatcggggtgcagcgcggtcggacggtggaggtcgtcgacacctccgacatcttgctcgacaccgaccccggaaccctcgaccgcgacttgttgaagaagaagctcgagacctgtaagttgttaaaccctagctaggactttgccggtgcttaattgtttgtgttgtgatgtacattgtttggttatgcagacaagaaggcgttccctggcttggccattcttgggtggtactccattgacactcatgtgacgaacaccgatatggaaaccaaccaggctgtgagtatttacagccattcatttaattcaactatatttgttcaactgcttaatctgtcagactgtcatttggcttagtgtttggtcatattatgaagaaatgttgctgttggtatgtgagacgttggtcatattatgaagaaatgcaaacaatttttttcccctaaggttgcattcaaagtttaacattggggataaaatgttcactgactgctgtacgaatgaaaactcaaaaatgttgatgaggttacaggacattgggatatagttttagcatttgcttgagctcttatagaatctgagtaatatttggttttaaacttgtacacggaatgattatggctggtgtaacagccagcaataatagacaattagatatgctatgctgggatgtgcactgttcttaaactttatgtaaagctctagcttgtttgtgtggatggatggaatggttgaaatttggttttagcttgagaatgtattggaaatatttatcaaatgtatgtctgtgtgatctgtgctatacattttgattttactccttgcatgacatttcttcccttgtactatttttatccagttgatggatgctagtggaacaaccttttatcttctattcaatcctgcaatgaacctttccctgaaggatctcccagtgactatttatgaaaaaggtaagtgaagtttgaaatcgttgaatatttcctaccgtgtaaaccaccaagtttagcactcagcttcttatttaattgctatgttcattaacttaactgtttagagcaataaatggttgttgtttagtgatatgaagattaacttttttgtctctgcaatttttcaagtgcactctaccaataggagtcccactccgttaatctttgtccaaggcaaatataaaactgaggttggttttctcccttttgtttgttttgttacaaatgttatgtacttatgtactaaattacaaccttctttgacagactgtagaggcagagaggatatctttagaccatacgtgtcctgtagtttctgatgttagtgtgccacctcttgttggaaaagggtaagtaaaaaaatctttttcctttttctgagatgacttgaatcacttagagataaatgtggggtatacaaaatcacaaacaaaaaaaataaatgctgtaactttggttttgcacttgcaggcaacatgcaaatattatgcagacttctggatttaagctgatgctgtttgaaattccttctggtttcgcgatgtttgaagtttcacaggaactgattgcacgccctaaggtactaaacttgtcctccaccaccctaatttgatgtaaccttaacttgtcctccaccaccctaatttgatgtaaccttatttctcataatcaatttttttttttgcaggacatatgggcacgatttgcttatcaggatgacattacaaatgtacattttacttttttcaatgctaatgtgtttatttctgttctcgatctcttagtttttaggccatattttgatgtgtttcttgccatcctatttgcaggttattgttaccctgggttctattcagatccataacaaatctgttgctagggatattattgttggtcctggtgacgaactgaaagaatttatcctaagcttttgcactcacaactacttaattgttcaagatgtagagcttaaagatgttatcgagaagaaacttgtgagtttatttctatcgattttgctaaatctttgtcgacaaaattctcctttgaaatcacttgatttttccacctccaactggtgttgagattcgtgctaataatgctccaaaaaattaaaggtagcttacccaccaacatcggggcagtaggattcgattcgatataattacaatgtaacttctatagatatgttgataagttactagttcagcgttcttttagtagtgtcatggtttcgagtttttggctgtccacgtagggtgcctgttaatctgaacctggacgttgcttggtagcgtcaagtagtttgtagatatataattcatctattttagtctgaacagtacgctgcttgttgcatgtttggtggttacaaaaatccgggtgatttgattggaaaaaattgtcgagtgctatatagctagtcccatttctataactagttgatacccttgtgctttgctgcgggatatgggatatgtggatgaatgcatattatatattataaaaatggtagataatgaattgacattgcttcatattgagttctgaaaatacaataaaattgtaaatgatatgtcatgtttgcatgatatttataataattgctagtaggtcataatgtggcatacttacatatgatttaaatactttaaataatgattgctaatgggtgatgatgtggcatacatgtttagctttaggagttagtaagcatcaactttataatcagatacttatgggtggatgtgatgatgttttgggatggagggagtaggattcttttgttttttgtggaataatcattgtttacctaatatatcatattcttataatttttcagaatatctattgttactgtaatccaactgttgtcggtgaattgacatggggactgaactatgtcctacataagttgttacctcaagagcaaagtttaactcatgagccttatcttccactaagcaaggcaatgtctaagcagataaaagaatatggattcaaaatctcgccacgagaggtaattctcttttctacgatagtttcattttgattggtgtgacttgaggtctagcaaatatctaaatatctaaatatttcagtggcggatccacaggtgggtggggcttggtgcgcaagccagctccatccctttcctctaattagcgactaacgactctaattaattagccattagatgtataccagtacggcaaagaaactagctgaagcgctcattgtctaaattacgttgcaagtgtgaaatatgctcaccatacaaattgttcataggtatgtgtgaatataatgtatagctgcaaattaaaacgaagaaattataagcaataggttgtcttttgatctaatgtgttttgggtttcatctaataatatttgtttggtatatgttagtttgtttcaatcacataactatttctatacacgagctcctcaatcacacaactattatatatattaattgatgtctcattatttcagattgacagagagttcctaagagctatgagttttttaaattatttggggtatatgtcagagcgttattcactgctgctagatcatttgtttggacaatatcgtaagaataatatgtccgacattgaatttgctaaatcaattgcatctcatcttcattcctctgaggtcagtgggcaataaactgatagttaactgaagatttaatttggttattggctaatatgatttattttctttgatttaatacagggaattgtaccaagagatgagagatacactagagcagagattatggagttcattgacttcataattgcagctcctgaaaacagaagccggacgctatcgttcctgcggcgcatcgaggcagcttctattgatgattctcctccaccgccttcactgccaggagggatgggtgtttcgttgttgaagcgtcttcgtttggattggataactgtttgttgtctaggatgtgcagttgctctttaccctttctaccgcagagtatgaatgactttgttataaaattcactatgttttgaggacaaatacatattctctgacctgcttgattagtaccaaattaatccttaatcaaagaccattttatgtagattgcattttttttattctggccctagtattaattaatttggtgctccaaagcatgatcaccgtttgcattcaggctatatgaacttctaatctgtttttccttgagacggaagatccataaaaagcaaatttgtctcctagtcaatctccacaaatgacaaacaaacagggcaaacgacgtatataaaggagcagcatacatactgtacacaagggacgaatcatcaattaattaaattaaagaaataataattaatcaattgctaatgacgctaattaattaattaattgcgcgagtttgtgaggtcccgaggacttgccgtattgcaccgttgccctccggtggtaaacaatggtatatttatgtcatttctttctaaatgtgtatatacctataaaatcattaaaaaaaggtgtttttttttgaaaagtaggagagatgaacaccaaacaatttgtggctcgtcaaaatcaatgggagcatgtagtttaatataatgtgccatgtaattgtgtgatacttatatgtatgcctggacccaaatgcctgcacatgttcgttgctgtacatgaccatacgagtagatttagtgccataaatatcgatttgaagtttaaagagttgtatgaaaaaaatcgatttttgcatgtgaagcttaagtggtccgcatgtaagaatgctcggacctcttaagagagctgcatgcgaaaatcgatttttacatacggatcttttaaggatcggccttgaagtttgattggcctcccccttccctctccacccgttcaaaatttcaccccaaccttatcttctcctcatctcctctcagtcctctctctctctcacttattaatatggggcaattataaaatttaccactgctttaaattgttattgcaagactgctactagaaaattgcaaaaatgccactataactgtcattcgagtggcatctttgtaaaattgaaaaaaccggtggcaaatttgcaaatacccctaataatattatcccctctcacacacttgctttctctttctctctctctcactcactcacctagaacggcatggctagagatggcaacggggaattcaccatcgagggtcacatccgcgtccccatccccgtggtgttaaaatttcaccgtccccgtccccgcgaatcaccacggggctacatttcacccacccccgtcaccacgcggtgaattaatccccgtggttacccccgtagagagaatcagagaagggacgacagacggtggacggcggatggttggaggtggccggcgaagcgatgacgactagaggcggcgggcggcacgacgaggctggaggcgatggcgccgcgacgagggctggaggcggccggcggcgcgacgaggactggatgcagtcgacggcacgaggatggctggaggcggcgtgctcgtcgggacctcgcacgtgcgagaggatgcggcggcgtgcgcttctggagtggcggtggcgcgcgcgcatcttgagcggcagcgacggctatgtaggcgtcgtggagctttggaggggagagggagatggttgactagggttggaatctctactattataaaaattgaagatgtttttgtctgtactttggtacgtcatccgtgtttgagtcgatttttttaattttgttgttctctactaaaatttacgttgtctattaaaaagaaaaaacagtccgactcaaagaggtaaaaaaagaaaaaaatgtgtccgactcaaaagcgattaaaaaaaaccttctgtcgtcactcgtcagtaaaaatagaaaaaaaaatctagagtccgacttccgtaaaaagtctcgccacgggtattttttccgactttttttttttgcatgcgaaagagtttttttcgcacgcacttacgctcttggtttttttgtccctttttttaatccgatcgcgcctcccgggcgcttttattttttttcttttgtcaatttttttgtcaccggttttttctcccgtgcgattctgttttttctcatctgtttttttaatccgatcattcgccgcacgcctcccgagttgaacctgggcgccgtgccgccaccatatcgattgtgcgttttctcctccaatttgattgcaaaaatcgattcctcattcctccctcatcattttctccattattttccctttcgattcggttttaatttgtcggatttaatctcctttaacaattgcgattcctccctcatcattttttccattattttcccttccgattcggttttaatttgtcggatttaatctcctttaacaattgctgatgatgacggcaatcttcctcgatcatttttatcccaagttttacactatgattttagaaaaaaaaatgaaaagaggagatcgtggatcaaaaaacctcaaccaattttgggtgatcgaaaaagatttggccggatttccggatttgatggggaaacaaagagttttacactctgattttggaaaaagcgggaagagaagatcgagtggattaaaaaccctcaaccaattttaggtgatcgagaaagattcgaccagatttgatggggagatttgctccggcaaccgtacggccacgggactagcaaccgtactgccacggatctatcttcgggagactggcctaaggctaaaatggaaggaaggctattgaccctaaacccaggaaaaattttcattaactttttcaattataatgtatatagcgatcccaatatttcaatttattactcagctcttaatatatcagtaaaaaaacgtctttacccgttacaacgcacggacattttttctagtatatatatatatatatatacatgtggttattgggcttcaatttgttgcgccaaaatgactataaagtctaaaacatgtccctagctactgtgaaatcgggtcactgcggtggacggggacagggagtggtgcaccgtccccacctccgccatccccgatggtgatgggttttagacctttagattccccatggatggtagatatcagccatgccatcccttaatgtgtgaattcaccgcggggaatcagtgatcgggtccccattgccatctctaggcatggcgcggcgggcggcagcggcggcgtggtgggcgacagcgggcgggagcggtagtgggctcgatggcagaggggagctcgacctagagcgatgggcgacgtgcgtggatcggccgcccccacctccctccgtcgtcgccggcgccagatcccccgcgagaaggccggcgg

SEQ ID NO: 6464 - DNA, 9850 bp, Oryza sativa
ccaccgtccgcatgtccgccgccgcccgtctctccgccgccgctcgcctcgcccgcctcgtccgcctctctaccgccgctcgcctcgcctaccttttccgcctatccaccgcctcccgcctctccgccaccgctcacctcgtccgcctcgtccgcctgtccgccgccagccgcctgcctctccgcctcgttcgccaccgcccgcctgttcgcaccgtccgcccaccgtcgcccgcaccgtcgcccgcaccgccgtgcgcgcccaccgccgtcgcccgcaccgccgtgcgcgccgtccgccgctgtcatgccgactgccgagagagagagagtggaatagagagagagaagagagagaggaagatgggaagaagtgtatgacatgtgggtcgcacaatttttttaagatagaatgctgactagactgccacgcgtatgtcacgtagaccaaaacagctctgggttgggtcgaggggtgtaatttgtccggtattgaaagttgagggtgagcgatgtctggttttgtggtttaggggggtaatttggacgaccgtgatagttcgcggggagggggggtggagggagtaattcgtaccttttccttccctctatggtttgccatcttttaatttgaacgagctgcatgctccaatttcaacccttagaggtttttttttctcataatgcaggtcgcagatggctactagaaattctaatcagtttgaagtcttctatgttattactggctaagtataggagtagtatttactactgttgaatttcatagcaatctgcaagtgttgcagagaggtatatgtcctccagacaagtttactccgtctaattagttattgcaaattaagatgtgcaggaaatcacacattcacacttgatagattggtagctatttctattatgcaaagccgcataaacatcagtagagatagattgagctttgatggtcaaattgcacattctttaaaacaaatgttttctaatccacgagtgcttttctaagacttatcacacaactctctcgctaagtcactctaagtcattatcttagagtggcttcaagcttgattgtagaagctttgttagctccctccttgccgtttcttcatccatctcggggtgcctcttttgaaaacgttctaaatacgtctccactgaatttttgacatcgcgttctcgcttttgagattctgaaataaaggaagaagataagaaagaaaccagataaaactcgaagtgaccatgaaagcaacctaccggtcagcttttcctttctgttcttattgtcctccgaaccttcgccttccatcttctcttcctttttcaccgagactatttatttcctataaacgctatcgacgagaacgagctaggaatgttcttaatattttctctcttataactcttattactagtattacttatcaactcgattactgccatgtggcatccaaaaccaaccacaaccagaaaatatccatgaagtttcttctagcaagaggttaaatatttgctttgaatttttttcttcatcttattttaagatataggaaatatcttctatgaagaatatcttctcatagtacaagggcccattcgttccagcgttttgattttgattttcagcggcacacaaaacaagacaagctattagcgcataattaataaaaaaataattattttaaacttgaaaaatggagttatctgattttttttaaggcacgactacaaaataggtttttgcatacgggcgacaagcattttcgcatgcggttgggccagccgcatggacaaaaagatctgcgaaaatcacggtctttgcatgcggccagcgcaaccgcatgcgaaagagaaaaaatagcgaaaaaaattccaaaaagaaaaaaagaaaaaaaaaactagcgccgtcgcagcccaagctcgtctaaagtagtgagagaactaatctttctcatcaccacaatgagccacatcacttaaaatattacagccgttggatcaaactaacatacaaaactagccttctgatctttgagcagcggttcaaatatggttaagaaaattcatgattcttcaggaggcctcgaactgaacactccggaaaatccaatagccgaacaagcaagcgagaagagctgagagagatcatgatcatcaattgttatttaaccttttatgtggacttctatttacttcagtaaattgttctgcctgctgatatgctttgtgtgagcctcttgtcactcagtaaaagaaagaaaccagataaaactcgaagatgatccaagaaaacggtaaaacgctatgcttatgatcgttttcttggatcaatataaacattgcaatggagacgattattttggcatccttattgtaagaaagaaagttccttattgcaatggagactgcacatatgttccttgaaatatgtttcagacttctgttgcttaacagcttgcgatatgttcttttactatggtgtaaacttctattcattagatttaaagaggtagataatgattgcactgagctctgactctggataagcagtatgttaaagcataatcaccttgaatatagcactgtataatgctgaaaagcaatagatacattttgactaccattctttagttctccagaatagttttttatcttgtggaacactgacaaacaacatgttgaatttgctgtcagtattgatcctaacaattcataatcaagcagtattttgagataattcccaccatgtatagtagctgttatatgggctttcctttccctcttttacacatgtgacagcccacatatacacacttttgaaacaggtattaagagtcgtgcaacgcacgacttatgtggctagtcatgatgaaactagtaaataatatgaattgacgatgaacaaatttctcagatgttacagataagatctctgctattccccaatgtgcatctctaaaaataacaccttttactgagtaacaagaggctcacacaaagcattcagcaggcagaacaatttactgaagtgaaactgatctactaggttccatggccaaatctacaagttcaacatctgtgaagtcaactagaatctgaaggtgaaaccgtaaagtcactagaatctgtaactgaaacatatctactttctccgtttcacaatgtaaaaagtcattctagcattttccacattcatattgatgttaatgaacctagatatatatatatataacatcaatatgaatgtgggaaatgctacagtgacttacattgtaaaacggagggagtactaagtttcatggccaacaaacaaatctacaaagttcagaataaattgacaaaccagtaaatacaaatactgcaagagcaagttcagggtttagcatcatgcagaaactgtaagttgtgacaattccctggagtactaagttgagcatcatgcagtgtgcggagagttcagcgtcaacatgcactaagttcagaaaccagtaagattcagaaactgaaagtacatgttcatctccggcgacttgtgcctccagaccggcctgaatgcctgatcatcttgttcatcacctccagccacctcttctcctccatctcccttctcctcgtcttcgttacctctacctaggaaaaaaaaaagacttgagtatgaaacgagatgcagggcaatcggttatattaatacctccccccgattgaagctcccacagcgatttggagtcgcgtgttcgatcgccgcgctatccacgtcgcccctgaatgcccaagtagccagtagaggtggccaaatgggccgggccaaacgggcggcccgcggcacggccgttcctgtagcaggcacggcccggcacggcctgctacagtaacgggccgtgccggcacggcccgtgtagccgtgccgtgcttgggccgctggccgagcccgcgggccggcacggcacggcacggctcctgtagcaggccggcacggcacggcccgcgcacggcacggcccggcacggcccgtcaggccgaaagcgccggcggcgcgtgacagggcgggcggcggtccaacgggaaggcgacacgtggcagtggcactaacggctatttgaccgttcaaatttgaaaataaccgttgggaggctaaaaaattcataaaaaattcgaaaaaattccaaaaaatctcaaatttcgccctataaatagggcatgaaccccagccatttctcctcatcccacactcctcatcttgtgctctcaagtgttttaagtgctctctttgttctcaagtgtgcattttttttgattttgacaaaatttgctcaaattttgtcaaaaatcaaaattagtttcgtagttcaacagtttgatcgcagaggtttgaacagctcgcggttggaaagatgtaagtaatattcaaatttgtgtattatttgtattgtgtttgtgaattcaataaatattcgaaaatttgtttatgtcggtttaaattttcagaatggatccgaactttccataccagtcgccgtcgttcaccttgggtgatttcgaccccaactacatgtcggggtttgacggtacctccggatcggctccaactccaccatctgtggaggaggtaccggttcatacggctgtcgttgaggaggtaccggttcaggcggagacagcttcggaaggattttccggaaccgcgagcggaagtgtttcgacacacaccggctcgaagagatcgagaacctccggtgtgtggcaaagcttcgacgagataaaggaaacatgccccgacggaagggaggtatcgaaagcccgttgtagaatatgtaggcaaattttatctgctcgttcttctggtggtacaggtcacctcaagcgccatgcaacctttattttgtgtgtatgctcaatcttttctactccatcagcgttgtgcatgtcatataattaatttgattgttaagactggcatgaagagggtaggtgaccacatcaatgctgttcgtcaagcaatcgcgtggttaactgcttctaacccgcggattgctgcatggaagaggttttgcaatgcggccggtgtggaagctcgtaagtttgccaccgatgcagagcatcggtggaatgcaacgtatttaatgttaaaagttgttttaccttatagtagtttactttctgattttgttcagtcacgtggtggcccaagaaacagtgacgggtcttcagtactgaacgagcatgtttgggcaattgtccaaaaattttaccaatttctagaaactttttatgattgtactctaactttgtcacatgtttattatccaactgctaatataattttgcacaaccttcttgaaattgctactttatttaaagaatacgaaaatgatgacgttctaactgaacctgtctttcacatgaaacaaaaatatttgaaatattggaaaaatatacctatgttgtatgctcttgcttttgttttagatcctaggtgtaaattaaggggattgtctgctattttatcacttgttggagatactataggtgtagattatagttctttttatactgaggttagacgtaaattatatgaggtttttggaagatatgaagtaaagtttcaggaagttcgccagcggagaccccctcctatccccactacaggtaagaagaagatacagtggggtaggatttggggtggatcgtcttcaagttcaatccaaggtggtggcagttcgtcggctacaagtggagacgcctcttcgcatgttgtggccgaagagttgtccggttatttggacagcgacgccatccaccacgaagcacaagatttcaacgtcctcgggtggtggaatgaccacaagataacatatcctgtgctttcaaaactagcacgggatgtgttgacggtgtccgtgtcgacggtgtcctccgaatcggccttcagtctatgcggccgaatcatcgaagaccggaggacgactctgcgcagcgaccacgtcgaaatgctactaagcgttaaagactgggagcttgctcgacaacatgcccaatacactgcggacaaccaagaattggccgcccacttcgagcaactctacctggatccagaccaaccccagtagaattttgttagaagtaagttctgacctttgagctgtactcttttctttgtcatggttttctcattttcccctatgagtttttacatgacaaagtttttaacgaggcagcatgtatcattgtatcctgtaatgatataaacattaataaaggtcattactatttttaacaaattcttttgcaatattttcgcaagtgtggatttacctttaaattatttcaaaataatgaatcacaatctatatttttaaatttttcaacacaacaaaaaaataccattttttctttttttttaacattagcaaatcattacttttttaaaaaacttttatttccattttttaaataccattttttcattttttaacattagtaaatcattacttttttttaaacattttatttccatttttaattttttttccttatacatttcctttccttttttttaaaaaaaaaaacactgtgcttcacgggccgccgtgccccgaacggcccgtgggccgcgggcgttccgtgccggcacgggcacggcccggccatccacgggccgtgcttgggccggcggctcggcacgtgggccggcacggcacggcccgtttcatcagccgtgcctaacgggccgtgccgaaacgggccgtgccggaaccgtgcccgtgccgggccgggccgtgccgcccgtttggccacctctggtagccagatttcgcgagcgagcgccgggctgtgggatctggtcatttttcaaaaaaaacctctattttacccataatttgttatagatccctagacgtacattcctcagccatgtattcttacgctccggccctcttaaatatgaaatatcttatgctaagaagagaaaattcagaaaacaggagtgcgctctgaaaagcgtaaagtgaggggtctttttgcgaaaccgaacatccctccaggctccacctcccccaaaacctagctgccactcgactgctgttcccctcttgctctctcccttgccctcacggcggcggcggccggccatcgctcgcttttctccgccgtcgacgaccagtccccttcctcctccatcgcccctctcctgcggatcggaaatgatttctcctcgtcccgatttgacctctggttcaaccgatatgaagcaagcggcggccgcgcccgcgaagagcaccggttcgtgcgaggatgctggccaagagaggtgatgattttctttttctctttttggtgcgtgtgtgttggtgggatgggcttgggactgagctattaggtcttgatgctttgttgcagatcaaggaggagatagctggcggtcactgcggcggagtgaatctgcctggaacttgttcgttcttgatgtcattctcaagagcactgcatctaggcagtggattttgcttggatccgcttgtgctttgactccggtctgatggtatttggttaaaaaatgtcaggtctactttcttccctttcccttacctcaaatgattctcttatggtttgtggctggaatggagcaatcgatttggtaaaaaatgtcactcagtgcaagctacaagacttggccttgtgctgctggagcagaggttggctgcctaccactgctgtgttgtgtgctgcgacatttaatcaccaaacaagtactaataatctactgatttatcttatgttaaatgacaggaactcctattatctatcctactgttttttgggttgcacaattggaactgtcaaagatgggaggatgtgttggttgatgttctaatgctatctgatcattttcttctccaatgagaaaaaaaaatgaagctggcattgcaactcctgcaatataaatctgggcaaccgttcagccttcatatatcataatgtgttcccagatttcgaatgatatgttacacatgaactgattaggatggctaggagaaatttggttctttctccagatgacgcagtaacgatgtaatgacctgataagcatgtacttatacaacagccaagtagaaaattgcatttcattgttcataacaactgatttggtaaacattttgtggacctaacttatgtctcatttttgccttgctgcatctaacctgctccatagaatcatttcgccgatgtcctgacttgtgcgctctgcttactttgatgtctcaggaacattatgctgacaaagtgacaattagtctggactgtagtcttggcctgaaacatatttccctgcaggcttagaatgcatattacaacccataacgtatatttgcaactgttgatactttgatttggtttacttttagaacataacctggaatttttttctgttcccaaattttggtaagttaacatgtttttggagtattttcttattttgaaattttggtccaactagctcctaccatttctaactttcatctcttattaattaacattatgattacgttggaaaaacatacctgtttaacaggtagttgccaggtcaacaatgatgcctttgttttaaagattctagattagaactgaagctacatcaagttacaaactaggcctcttgcagtatatggtcaagaataagatccactttcatgacatcaaattcgtatttcaacaattcaatgagggaagtatttcatcgatgcgaccaatcagacttatttctatgcttttgacttcaaattcaacctgctactcaagattcattggattgacatgagcatcaaaattagtgtaattagcaaagcattgctgagaatcaattcattttatatattttgcaccaaaatttgtatcctgttattgcttactattataatgaagcagttgtcctaagtgacattgagaatcagtgttatttgtaataacaactagatcatgttcatggtgcttgctgttacaataatgtgatgatcaatttttattaactacaggtttgattttaagccgccgacattgtgtctatgcacaacttgctgttacagtgatgtgataagtaatttcattcactactggagaattttgtaatatttttttatacatttttgttttgatacacgattcgtctaaatgaattgatacatttgggttttaatatcgatagggcgcatcttgtgcgccaaaatgtctagtaaaccaaattccaaatgaagaatacctcatgtacaagggcccattcgttccagcgttttgcttttgattttcaacggcacacaaaacaagacaagttattagcgcataattaataaaaaataattattttaaacttgaaaaatggagttatctgatttgttttaagacacgactacaaaataggtttttgcatacgggcgacaagcacaaaaaggtctgcgaaaatcgccgtctttgcatgcggccatcacaaccgcatgcaaaagagaaaaaatcacgaaaaaaaattccaaaaagaaaaaaagaaaaaaaaactagcgctgctgccgccgccactactcctgtcatcgacatcgccgtcgccagctgctggtacaaccgcaccacccagatccaccgctgccacggctgccgcggcagatccaccgcccaccgttgtcgtcgccctttagtcgccgcctccgtcggtggatccgggtgggggagggccgccgccgtcgcccacgtccacccccaccttggccctcgcccaccgccgccgctggagtccgcgttgccggaggtcgtcattgtcgccaaggtcgttgttgtcagcggggctgcag

SEQ ID NO: 6465 - DNA, 12591 bp, Oryza sativa
tggaaaacaccactgaagctaaactcaaaggaacggattaatgttgatccatgccttagcctttttatttgtgtaattatggtcaaaccatcttttaatagtttttaatatacctttttcacttctctgcagcccaagtgaagcaggacattcaaagtggaatatgctagagcatattgttttgctaaataagtctaaagcatgtggttgctatatatttctatttttcctgttcctaactttttttcaacctttgtaagttataatatttgtagaaatataagtaagttccttaattatggattttgcaaattgatgtttcacatgggtcccatttatatgaattggcgttcaagttcaggaagcattcagttcaaactgaagaattcaaagcatttgatcaatttaaagtgatcttgatgaacttttgtttggagtcataagaaataatcactgatttataattttatattctcattagttccgaaactcattagtctcattcaaatttcactcggttgtaaggtcgtactccctccatccatatttcattttctgattttttttttcaactaggatgggcatatttgcattcttcatacatctaagacttaaatgtcctagaacctgggcaaccatattattacttattggttgcatgtatccatacaatttttttttgtctctacacagaatgaattgatttgtccttggtttcgctgaaaaaagtaatatgccttggagggtatttgttttttttttaatttcatcgccgcattagaattccatgtgcacttgtgttttggttgtaatgagtgaatttctttttaatcttcattttgtatggaaataaaatgaggtttaatttcttctttgttttagtgatttatttattgttagttgtattattagttgaatgcaataatatgttgtatttttctttttcatttcgagctagaatggaaataaaatgaagctggataactttaattcaccactaaatgaaaatgaatatcctgtatacgtatggagaccataaaatgtaaggttgatgttagatgtgacatggaaaacgtgcattgcacgtgcatgattactagtggtaagaaaaggtggcacaagttgcaatttactcttaacaataataccgcacttagaagttcgatcagcgaaaaaacaactgcagtaccaatagtgctagaagacaacttcagtaacaatagtgcaagcacttaggagagatcgatcacctagacgataactagtactataataatggtgttgctaaactattacagacagaaaggtacttaggagatcgatcacataaaagacaactacaataatagtggtgcaagtatttaggagatcgatcacctagaagacaactataataattgtgctgctaagctattacagacttatcagaagccaaacatacgagtgaagcttgagcatccacaaaaatcaacatgcagttccaatctgctgctccaacttttacttgtagaaacttatggatctgaatctctagctgcattagagtcctccaaatcagtcctcactggcttcagtgtcttgaggctcttttttctcttgaacctagcaaagaatgtatacactgatatataagaaaaagtgtgctcatggatcacgaatttcaaagtaatataaaaaaaatacaagttgctataggagtgagaaatatacctgaacatagccttctcgtactttgttaatcatatccggaagcaaattggttgcaaaataatcaaaccccaaactatgaatagcttcaaaagaggccttcttgtcaaaacttatcatttcttcgattctgcgtttccatacatcggacaaatcgtcctgccaaaggttcttcaacatagttttgtcctcgcgagacaaacgtgagtagttggtctcagacaaattcaactttatcatgtctgaggatgacaatccaacccaacaaatagatggcacggaaatattgaaattgtcatatgctgaattgcaagaccctctagcatacgtagcaagaatacttataccttcaggatctggatcacaaagtccaaagacaggtagtccagtgcgttgtttcaagaatctgaggaaatcccttgtttggagggttggcatgccacatcctgtcagaattatacagttgttattggtgtgatagtccatctctagtagataattcaacattgtatgcttttccacaacaagaatatactctatgttgcgtgaacctatttcaacacaaacatctttgatctggtcaagcctgtgtggtatctgcactccaatagaacaactaatcgatttgccatttgtcaattccaggaaaatgtttccaactacaattcctttttcagctgctattatacccaaagagccccttctgatatttgtcaaagcgcagatgtcattgatcgcttgatctgatttactttgatccccaaacagatccttgtttgtgtataagacagttctcttcgagatgttcaatccagccccaagtgtccgttctattagatcaatggtatagccagtcctagatgcaacttcccgctgattcgcattgcaaaaggaacggcttatggtcttgcctgcttttgctagagaaaccttgacttcctcattaaactccatgttatctgtatattttggaatattgaatttatatccatgtcccctttcaattgtattgatgttcccctctaacaacctattcagagtcttcctggcttcaactcgactcttgtcttttgcaataaagtacctatcatgaaaatcttggaccttctcctctggcagttcccatataggaaccgggagttgttcacctttgaaaatcacgtaagggttgtacttttgaatctccggaacaaagtgtccttgaacttgaggatcattaccactgccagaaaaataaccataggaatatactccagcaggtggatcctgtccatcttgagcactctcagtagtatgagtttcggggccgggacctctgatatactcgcggctggtacgccatctgcttgaagaaacctgacgatcataagcatagtgttttcttggatgatacgaatcgtcatccgttgaatcatccattggtgacctcaaatctgcatcgtaagcaaacaatagatattagatagggaaaaaaagataggcaagatttaaaaaatactccaatttcatatggagcaatagggagatgtgtacgtttggatctttctcccaccttgcttagccaggtaaggataagttaactttgatcattttctaagcacccgtataagcacttggcacttatcgggatgacatgttgccattttggctttctataaaagccgggctggtgagcctttgatctaaaaacttatcacttatcatgggcctacatgaaaattacttcgttactgattttgattgctaccctgagctatgcctgagaaaaagtgctgcctgagagtttcgtgatattttgatgtttgttgcctgatgaggcatatctgagttggttctgtttggttgaagacctgaaactaaatgtgcctgaggaagattaatagtcacaaaacaatgtgtagggtaaaaaatgtgtttaattctctcattagtccaagacagtcgatagctcgctcattcggttgaagtatccccaaaattccaaacacaaatatcttctgccagttgcttcatgcaacagcatgtggccggccagattggaagggctttcggcttctttgcgcaatgtggcagcgacggcaagatctggcagaacagcggcgcaatgttggcgggatctgacaaggcagcagcccagcggatcacaaggcactgcgctggagatgaagcaaggctaggatttggtttgccaaggatccaaacgtgcccgattcaaaatcacccaaatggaccacagggcacgcgcacatcaaaaccgtagagaagagagcaagagccaagagggagagaggaaaccgcaggatgaacaaaggaagggaggagattcacctttgctgcgcggtcgggaagaggccgcagcgtcaacaaagtcgccgtcgcttttcgccggaggaacggatctgagcgagaggcaagaaattcccctcctctctctctctctctctctctacagtacttgtttcattaactgattttactttctttttttttcttttactgtttcagtaaagtagctttcatcgtccgagactccgagttcaaatggcattcccttcgtcgcataataatcatttttagccttcttcctttttcctaaaataagctggctttaagttttttttttaataatgaaatataacatccggtctgtgcttaaaagagctacaaccaattattacaaactaccactctagaaactaagaaactagtgtaattcaaataaattgaaaacaacaaactaataaaaggaataacccttatatgaaaaggagtacatatttattgaagtttgagaatctccattcataattggcaaaaagttgcataaccgtcgtctcgagcttacaacatgtaacttttagaagttcttcatcttcatcatacctttgtaattgtacccaacaccggagccaatatgttgccttgaaaattacctgcatatatgaaatagataatgatttgtcaaaaatcatatcattcctactcaaccacagagcccaacatattgcagaagctccaaccaacagaagtttactctttttcctgtccacccctaaaagccacctataaaaaatatgagatatgctaataggaaggtataaaccaaaagagaattgaactgctatccatataaactttgcacaaagataataatagactcatttttcatacataaacaacaccttaaactaccattccaattacgtctagccaaattatttttagttaataccatccctttaagcaagtaccacatgaagatcttaatcttaagcggcatcttaagcttccaaattatcttatttctctcgatacagccattattaatcaaagctaaatacattgacccaaccgagaaccatccattctgattataattccatataaaacaatcagaagattgattcaactggatatgaataatagaagcacacaaattatgccaagatacaagattctgactaactaatgccctcctaagagaaacattaagcggaacggaaccaataactctagcaattgaagagttcttccttctgacaatagtatataaggaaggatacttatctttaaaagctaagttccctaacctatctttccaaaatcttgttttttccccattattcacaatccaataacccatatttaagaaagtactcttgactttcatgagatctgacaaaaatgagaatcaccttgtttcctatcaacttgggttatagactgattataaagatattttctcttcaataagtcctgccaaaccgcttgctcatttattaactttgtcgatgtttaatagtcacgactaggatattttgatggtatggggatcgttggtactagggtatatgcgagattgaggtaaaagagatggagacagggatttttatataggttcgggtcccttatctgacaggtaatagccctacaacaattgggataacctatcctaccgtcgtcgacttggcggcataaacaccaactcgcagtcgatgagggggtagtcttcctcctcgaatatgatctcgtcgacatcagagatggtgctagatccctcttgccggcctctgtaggtactggattgggtttatctaggctaatctgcgatgtcgatatctggcagggtgtgttggcttgcatcttgtggcttctatgttgtgtcttgtggtttgtcccctctcctcctggggggcttgtatttatacccataggtgcccctttgtccaagtaaaactagggagaccaatatggacacaatccgagtagtccttatcgtttccatgtagaactatatttgtccttccttatccagaactccctctatgtatgaggtttgtttccatataataagacatggtatgtggtgggccctgccgagtttagtcgattactattgggtatgtggtatctataaccctgacagtagcccccaacttcaatacaaatgaacgagttgatgttctcaatcgaagactttggaataactattgtcgtgctcgcttgaccgttctcggtgtgatcagaaataacgctagattcctcttatcagtctttgtaggcactatattgggtttgtctaggttaatctccgatgtcaaccgagaaggtacggagcatgcgactaagtctcctgtcttgccgtaatcgagaatttggattgaagtcaagaaattccatctcgacgggtacaccatcgcttcattccatattacttgtcaagctccatcaaccgttctcgagtaatcgagaaggtgcaaagtttgcgacaaagccttgaaaatctgacttgactgttttgatgtctgactttcctgaaatcaattctcagaacagaatattaaatagaaatagcccctgagcgaacgctcaaagggcaatatgtatggaaaaattgaaaataaattgaatatatgtgcggcaataaaaaaatacgctcgctagagtttccctcagcaaacggagtttggtacccttcctagcccccaactgttttttatggaaaaactattttccacaaagacagcttgaatcttataacaaaccaagctaaagttgacaaatcctagcctccggccgtgaagttggaaaagtcaatttccgattacacggcttggttaatacgcatccattgagcattcttacatgaccaggttttacatggttgttcggctcttataatccaacaagaccttatctgctctgggcgtccccagccgaaattcccttaggtttctcggaggtttgttagaacatcgtaaagggacagtaggactgacttcaagacgaaggtgatataagaaaggaggatcaccagacaaatattgcacatataaacacttacagaagttgacgtatatgaagtgatgagatgacttccacaccgggtaaagacctggtgtatagttgctggtcgaagaccagtcgtagtcgtaccttgaccattagaagtcgtggtgcgaggaccgctatgttgctggtcgaagaccagtcgtagtcatacctcgaccattataagtcgtggtacgaggagcgctactttgctggtggaaaaccagccgtagtcataccccgaccattagaagtcgtgatacgaggatcactacattgttaatcgaagactagtcgtagtcgtacctcaaccacttgaagggaatccagagtaatggattgacgacgttctcgtgacctgcaagaactgtctcctaatgacaacaaagacaaggaataattatcgtagttggaggtttggctcctcgacctactaactcgttctcaggccctctagaagtctgggatctcgagtttcgtcgtcgtcatgtgatgtcgttaaccttgtccattgtcgtcctgatgtcgttagtcttggacgtcgtcctggtgacaacggcgatctagtcggtcttggttgtcactatcacgacaatgttgattgtcgtgttagatgtcgagagattgcagtaaccgactggtcaagtactagtagtaggcgtatctcgatcacgcgaagatgaatttttagatgatgagagatcactacgatctactggtcaaggaccaggtgtaggcgtatctcgatcagctggagatgaatttttaggtggtgagagatcgctacgatctactggtcgaggaccagatataggcgtatctcgatcacctggagatgaatttttaggtggtgagagatcgctacgatctactggtcgaggaccaggtgtaggcgtatctcgatcacctgaagatgaatttttaggtggtgagagatcgctacgatctactggttgaggaccaggtgtaggcgtatatcacctggaggggcgctagagtttctgattacatgtgtatctcatgtggccagcatgactcacatacccaacttgtagcatatccggatgtctgttcgcaaccatgtcgggtgatcaagccgacaacgttcatgaggaattatccattaacaaccctttctcaaataatccagccgtagctggcgctatatatgagataagtcgtcggtcttcattggtaggttgggtgcgacaactcaacatttgttgagaacgttttcgataatggggtgtactcgaccacatcctactcgagtgctcactgctcaattgttcctgaagaatattttatagaagacaagatatatagcagagaatatcgagtatgtactcaaaaaactacatgaatcttctagtattatcaggatataatgagaagattaaatattgggtattatgtaaaccatgaacaagcatgatttatacagaagaagaaagagcgagccccgtagtcggtctaacactggaaacactcacactgtagatattgtataaaaatatgctctaggtaaacataataaatcatacatctgacaatattgtattgatttgaagaataggtacgataaatcacatatagagtattgcgtacctatgtggatacatgccggatgtatctatgaaattagtagattaaattaaaaaaccaatctaccaattaccttgttacatactcgtttgacatcatataatctgacatctttcgatacgtcgagtatcttgaggcttggatgatcttgatagatcaaattgttaacgacgatggttccgatcttatcagggaatgtactctggtcgggtcaaatttcccaggtccaaagtagttgaagtatccctcgtcgaaaagtccgctgctttgatgaagcttgagatggcgaggatcccggtccgccagataacgcacttcggttaggttggatccccccatagccgaagtcgtcgagtagcttgttgttggagaatccatctcttaaacccatctcgtcgaaaccttgaagcaccaagttcccctacctggcgcgccactgtcaacgtttgatagtcatgattagggtattttgatggtatgggaatcgtcggtaccagggtatatgcgagattgaggtaaaagagatggagacagggatttttatacagattcgggccccttagctgacaggtaatagccctacatcctgtttatatgggattgatatagaaaaccacatagtacaacaattgggataacatatctaaccgtcgtcgacttggcggcatgaacaccaactcgtagttgatgacagggtagtcttcctcctcgaatatgatctcatcgacataagagatggcgctagatccctcttgccagcctccgtaggtactggattggccgattgggtttgtctagactaatctttaatgtcgatatctggtggggtgtgttggcttgcatcttgtggcttctatattgtgtcttgtggcttctatgttgtgccttgtggcttgttccctctcctcctagggggcttgtatttatacctataggtaccccctatccatgtaaaactagggagaccaatacggatacaatccgagtagtccttatcgtttccatgtataactatattttgtcctttcttatccggaactccctctatttacgatgtttgtttccatataagacatgatatgtggtgggccctgccgagcttagtcgattactattgggtatgtgttatccataaccctgacaaacttaaataaccatttactcaaaagacatttgttttgtatttccagtagcaaaaagttatgaaaatatgagatatacataaaattatgttggaactcaataagtgaaggtattatagtctttattgcttttacgttcccatatatggagcgaatgaaaagcaaacttatttttttactatcttattagtttgattggtgctggaacaaacgattagtccatgacaaattagcccatgttctaaagagctaattgagcttagctatttctcgttttctgttagcacgcaaattgttaaacaataggtttatgcggaaactttctatacacgaaggtgcttaaaaagccaaacaaatcccattttccaagattttaataattaatagttacctaaacatatgctaatcatatttctcattttgcgtgctacaaaaacccatgggccgaaaagaacactcccttaaaacaaatgaattgtcatttatctcagaattttttcacaaatttaccttttatataaaaatattgcgtttgaaaattttatataggcagaatattaactgcatgacacctgtcatgtttcaaaagtaatgtttctctataatttttcttcattgccattgcttagataacttttttcaaactttttgttagctttcaaaaatatatagtatttaatacatataaacaatcatttatgatctcttcattatgaagttagatttagtttgtttaaatacaaaatgtgtgtaacatattaagtataaataaaaagtaaggtgttttgtcttgtttaattgaatgtttagtaactttttttttaacaaatcctaaaaaatattacgagtaaaatacattgccggtccttaaacttgagagcgagtgtcacttaagtacgtgtcgatggaaaaacacgcgcggcctgagagatctgcttaactccagtgcaggtccaaggcttgcctcaagtgctaagggcgtgccagctgatttgatcttgccatcagcaaggaaacagaaaggggagaggttagtcagccgatagtcgatcggccgatagcatatcgttggtagtccctaaccgattgggccggctgtggactggatataataagtgataatagcaataatgccctaagaacaccctatcggccaaagcactgcctataagaataaaaacgtgtaaaacaggacaatgcaagcaagatatcggccgataacggaagaacagagcaaagaagatgataacgtgccggctagtactccgacacacacctatatagataagccgataacggaagaacagagcaaagaagatgataacgtgccggctagtactccggttccgacatgaggttatagcgaggcccacctgtataggtggcagatacacttgtaacaattaaagaaacaggcatatcatgtaagatcggctgaaaccccgatactatttctaattatgactagttccaggttagtttttagggttctaaacattactagggatgatgcatctcaaagtgtgtaaagaaacttagagtctaaacaatcaaagagctaggcacttttcaaatagcaataatagactctcattcgccttgactaatctaatctggcaaggcaatttggctgataccggtgggatctctaaagcgagaagcaaccaatagagccaaattaagttgccgaggctagattagccactctcccaaaaatttttacacaaacaccacaagagagagaattttttttcctaattagtatgccatgtctgcaagagagacttaaaatgaccattttgcccttggtttcatataatatgagagaaaaaactaactaaagccttttacagttccaatatcttagtgagaaaagctgcaactaaagctgattttttttcatcagatcgccattgtcaattatcgaaaatacttgtaaaatgttgtaagaaatatacatcgtcacttgggctcgatggcatcgttggctccgccactgactggatcgatggatgcatgataagctagtgctaagctgtggggcacattgaattcagttcaggatcagccatgaatatgggcatatggcgcgtgggtttcattcacaaaccgctgcttctgcttgcctgcttgctcggccacttgatgaaacagctgctggaaaccaaaaactgttgcgtaggaaaaaaaaaaagcctggaacgagaagagtagtattactttgacccaggggcaaaaaggccatctcaagttactcttgctgacatggcacactaattagggaaaaatatctctattgtggtgtttgtgtaaaaaattttgggagagtggcatatagatagtggcaccatcattcgcttagcattttaatttaacatcgtataattatggcttattatgttctgaactaggcatttcctgtgtttagtctttgataattccctctaggaaaaagtatgaattaccctctcccccgaactatcgcagttgtccgaattaccctcctgaatcacaaaactggatattcttcacccccaactatacaaaccggacgaattaccccccctcgacccaatccgcggtggttttggtctacgtggcatcctaatcagcgttttttaataaaaaaattatgggacccgcatgtcattctcttccactttcccctctctctcactcttcctctcttctctctctcactctatctcactcttcatctgtctctcacggattgacggcggcgagagacacggaggggcgggcgacggacggcggatggtgacgaagggggcggacggcggctgcg

SEQ ID NO: 6466 - DNA, 17708 bp, Oryza sativa
  unsure (1)..(17708): unsure at all n locations
aaaagaaaacagtgggtctctgtgtgtggggccctcggtcaatgttgactgttcaactcgtatgttgaatggtagctgcatggaccgggcatctttgctgctgcttgttgttgctgtaatatcacattttaccaccttcgttttacagtaatcatgtcatattggcgtatatggctgttagttttgacttttgaccaggccttggtgggcccgggatgagagccatcgccgagatgcagaacggaggaccatacacagtgaccctgcagcatcatcggcagtacagtacgtgctgccgggcagagagagcgtacggaaaattcgaccgcataattgcaataaatgtactccctccgtccccgtaatataaggggtcccctaatataagggtactgtttgactactcgtattatttaaaaaatttgtacaaatataaaaaataaaaagttgtgcttaaagtgctttggataataaagtaagtcacaaataaaataaataataattccaaatttttttaataagacgaatggtcaaacagtgtaagtagaaagttaaaatttgttatattatgggacggatggagtaacacagcgcttccgtaactcgcaatttgcaaacgattttttttacatacaccaccatctttttgctatggatgcagaacgtctgcaatgctgatgcaatagcagaagctgacaactaatgcatcagcagcactacacagataatcccattgtttcgctatgtatgtttataaaccaattttgaaaatttaaaattcaaatttgaagtttattttatggttttatcattgtagtttatttggcagtatttactttttaaattgctaaaaatacgtatataaacttttcatctataaattattatttggttgctaataagtaatacaaatatgcataaatataagccaaatgatgactccgataatttaatcaacatatatgtcctgttgtattggagcaaaaatgattatcatattattcatgtcgttttcttatgtcgtttttattagatagtaatactttgaaatttataggtttaaatcaacagtaggtcaatactgcaaatatatttaccgtataacaattgtaacattcaatactaaaaatgctttcagactctgattttataactactaaaagcatattttgaaagaaaatcaacagtcaagttttaattgtgaatactcttaaaattaaaatactccgaagtatccaaaggtattttgggataatatctttgaagtttttcacgaagataaaaaactagattatcctttattattggcagtatccagataaataattaccttagttgatataagaggtgacggtgttacacctacaaatacaatgtttaaaagactaagggggtgtttagatccaggtgtataaagttttggtgtctcatatcgcgtattatatagggtatcgcatggggtgttcgggcactactaaaaaaactaatttcagaatctgtcagtaaaccgcaagacgaatttattaagtctaattaatccatcattagcaaatgtttattgtagcatcacattatcaaatcatgcagcaattaggattaaaagatttgtctcgtaaattagtcgcaatatgagcaattagttattttttagcctatatttaatacttcatgtatgtgttcaaacatttgatgtgacatgatgtaaagttttgggatgggatctaaaacaatgcctacaataatcttcgctttatcacatctcgatgtatgtatctaactttattaaattctaatatatttgattgtttcaaaataaagtctttgcggcgataaatgggtgggggaagttatgttattttttaattggaaaccccggcgaggantaatagagaaatgatatatcttaacataaagttaaacaaatcaaatacttcatctgtatcacgatataagtcattctagaatttttcacatttatattggtgggaatgaatatacacaccaccgcaccgtatgaagtagggaccacgacacgttaaaataaataaaaagaaatcccaaacactctcgcctcgtctcctctcacaccacacgcctcgcatcgcatccccacctccgccgatcccgccgtctccggccatctccgccgccggcaaccaccaccacctcctcctcttcccctctcccccttccgcccaattggttgccccgaccaaaccctacgcgcggaagggctcgctcgctcgatccggtgcgggcagcgcgcgcgcggggctcgacgcgggcggcgacggggggcgggctcgatccggcggagcagtgggcgctctcttccacgatgcgtctaccctcttcgcgcgagcacgacaaggtttgcagtagcagagaattttgtttcgtgtttatcgattgggcatcttcggcgcgggagaccggggagtaggttggtaggtaggcttgccgaatccagcattttcgcgtgccccctcgtagcttccgccctgctactgctgctgcaatcggtgtggagagagataattgggggcattgtgacctgcattcccgcagggcaggggcaacgtcgccatcgtgcgcggcaccgtcgtctagtctcccatctttttcaagaaagaataatcgaagattaatcttgaccaattcaattcatttgtgctgcaggttctttttgcggggtcaacaataatgaggagaatttgagttggtctggaattactctgggatgttatcattggcgaaaagtatagatcccttttggtagctgaggagagatctcaattttttcagagagtagatgtcgtttcgcagcatcgtgcgcgatgtgagggatggatttgggagcctatcgaggaggggatttgaggtcaggattctggggcatcgcagggggaagtctcatggtgctgtccatgagttgcatgacccggtgcctgtaatccagagcagctgctgggctagcttgcctccggaattgcttcgtgatatcattgagaggttggaagaaagtgaggctacatggccttctaggaagcatgtggttgcttgtgcgggtgtctgcagaacatggagggagatgtgtaaagagatcgtcaagaatccagagttgtgtgggaagatcaccttccctatttctctgaggcaggtgatcatgcaaattgtgttgtttttagttttatatcctttacaagcaatatcagttcgtccatgttaggtgcttgtccttcaacatattgttggaatttcgaaacacaaaaatagaaagaacacccacatattgcaggattaccgtttgcttatatgctaataagttcatgttattccgcttctatgtacagcctgggccacgagatggaactatgcagtgtttcattaggagggataagtctacgcagacctactatttgtacctctctcttggctctggtatgttacttgttacatctcatatgctttatgttgtatgcgcctatgtaccagagcccatatttgcttctgcataagaagattcatatgtagttgtatatacttgtgagctgctgaatgagtgcatatattctgccaaaactatgcttgtattgcatagcaaatgaagagctgttctttcttatagcccttgcatagggtagatggtgccttgggatggtaattggtgccatgtttatcatttgacatgaatatgctagaaacatattattccttatttgtcattgtctatcttccacaatcatgcacaagcgaacttgtgaacagatcattcagcattccttggctttcatacagttaagttaggttctttataactacaattctgtaataagttgtctcatttttgtaaccaaaataataggatacagcacacaatagttgttatgtataattaagtgctattttttagtattgtatacctctgtcatgcacttgttctactgttttacctgacctataccacttggtatttactacttgacttgacaatctggaaaaaaagttgacctgatccatgataatgtcaattaagcaacagtacactaataaaatatattcccgttgttatgcacaagtaggttgttctcttgagattgtttgcattcgaaccacttcaatagttcaatgacacccatatggtgcgagtatattcacaagtgggactggttctgtgcaattgtaatttgagctgctgtgtcctttgcttgattggaattgcatgctatctgtttgctgtgtccatgtgggtgtgcatctgtcattgttggtttccaattataggtaacatagtgcacatcagatacaaagggcctcaaggctatactgttgtgcacgcatgcatcgtgagaatgaggcgatgagctcagcgtgcttgcattgagctcctagctgcacaagctctgccatcggccggcacgggcctcaaagtcgaccactgctagccctttgagccctgttgtgcgaactcaatcctcttctgttgccttgcgtccgcctgctagtaacatcaagtgagcttagctaattgccgactagatatattaggaaatgacgacgaaacaaaataggagggaatctcgggatgagatgtatggaaagacatttactaattttatgtgtgtaaatgcaagacatatttgagctgctttgatgtcggcatatgttcttaacttctcataatatttttatgcacaacgaattaatattatatggtggaaaccgttgtttgtttgttatttttaatcgtcttatgagttgtaccgttttaatatgcaagcattgtcattcttttacttcagtatgtcttgtgtgtctgacccacctaatttttgcgcgtgctccgtcactggtgcacatatatgttttgtttccttgctggaatacttttagtatttcagtaccagcatttactaattttagatgttttgatttcccttttctgcagctgtgcttgttgacaatggcaaattccttctatcagcaaaaagaaactggcatgcaacatgtacagaatatgtgatatctatgaatgctaacaatttatctaggtctaccaacacaaacattggaaaattgaggtattaacccgaagaaactacaaccttatttcagaacttaccccattttaatctaaaaattattgctgctgctaatatgtctccattttgaattgtaggtcaaacttccttggcacaaagtttgtaatatatgatacccacactccgtacaatgcaactagtgattcacagtcagggaaaacaagccgaagattctccaacaagggaacagcaaagcatccctgcagcacatatagcatagcaaacatctcatatgagctaaacgtctttggaactcggggtcctaggcggatgtgctgtttaatgcactccatccctgcctcatctcttgaggctggtgggactgttcctagccagccggatagcatccttgcccattccctcaatgaatcctcctttaggagtgtctccttttcgaaatcgtccgttatggaccattccatgcatttcagcagtgctcagttctctgacatctcaattggagatggcccaaggattgggggccgggtattgagcgatgatgaggagtgcaaggagacacctttgattctccaaaacaaggctccaagatggcatgagcagctacagtgctggtgcttaaacttccggggccgggtaactgttgcttctgtcaagaacttccagctcatcgcagccacgcagcctgctgcgggagccccaactccatcacagcctgttccaccacccccaccagagcatgataaggtcatactgcaattcgggaaggttgccaaggacatgttcaccatggattaccactacccgctctcagccttccaggcatttgctatctccctgagtagtttcgacaccaagctggcctgcgaatagaacttccaggcaggccagaaacatcatggatgcttcttatttgacgccctgagggcatgcccctggatggagctgaccatccccaagtttagcctgggacgccgttctgttgtatgttactgatgatgtgttaactcagaaacacccaagcaacaaaaggcaaattgttattttagcatttagcttatttattctgattttgctttgtaattgaatgttatctttatttctttttgacccatagctctctctataacaggtattctgtatgtgcatcggataattttcgcagaattcatttgactgttctccagtgatttattaactgagaaagctaataatttggtgattcaagtccacatgatttcagttgtgaggtggataattgtaccttgtattaggctcaagtagtccagtgtcaccatcagaaagcgcatactatgtttgcttccaagagtgaccaatagttaggcttttgcaacccaaatcatgcagatcttatcacggcaggcactaaaataaaccgatcttgtacaatccatgtaagcctgcatctccatccaaataaagattcgaaagtgacttcctattttagatacagtgcttctctttctagagttaggtggccagaaagggacagtagaggatacaacatctgcttctattacaatcaacttttaccggtataaaaaaaaaaggtggctttaccctgaattaaggtgaaatatatcttgtttagatcaggaggtatctagtagcagtgactgaactgtcaaatgtaatcgatcaacttggcaagcatgaacacatttcctgcagcccaagaaatactaaagaattgggaccaaaaacatcaattcagatagtatatattcctatcactgagagcgaaccattctgataactgagattactgaccgcctcattctttcgcttatgcttaaattcttatctttatggcttattagaaaacaaataataatttatgaacacaacttttgtacaggtgtccctaccagttcaaaagcaaatcctgtaaaataaaactatggtgaaaaaagcataaaattgatttcaaaattagtttttaaaatacaaaatttgacttataagcttaggcgaaacgatagggttgtgtgagtgaggccatgaagcatccatccactttaggagagaaaaaagaaagaaagggaaccagcagatgctccctaatgaatgcaaacttgatgtatcctgaattcttcttgattcccaagcaaatgaaatgacgacgtgtcagtactcagtaccaggtactgtaggtattttatctgatactcttagtactcaggttcagtgcatgtgtctctgcctatatacaagtgccaagtgtgtgtgtggtcaggcttcaagtctgaacttttttctctggttgaaattagcttatggtctgaacttgttcaacgaacaactaccaccgctactggtatcgcatggtcaacacttcagctggaattttgaccggttcatgagaccaggtccatctgtacgttcccttttattttcacgtattaagagtatcagatatttttcttcgaatccattactatgtttacattattaattttatagtgaataattaaattcctacttgagtgacgaaatttaaaatcccccttgtcaaaactctatttttaacacatgactagttaattgcccgtacattacgataaaaaaaattattttcacacacaacaagtagaattatgtaaaaaagcataacttccatgatgggatatatggaaatgtacctctagttgtttggcttctattggttagtttggcttctattggttgtgcctagctttccacagctaaatttgtcataagtatggggctttgccatacaaaatttgggcatatggccaataatttgttcatcacaagtatggtaatgtttggctataaattgtatctatgatatgtgggtctataaagtagtaaaatgtgacttgccacaatttcaacaaccaaccaaacactaacctaacaaactacaactagtctaatagtatttggtttggcaatatgtgacatgtaaccagacagatccataggctattttatgatcctgtgttcaacaggtttaaggttttcgtgaagaagtgtagttaaggttaattttaggacggagatagtatatgttaatgctaaagtaatatatggtaacaaactattgcataatttaagagtaaaatgcaccagcggtccttaaacttgtcaagaggtttcacttaggtccacgaacttgcaaagcgcacatcgaggtccctaaacttggtttattgtatcatctcggtccaaagccgtgtttgaccgtggtcttgcctacgtggcacgccacgtggacgatgacatggattttttatattttttttctcccttcttacttcttttttctcttttatgaaaagacgatgacatggacgatgacgtgtgcgaggcattttcgtcttttcgacaaggaagaaagagaaaaaaagaaggaagaagggagaaaaaataaaaaagggctatcgaaaagacgaaaatgcctcgcacacgtcatcgtccatgtcatcgttttttcataaaagagaaaaaagaaggaagaagggagaaaaaaatataaaaaattcatgtcatcgtccacgtggcatgccacgtaggcaagaccacggtcaaacacggctttggaccgggatgatacaataaaccaagtttagggacctcgatgtgcgctttgcaaattcgtggacataagtaaaacctcctgacaagtttaaggaccgctggtgcattttactccataatttaacctatgtttaataagagcagatacaattaataatgggcagtagtagttccacgtaggattttgtgatgatctggaggagagaggggaagagagagagagagatagagacaacgactaatttgttgtcgggctgcatgcgccgcttgaggagtttgtggggcctacctagatggagaagcatcggccatgccttgcgttggcctgcctccgttgccaactcccgcggccaccagaccgctgcccttagactcacaggtgccgacgcacagccgccgctgtctcccacatccgctgcacggcccccgtcatccctcgcctgcacggttgccgccgtcttccgcctctgcagcgcggcccggccaccgctatcttcgacgcccgccgcacggccaccgccgtcttccacctccactgccatctcctgcgtctgccactgccgtcttccgttgtcggtgacagcgaatcgaagctagctcaagaaagaagaagacatgaagacatgaactaaggggataggagggagaaagagaatgtgaggtaggagaagatggtgggtcccacaaaacaataaaatattcgtgttatagtatttctattgtagacattagctacactgcttactatagatgtcatggctatttttttgaagccaacagcgggctatgttattgaccttgctctaagcatgtcaaaattggccggtagaagggacactaaacaatgtacatagactgtgtttagttcgtgtgccaatttttttttaaagtatacaaacacacatttgaagtattaaacgtagattaataacaaaacaaattacagattcctcttgtaaactgcgagatgaatttattaagcctaattaatccgtcattagcaaatgtttactatagcatcacattatcaaataatggtgtaattaggctcaaaagattcgtctcgcaatttacaatcggactgtgcaattggtttttttttcgtccacatttgatgctccatacatgtgttcaaacatttgatgtgacgaaaaagttagaagtttgaagaaaaaaagttaaaatctactcgaaacatagccatggaagcaggggttaccttaccgccgataactgcgcggttactgcggttaccgggcttatcacggggtacggtaatataaataccgcggtaacctccttaaattcaaataagtttaaaaaacaatttaaatttttgataaattttacacggttttatacagtggtaaccgtgcttaccgccgggacgcggtaaccccggccacagtggtttgggagaccctgcatagaagaccacatgtccatgtcataatccatcggaatggatgaacaaacagtagtgagtttgtccaattagaacatgccggctagctaggcatgcagcactgagcatgcaagagacaagacaagcaacaagtcctcttcccatacgatggcaacagcaaggcaggcttggatttgccttccctcacaagtcacaacaacaacggctgccggccgtgtgttccccggaaaaccaacccttggctatgctatcctctcattcgctggtttacgtgtccggccacgccacctgggcccactggcagaattgttttcttggagtactcccctttacactggagtatttgcaaattgcaagcaatggttttgtgacttttcttcttctagaacaatttaatatgtttttttaccaatcataaatatttgcagggtatttgtacacctaaaatttaatgtattggtgcacagaccgattttaatttgctcggtttttgatcggtgaatcgagggagagtagatgagttcatctggaaacgataaggtaaaccctcgattaatacgagactagtaccatgtttgttaacgagccattttttatgcgttttgggttctggccaccacttctccacgtcattgtagtagcattttcaatgccccacctttgctttttttgatttatcgtacctagtgtttttttatttcttgcatcacctcttatttttaagtcaactctcttctcatgatttgtgtagttaatctgtgataaaggaattctccaaattaattccacagcttcaatactttaagagatgtattaaccgaacaagatctaaaataaagttccatagcttaatacgttgattattgaatcctgtcttgaaaaaaggagacatatctgggagtatatgaattgctcgatcccaattattattagacaatagatgttcccggtgacattttcataatagaagtacttatatatgctgtttttttttaagaaagaaagaaagaaaaaaaaatccacaccggctaatatcgaatgccaccatcggtgaaacatttgctgatagtgtggcttggagaatgacaaaagtcgtacaagatcgagtggccaaaaagcatcgccgatttttttgtaatttgacggcctaccaaacgttaggcacaagtagtgtggatccccgaagattgatgcatgattgcgaccacttcgcccactgttgcttcgattagtacgggttacaaagcggccaagaacttcagaacattccgatgcaaaacattaacggtaatataagcacacgtagatttaatttatttcataaataaatcacgttattgactatgtatactaacataaccacgatatacgatctagacatatatactaaacagtaaaccctgagcacatcgaatagatgatacatggtgaacacataacgaaagctctggtttgttgtggattagattgatgaggagcagcgcgcactgcaggaacaacggcggtgctggatgtccctagagtgtagaggaagacgagccgtcgtgaaagaccagcaagcagtcacgcgagccgtttccaaaaagctaattatcgtcttctcccgatacagaatgtcgaaggacgaaggttccaagaggggacctttattgatttttcaaaaaaattaatctccatatgagccttagtagcccacgtattaattccaacaaaaatattgtacagaaatccgtacaaatatatgcacacttatttgtataaacgaacagtcgagcacacacaacatgacactatgaccacatccactttccgagggactaaaccagtgcgtcttaaattgattgcgtcattacaaacatctcactatcgatggatataaatcacctaccactaaaaatataattagcagtaaatacgagcacccatcttaaatttaggacttaaaattgaacaactatatttccatggtaagagaaattgtttacatatttatggttttattggttggcttcagctgataagccgtaaaaaaaaagtgagacaacagaaactaagattgaaaatttgaatttcagcttataagtcaacaagcaaacaatcagattccatttaaacaatacaataacatctcactgtacataaacaccactgagaatttagctaggacagaacttcagagtatgaaaaatttcccttagtccaggagaggattgagaagatttgaaagagatttattccacacctattataatgtgaaactatttcttctcaactcctctaattcatctctctaaaattgaaatgactgagtttactgattttttttaaaaataaaatcctgcaatataaaagagcatatcacaaaactccaaccataaccagcagcctctactacgtgccagctcaccatgtcacgcacacgactccagtccctgataggcttttgtacacctcaccccgtttcaccggcaccaacaacggccaggtccggtccgtccgtacaaccacccgcacgcgccgcaccacactccggctccgccaccctcacctcatcccaaccgtttccgacccgcgcccgtgcggccgcttgaccgtttcccactgccacctgggccccacctcgtcgggccccgcgccgcgcctcaccggtggccgcgtggcacccgcccaccggccgcgcccacgccccgcgtgcgccgcggtagtcctattcccaaactgcccccgggtcggtcgccggcgcgagcactggagtgcggggggtagaaaggtaaaatcgtgggggtggaggtgtgaacgcacgggccccgcgtgggaggggcgggttacgcgtgtcgggcccacatggcagggactctcgggccgcgtgtaccactcccctccccgcgtagcactagctttttgctgattgattcgtctcggctcgaggggcttaactcggtttggtttacttttctcttttgatttgatgataatgaattgatctaatgatcccctctgcaaatggcgactggtcaccggagtttgatcggatttgtttagttttgcgatttggttaagctaaacctcgccaattaatctggctgctgatcctgcccttttgcagaaaagccctccaggattgatggtttttgtgtctgcctcaaattggccatgcatcaacatgaagtatggccaattattgtgcatcatgtcagattgtcagtatagtcagctgatcactgtagtagcacagtgagaagaagatgaatacacaaacaacaatctttgctgatatttttcatatccacaagaggggcctggcctatttggaaggtatttctatggctacgatatataaaaccaaaatacgcgacgactgaaggaatgaaagataattttaggataaaaactatatgattgtactcttggcagtcaaaaagttcaaggttgagaaaacccattagactaattctagaattagggtctgaatttagctacagcttataagtcgtagctcaaacaagcatgctcgttaacgtattcaaggcaatacatttttaacaatgataagaggagaccggccgatttggaaggtatttctatggttgcgatatataaaccaataatacatgatcataacaataaaaaaataggataacaattttgtacttctactcttagcagttccaaagttaaaaggtcggcaaataaaccattgaattaattctaaaattacgacgtaaaattagcaacaacttagaaatcgcggctcaaacaagaagggctcttcaagtattccactatagtaaaatgctcgtacctcattctatgcaaaagatgacaatatttcattttaactttgtaaggacccaggagtaattacaacccttttagagcccctcctaccaaaaccccctgagagagaaagctaaacaaaaactagaaacattctcagttccagaagaatatttgcacccacagaaagaaatcatttacaaaccaaagattaaacaaatccaaacaatcatgattagctaagaccacttccccctaaaccccaaaatatcattaaactaatcccctccctaatcacaatcccatacatatatacacccatccatccatccatccacacatcaccacctcaccatctccatccatctcacccgttaacccgctaagctctctctccaagatccgcttcggtttcctctccggcgatctcgccggcgaccatgccggcgaccgactaccagggctcctcctcgacccactcccacccgtcgcccttctcctcgttcggccgctccctcctctcgctccgccgcgacagccccgccgccgccgccggcgcgtccccggccatggcgtccggcgaggaggccgacctggaggcgttccagcggcacgtggcggcgcacctcgccgatctcaggggcggggaggacgagctcctgtccatcgagtggatccggcggctgctcgaggcgttcctgctgtgccaggaggagttccgggtggtggtggcgctggcgcgccgccgcggggcgctgtcggcggcggcggagaagatggtgggggatttctacgagcgcgcggtgaaggcgctcgacgtgtgcaacgccgcacgcgacggcgtcgaccaggtcaggcggtgggagcggctcgccggcatcgcggcgtccgtgctgctcgccccaggggagatccacgagggccagctccgccgcgcgcggaaggcgctctccgacctctcggtgctcctcatcgacgacgccgcggccgccgcgggtggcggcggcgtcgcctccttcctctcctcccaccgcaaccgctccttcggccgcgcccgcgcgtcgccctcccgctccgcgacgctcgcctcctcctcatcctcctcgtcgtcgtcctcctcctcctcccacttccgctcgctctcgtggagcgtctcccgcaactggtcggcggctaggcagctgcaggccatcgggtccggcctggcggcgccgcgcgcgcacgaggggggactcgtggcgccggtgtactccatgggctgcctgctccacctcgccgcgtgggccctcgtcgccgccgtgccgtgcccggaccgcgccgccgcgctccaggcgcaccacctccccgccgcgccgccgcgcgccgcgttcccatgggcgccgccgctgctcgcgctccaggagcgcctcaccgaggaggggaagcgcaaggacaggcgcaactcctgcggcctcctcaaggaaatccacgcgctggagaaatgcacgcagcggctcgccgaggcgatcgacgccgcacccgtcccgctctccggtgagcgcgaggccgaggtacgggaggccgccgccgagctggctgccgtgtgcgccgccatgagggccggccttgagcctctcgaaaggcaggtcagggaggtgttccaccgcattgttcgcagccgcatggaggggctcgattcgccgatgctcaacgccgattgaaacatggagaattcacatttgatcgcgcaatgtggtggtgataggtaatgccgatcgaaccgtcgagaatttggatttgatcgcgcaaatgtggtggttataggtagctctcctgttcttggtttttttcctcacttgtggtggtctagtagtaattataaaatgtgtgccgttctgtaaaggaaggggggaaaggaaaggaaccatctttatgtaaagatgattccttcttcccatgttttgatgctgcatttggtgtatatcatggcatttttgttagtcctccatgtgtgcgcggctaattctgggagtaacttatagttgaaaaatctgtgaggtcgctatgaaatgtggcctgttgtcgagaatgtcgacaaaaaaattaaacaagaaaaaaaaatctactgtggtttagttcgattgtgttgtgtcataattcatgtttggtcctgatatttggatggtttaatcaaaaggtcaaatcttgaaactatcatgcgtgcaaaattcagcaatgtttgacattatgaagtactgctgtagcggtgtagactttttccatcctttcagttctacatatggttctgtgaaatccttaatttggttttatattcaatatgggaatctttttaagagttcctcattgtggattgcagtttgtgatggatcagttctgttgtccaatttatttgaaggcttcttgccagcagaaaatataatatattaagaattagattaggagatcaacatggatagagtgcggagtaacagatttcacattacacacacttatgagttaaattctagtgccaataatgataagacccctgcaagattgtctgtgtgatattgtcaataatctatatctaggtgatcttcttatctcctgcataattctatctgacataaaagatcaggtcaaactgtattagtgctgctaccaaactattataaaattaggatggaaaagatactagtgcagatcttgtcatatgttaataaacaataacctgattcactgaataggtgcatgtcggctttgtagttcagcttggttagatgtactcctgtataatatttctactttggttgatgtacttgaccctaatatttcagtcttctgtgcaatctttttcatggttctggacttgtagttgtccctgacaccaaaactcaggcctgaacaagtgaacatttccacttgttttgaactagtgaatgcttctgcatgtcacaactcacaactgaaactcctgagagtgtttgctaatcttgtacataaccaatagaggaaaaattcagcttctgatgtacctaaaaaacccactagtttgagatgcattttctcacagttgtggcaaaaggtcaataatgatgtgcagaagaagcacaaggttggaagaaaagatctgatgatcctcaattatagtgatcatctcctccttttacctctgaaaatgtagtattgagtttccatcatcatcatccagtcactgtcctgtatcctttgtaacctaaagtatttctccaattagtgacaacattataatggcttccctgctggttcatctgccacgtgttcacattataatcagtgccctcctttcatgagctttttgttcacaagatgtgctcacttctgaaatgagaggagcttcttctgttgtgctcacttctgttcttcatgtgaatcatatatcatcctgatgaacaatgattcatcatcagcagtagcagttacagagaccttgtgcagatgtgtggctggtgtgatgatgtgagctgtatcattcggaaggcctttttgtggggttgaattgcattggcttgatgatgaggtgtttgtttcttggcgctttttccagctgttgctgaaatggaagaggtgagaaccggccggcgcatgcatgtcgcctctcacctgctgctgcgtctgcgtgccatttggtcccattccccgaaattttgggcgtcaccgcagcgtcatgctggcgtcagcgtctctctgtataagggcccacttgtcagccatgggaagattcaataatctggttattattatagtttggaatttttcagagattaaggcccatgccagaattttgtccaggccggccttaccggagggaggtctggttttgggctttttaagcccaacct

SEQ ID NO: 6467 - DNA, 25301 bp, Oryza sativa
actcccgaacaaagcctaatatattctcattctttcgtgcatgcagttacctagaatcgtacgtcgaactagctttaacgatgaagacattaaaaatatgtagcggcatctctgccatttcatccatcgcgattgttgtcataaagatggatgggtacaagttctttcgagagtggaacaatgtgatgccataatgcattaattagataatgcattcggaatgacaattgtaaaaatattgtaacgtattgacgatacttttcacttgtacattgtacgtaattatgtcaatattaaatgtttgttagtgcctaatagtattaatgtattaattaactaattaattacaatattattacaaaatttggcgggagatttaaaattttgtggcggccttgactattaccgctggtggccctgacctctacccttcttcctagggcggggccctgggttctcttcaatcttctcaagcagaccggccgtccaccaatgaaaatcggtgatttttgcaggccttggcctacaggtagaccaggcgtctgtttgagaagaccgatttcgaccgactacaagtactttatttttctaagtagcgtactgaaatacttcttccgtcctataaaacttgtcattctaggttgtttagcatgcattaaggttatgataaaaagactataataccccttattaaataatgtacatttggatgtaggatggtggttaggggtagaatggggagaaatttgaattgaaagtggtttatgtgataggtagtactctaaggtgacaattattttggaaaaacttttgattactatacagataagtattttggcatggaggagtaacagagttggggcggatagatgctgcttccagccttccaggcatttacaactagctaggggaatcatcaagtaattaaaaaccataaaaggccagcttattcgctctgcccagaagatagcttaattattcggtgcagcgggattaattctgacaacgtgcttgtggttccatatagtgcctcaagcacaaaagaaagaataagcgatgatgcgtcatgctggagctggttccggggatgatttttttcacaagaaaataaaataaaataaaatgctagatattaagaaaatgttatttcatttcactgattccaagagaaggtgcatatcgatcactaattcaacagaattcaatagtttcatattagtggataattaaaaaacatcatggaaaaaaaaaagaacaacatccacacgtccacgtccatgtaacagaaaacccataccggctcggtgcaacggaccattgccctttatatatatgtactcatgccaattcgtgagcatatggttttcgacggcatataggcggcggggcaggagttgaggtgggttccaaaagaatatataaaaggcggaggatataatttacttccttcgtttcatattaatatatacaatttaatatgaaacggaggaagtagtatattaattgtaatcaaattaaaggagcgttgagacgggttgattgatacctcagaaaacaaattagcataccatatgcttgctgatttctgatattttattcattaccacacatatatagttgcattatacgagccaaacaaccaggacggacgatgtgtacagctgataagcagatacaaagcgcctggtgtacgtacacacatacatgaaaaggaaacgaaagccacaccaataaaatacaggagccatgcatgcgtgcacacatgcatgactatactgacggcggaacgtccttagctgcatgcgtgcatttacgattattgtcgtaattaatgcacacatgtaagtagacatttacttatattaatatatgtgtgtggatggatggatcgatcgatctagggggtggattgctggtaaggggtaccaaggatgtagacgcccagagcgttgatgtactggtcggtgcggccgaagaacgccacgatctggccatcctccaccggcacgctgaaataatcgccctccttggttttgtccccgagccaatcgggattattattgtttttcgtcgtgattctgagagacttgatttttgtacggccgtcagtcctgccctccagcttattcacgtaatcatcatcatcttcaatattaatctgcaagaggaaaaaaatattagtgtttttatttatcgatgcgtgctaactattaattctctctccgctccaaaacgtaattaaggtgtttgttaattagtttggtgctaagccaaatttttttttcttaatttgaataaatttattcatagaaaaaatgtaatagaatgaccaaacaaatgtgttataagaaatagagttaagtgcaagaacgctccctaaagttatgtaggtatatgtcatctagtttcctaaattcttaaaatgcattttcaggtcgtcctcaaacttgaacttgccctgtgatgtataggttcaaacaggtagcaaccccgctttacgtgttaacgcagcaatatatggtactgcctacatacccatatatatgtcagtcacatagaaagatataaaatttaaaaacttcttttctacctgcttccatgtgattatgaaaagatgttttttaattttagttttttcccatgtgactaatgtgttggttgtccaactgatatataagtgccaccgtaacaagccatgttagcgcacggatcgtattggagctcatttggatctatatgacaatcagaacaagtttgaagatccgaaaatacatttttagagttcaaaacctagatgacatacctagacaagtttagagaccgatatcacttcatacttgtaaaaaatattaatgatatttaataaaactaatgtaatgttacaaatattattattatttctataaacttaattatattagtcgtgcttaaaaattttgattctatacaaaatttaaacagaaacatatttcatttttgaaacaggggactagctaagttaacgtttgaccactcccaccatttcagaattaatgtcgccgttaacgtttcacacaacgttggactatttattttattcaaaaatttagtgcaagtatgtaaaattataagttaagattttattttatttgatgataaaaaaaatcctaacaaaataaattatttttatataaatattttaaataaggtgaaagtttaaacgttagaaaaaaaaattaacggcatagtacattttaaaaatggagaataacaaatcagaaagcaagcagacgcatgcagaacacatatatacatacctcatcgctactaccgctatcgtcgccccaaacgcgagtggtggtgagctttcttttgttggcggcgtggaggtagctgaactttaagccgttgattccatcttcgtcgtaccagattttgatactcttgaggtgatctggcggcaaggtgtggtcaatgtcgacaggggtgccacccgcaccgaaaggcccaaccttcgccagcgtcgtcgccatctgcactgatgatctcttgttgctggtgtcgtcgcctgaaggaagcctaacacatgcaaacggcatcaaataacgacagcagcacaagtgcacgcaaatatactaatcaggagtaaaagtttttacttaaagtaacattaattaataagtcttagatgtctatttcttaaaaattttacgatagcttttgggttcgcattgatcgatctgtatttcttttccggttatgcgtacgtcagtttggatcacatctcgatcaggtggcagtttatcatgcatgcaagatcacactatatccagatcaactaaaaaaagcaatatatatatatatatatatatatatatatatatatatatcgaacttactatctcaagcatatgtacgtaccctgagttaacaaatcgtaagattcactggtggagaaaccctttgtagtcccggttcgtaacccccttttagtcccggtttggacaatccgggactaaagatcgctatctttagtcccgggtgaaataaccgggactaaagatcgagctgacctttttttttttgcatggccctgttgctgcatggtttatatatatatatatatataaaccatgcatatatatgtttcaatacatatatatgcatacatatatatatgtatatatattatattatattatatgtatatacatgcataatatatatgtatttatacatatatatatgttatgcaaatgcatatgtatatagatatatatatgaccaaaatatatttacattatagaaaatgtgtacacatgcatatagaaacatatgtagtcatgtattaattacaatccattatatgtcctagctagctacgatttcgacgtagtagtactcgctgctagctcagaagctaaggaccggtgaattgtgtttccgtcgtagtagaattcacccttgggatcaaggatttcttcgttgatgaatcccatgagttgttcttgaaccgccgcgataaattccttgtgtgtggtcaggttatccctcatgcgaataaactatatgaatgtatgaaattgattagtaattaaacaagaaatcgctacgtaatgaaattttgaatttatttgtacgtacatcgagctctcttgtggtgatgatttggtctgcaaggcagtggcaatactcgcacacgtaatagccgcacaagttagttccctgcttttgctttgcgcactacaaataaatgacaaacaacgagagatctaattaatatacacttgtatgtatttgaatcggagaaatataaatgtagagcatgtgtactcacaggaaatttgaacttccgcctaagtctttctctccatttgccgcggaccaaatgacggaaccgataccaagccctacatggagtttaaagctatgattcgtagtagcaattaacataacaagattttcttaattaacaaaggaacttatgacggtacctgtctataagttcgaaaaccttgtcaaacgtagactcttttttatccattgagtcatatacgttgacggtgcaggcctccaggtcgatgagtaaaagcacccagtggaatctgcaatgtgcgtgggatgcattacatatgaaacacttagcaagttcgtacgggaatgaaatttggtatgtaggaagacagtaaaattaaactaactctgtgttgtatggcaacagtatgaacgtcttgtaatgctgcgccttcaggagatggacgagattgtcctctgtttcttgtggatattggtcgagcattgcgacgtttactttccgagggtcgatgaatccagtatcgaaaaccctccgccgtcgggccctttgaatctccattctacaacgataaaagggagtatattattttctatagtctacttatatacaaggacctaattaattaaaggagacgtatagtaagaaatctaactgaacgatatacttacaaaatccagcaactcataatagagacgtcgagggcgtccagctggtatagttcgtagattcccctgaaattgatccagagaatgtcatctccttgcaagaagtccgtgtccctgatcctcgctccgatcatttctctaccggtggcgctcatctccatgtacagctgatggaacttgtacatttgtgtgggtagggactgcagcagctcaggcttgataagcggtttaccgagttcgtacatgtatttcacttccgccttttcgattggtgcgactcctagcaattgatccgtagttagaccagtgtcagtaataaattgttctatcgtcatttctttaccggtcaccaacggctcgatctcctgatttggttgctctccaagctgagggactggtttggactttccagaagatgctttcttcagcgttcgctcatagtccgatagcttgatggcctccttgacagatgcagacatacccctgaagaagttcctgacactggggtctataggaatcttcttttctggacttcgaggcttgaattgtctcttgacttctgatgcaacgtaagcgtcaagctcctcttgcgtgcaatcgtaccccgggtccttgttcttggcggcgtcaactttcgccttcttcgttgcccttgtgtggacaggcggtggagctgggggggcccttgactttgaaggtgccggaagaggagcttgcggaggagtaggtgtaggagcccgaggaggagtcggtgcaggatcctgaggaggagtcggtgctggcggagcatgaggaggagacggtgcaggatcctgaggaggagatggcggagccgaggagatggtgcacgagacgccgcttgtcgcccagggaggatgatgtaccgcctgcgccatagaataatggcatggcttgtgtctcgtagatgcgtctcaccgtctcctccagggtaatccagctcgaggtcctcgtacgcgccttcgaccaactcaacttcgaccttcgagtatcctgctggaatcggcctgcagtggtaagtacctgaagggtccgttgggatggccatgcccgacgccaccttcatgttgtgagaaattatttattagtaatcaacatatataagcagcaactagcggaatggctaaatcttacctttattgataagttcttgaaaggaatatgcagctcacatggtgtccgctgagtgatgtcatcaacgggacaggtcgattcgtcctgtgtttgcatggcgtccatgctctgtgatcctacctgccccgttgaggcgcagctgctacggtttcctgacgggctcaccattgcaggaggaatggtcggctggggatcatgggaccgatgtgcggccatgcgttcatcaaccttccttgccaactcctcttgcatgttgagttcgtagctcgatacccggaactctaggtctgcaatcttcgcctcggtatctctcttgctcctcatccgactcctgtacgtgtggatgtcctccttgaaaccaatcttccaaggaatcacccctttccctcgtgttcgtcctggatgctctggagtctgcagggcgagtgtcagctcgtccctatctctgtctggttggaacgtgccctgagaggaggcttccactgcatctgttagtcgtcgcgcagcctctcgtatctgatcgccgaagaccagtgagccatcagctgggttgagcgttccaccgtaagtatagtaccagaacttcgatcgttccggccaattggctgttgccggttagatacccctctcaatcaagctagcctccatctgctcccacttcggcatcgcgacgctatagcctcctgaccccaagtggtaatggtacttcttcttggcggcattttctttgtttcctcgatggcaccgtaatacgtggcagttgttccatcgtgtcccatggcatcgacacgaacagcgctgttttggttcgtgctcttcatgtcttgggctctcgtgtagaatgtgtacccattgatctcatatccctggaatgtcgcgatcgacccagacggtcccctcgccaggaaggcaagttgttggttgatcgactcgttacccatgagatgttgtcgtagccacgcggggaaagtatcaatgtgatgccgtgtaatccatgcatcggacttaccgatgttcctggcgcgaactagagccaagtgctcctcgatgtaaggagctaccaatgaagagtgttgcagaacagtgaaatgggctttacggaataaattgttgtctaccgtcgttattgctttccttccgagagttccctttccccgtagtctcccttcatggcgtgattcaggtaccccgattgggcgaaggtcttcgataaattctacgcaaaattcgatgacctcctctgttccataacccttggcgatgcttgcctctggacgagcacggttacgaacatacttcttcagaacgcccatgtacatctcgaaaggaaacatgttgtgtaggtacataggcccgagaatacggatctctttcacaaggtgacaaagcagatgcgtcattatattgaaaaatgaaggtggaaatatcaactcaaaactgacgagacattgcaccacttcattctgaagggcttctaatctatccggatcgatgaccttctgcgaaattgcgttcatgaatgcacatagctttgttattgttgcccggacattgtctggaaggataccccttattacaactggtagcagttgtgtcatcaacacgtgacagtcatgagactttaggtttgtgaacttcttctccttcgtgcttattattcgcttgatattcgtggagtatccagacggtacctttatgctctccaagcattcaaacatactttccttctctgccttgctaagagtgtagctggctggactcaagtaatggcttcctttctcctttggttccgggtgaaggtcgccgcgttgttccatatgcttcagatcattatgtgcttccagtgtatctttcgactttccgtatacacctaggaagccaagaaggtttacgcaaaggttcttagtgaggtgcatcacgtcgattgcgtggcgtacgtccaagaattcccaatatggtaactcccaaaatatagagttctttttccacatcgccgcgtgaccatcttcgctctctatatgctggcttccaggcccctttccgaacactactttaagatctttaaccatagcaaacactgttttcccgctgcgatgtttaggcttcgtacggtggtcggccttatgttcgaagtgcttgcctttcttccataccgggtggtttgctgcaaggaatcgacgatgacccatgtatacaaccttcttacagtgcttaagatacgtactttctgtttcatccatacagtgagtgcaagccttgtaccccttgttggactgtccggataggttgctaagtgcaggccaatcgttgatggttacgaacagcagcgctcgtaggttaaactcctcctgtttgtcctcgtcccacacggggacaccttccttcttccacaactgtttaagatcttcgaccagtggtcttaggtacacgtcgatgtcgttaccaggttgcttggggccttgaataataatcggcatcattatgtatttcctcttcatgcatagccaggggggaaggttgtagatacacatcgtaacgggccaagtgctatggccgctgctcatctctccaaaaggattcatgccatccgtactcaaaccaaaccgtatgtttcgtgcgtcctttccaaattctttaaattttctgtcgatgtttcgccactgcgaaccatcggcggggtgtctcagcatcccgtcatgttgacgctcttcagcgtgccatcgcaacattctagcattccccttgttcctgaacaaacaccttagccgtggtattatagggaaataccacatcaccttagcaggaattctcttctttgttagctgcccgtcaacttctcctggatcgtcccgtctaatcttgtatcgtagtgctttgcaaacagggcatgcttctaggttctcatactcctcaccacgatataggatacaatcgttcggacatgcgtgaatcttatgaacttccagtcctaacgggcagactatcttcttagcctcgtacgttgtctcgggcaatttgtttccccccggaagaatgttcttgacgagtttcaataaatcgccaaatgccttgtcactaaccccattttttgccttccattgcaacaactctagagtggtatccaactttttgtgcccctgctcgcaacctgggtacaacgaagttctgtggtcctccaacatcttgtccaatttatgggcctccttttcactttcgcagtcctccctggcgtcctgcaacatctgaccaagatcatccgcaacgtcgttaccatcagcagctatttcctcctcgcccgtttgatttccttcaaatccaacaaactgagcaaagtccggaatattgtcgtcttccacttcatcttcttccatttcaacaccttgctctccgtgggatgtccaacaattatagcttggcatgaaccccgactcaaacaagtggaaatgaatagtcctggatgcagaatactccttctgattcttacacttattgcatggacaacaaataaaaccccttttcctgttagcttcggccactctcaaaaaatagtgcacgccgtcaataaactctttggaccgccggtcagcgtacatccattgccgatccatctacatgagtcaaaaaaaccgtacacaaataattattcttacaataatgacagtcatacaataattataagatatctttattcatacaaaaatcataaaatattacaccaaataattcttaaaaactatttgtaaagttttaaactaattttaatgtgttttacttcttttaattttcattttagtttgttttctattatttaagattaactttcactagagttttccttctcaactattttataaaaacttgtttagcaaatgaactaaatttctatatattctttcttccccacacacattttctctctcatcaacttacaactaaattttggagacaaaaaaagtgtgcaaaacataggtgcaaatgtagtatgacaaaaaaaaacattggaggatgaagttgcaaaccttttaggcacctccgatttgtatgtaatcaccaaaataaattcaatagaaattttggcatgacctcccctcttttttgaagtaattttgaagcttgctcgggcagctggaggaggaagaagacatatatatataggggtgggactttagtcccggttggtagcaccaaccggggctaaagatcaccgggatctttagtcccggctggtattaccaaccgggactaaagttaagatctttagtcccggttggtagcaccaaccggggctaaagatcaccgggatctttagtcctggttggtaataccaaccgggactaaagttaagatctttagtcccggttggtgttaccaaccgggtctaaagatctcgggggggcctgacaggtcctgacagcattcgaaccgggactaaagatgatctttagtcccggttggtaacacaaaccgggactaaagatcaaatatgcccgtttctcttttgaaccgggactaaagatcatctttagccccggtttttattgcatccgggactattgtggaaatcggccgaccgacgaaagatggtttctccaccagtgaaggtaagctggagttcgccgccggtgtatgtggtaagcagcagacaaaacaaatattgcatgctttaacaccccgcgccgccggcgccggcaacactgtgcttgaaatcacctggtcaccggacttcccaaggtaaattgaactcgcagctagcgccctacttgaaatgttgcatgcatttagttatattacttcgtcttctgtactccctccatattttaatatatgacgccgttgattttttgtcctatgtttgaccattcgtcttattcaaaaaatttaatgtaattatcatttattttattgtgacttaattcgtcatcaaatattctttaagcatgacataaatatttttatatttgcaaaaaaattttgaaaaaaagaatagtcaaacgttgatcgaaaaatcaacggcgtcatacattaaaatatgaagggagtatatagctagtaatattgttttttttagataatggaatataatatcccggcctttactcaaaagagctacagccaattattacatagtagtttttatgaacatagtgtaaatctaaatgaatagaacacaccgaagagaaaaataaagaaatcagcctaacataaggagatcacaattattgaagtctatttgtaaatctccaaccataattggcaaaaagttgcataaccgtggtctccaactttcagcatgcaacattcagaaactcttcatcttcatcacacctttgtagttgtgcccaaaaccggagccaatgagttgccctgaaaatgacctgcatataggaaaatgatggtgatttgtcaaaaaccatatcgttcctactcagccatattgcccaacaaatggcaaaagctccaacaagtatcagtttactcattttcttatcaactccaaaagccacccattaaaaatatgagatatgctaactggaagattaaaaccaaaagagaactgaactactctctatagaaacttcgcaaaatgacaatccataaagagatgttgaatagactcattcttcaaacaaaaagaacacctcaagctgccattccagttacgccttgccaaattatccttagttaacacaacccctttaagcaggtaccacatgaaaattttaatcttaagtggcaacttaagcttccaaatacacttgtttctctcgatatagccactattaattaaagctaggtacatagacctcaccgagaataagccattctgatggaaattccatctaaaactatcagacgaatcattcaactgaatatgtactatagaggcacacaactcatgccaacaaacaagattctgaccatctaaagctttcctgaaagaaacattaagcggaacagatcccataacagtggcaatagaagatgttttcctccgaacaattacgtacaaagatggatatttatccttaaaagctaagttaccaatccatctatcttcccaaaatctaatttgttccccatgattgacaatttaagaacccatatttaagaaagtacttttgacattcataagaccagaccaaaaatgggaatcaccttgtttcttgtcaacttgggttatagatttattatagagatatttccttttcaataaatcatgccaaaccccttcctcattaattaacttaaacaaccatttacttaaaaaatatttattttgtatctccaaattatgaatcccaagacccccctggtccttgggttgacaaacaacatcccacctagtgagcctgtattttttcttatggtcatccccttgccaaaaaaaccgcgatctataataatcaattttacgaagaacccctttcggcacctaaaaaaagatatcataaacatggctaaacttgaaagaacagaattaatcaacaccagcctaccaccaacagataaatgcttgcctttccaactactaagttttttctcaattctctcttcaataagtttccaatctttattagaaagcttcctaaaatgcatcggaattccaagatatttaaaaggaaaggtacctaacttacaaccaaaaatatcagaatattgttcataacattcctttgcctgaccaaagcaaaataattcactcttgtgaaaatttatttttaggccagataacttttcaaataccgataaaatcagtttcaaattctttgcctgttgcaagtcatgctccaaaaagatgatagtatcatctgcgtattgcaagatagacaaaccatcatcaacaagatgaggaataaccccattcaagagtcccgcctctttagccctcttaatcaatagagtaagcatgtcagctactatattaaaaagaataggagataaatgatccccttgcctaagacctttgtaagtttgaaaaccattaccaatttgatcgttaacttttataccaacatgaccaccttgaacaaaaaaaagctatccactcacaccatctagaagaaaagcctttcattctcaaagtttgttgtacaaaaggccatttaactttatcataagctttctcaaaatcaatcttaaaaattacaccacttttatctttgcgatgtaattcatgtaaagtctcatgtaaaataaccaccccttccatagtatttctcccaggaatgaacacggtttgagtaggcctaattaacttttgagcgatagctagtaatgttgtatgcgttacttacgtcgtttttggacatatggctatagcattcgtctttcacttttacagggagcgctgaattgtatagagacgatcgaggattctctgtagcgacaaccacaattgtggcttcaaggagatccaattgcatcgatccagaacatctctacacgttgatacccaactaagcgttaattagtttactcaattatttccatacaacgatctcggtgaaaaaggatatttgtgtgctactatgatctgtactatctaccatatgtgctcctacgttgtatgattcttttttttttcgagggagatctaacctatagatggttgtacgtgtggttgtacactcaaacataattattcaatccctcgaatagttgcctgttttaattatatatgtgagttgcatgtcaaagttgttatttttaatgaaaaactataattaattacggcacgggactcggatggcatatttgtgaaaccacaaagtaaaaagcttactgcaaaaaaaaaagctgaggagagcttgcgcaggaagatagcttccgccccttcaccacttgaagataggagccaacggtctactaggttccagggtgaagtgtcatgaccataacttgtactcaaccccaaaataaatactactacttcgtacttcctgtgtttcacaacccggtctcttttttcaactcacctcccttattttccacgtgcatatactctccaaactactaagggttacttttttttataaaagtttctatagaaaagttgctttaaaaattatattaatccattttcaagtttattttagttaatacttaagtaatcttatgctaatacgaactttgttttgtgtgttggccaatccctcctctcgaaaacagccttggtgtattcccatggtcttggaaccagctacgaccatccccccttttttgttagggttaatcagatccatgccattgcaacttttatggttttgaaatataccattactattcatctacttagagtaatgccatttcaattttactgttatttgaaatataccactacttaccccttcaatgtattttctaaaacttttagaccaatttacccttgtcttcttcctccgtctcctcttcttcttctccaacatatgcatcccctttcttcacccagtgatgccgaccagccggtgcactgatgctgctctctgcgcgagccccttcctgcggggcattttcacacgttgggccgtcgacgcgatgggtgacagactagagctgtgggagatatcctcgtcagcgaggaggcggaggtcgggtacgaggtgctgcagctggtgctcgaatccctcccgttgccgtgcccgtcgcaaagccaagccgtccgaggaccaaccaacgaccggctagtaacttaggccaccaatttgattccgctgcatcttaattcttctatgggaaatcaagtgctttggtggatattgatacatgcaacactgtagcaacatgacagctaattcatattgggtccttgtcctggtgattggagtagttgttggtttgacccatcgttgctgcgtatgcctagataattgggtccacagtagctgctccgcttccacatagtaggcatgctacctgctgctttgatgttcagcttagtagctgagggatctagttggtagagaagatgaacaggagagaggggagaaaggaggaagaagggtaatttggtccaaaaattctagaaattacattgaaaaggtaagtagtggcatatttcaaataactatagaattataatggcatgcctctaaattgataaatagtaatggcatatttcaaaatcgtcaaagttatagtggcatggatctaattaaccatttttgttacttccgacaacatcacgaccacctcacttgctacatgtgctccaactgccctagtgccctctcctacccactactacagaaacatgcatctatgacggatcaatgtgatccatgtcacatgacctcatctttgatgggttggacatgtttgagatacgacgaggacgacatgctacagatttaaggtcatatctgaatgacctattaaagataaaatattatctctgacaagccaatttctcataccatcacatgcacctaacatggccttcaggtctctcttctttctctctagatcgacctcatcttcccatctcgaactctctgttttcctctctcgtctatctgcctttctcccgaaagttgcatgcatccaagcgctaccaccccgtcctccaattcggagcactagccatcgtctcctccactctaagtgtgggtcaccatctcctctactgcgagcacctaccctagctatctcctccacactagagcaccctctatgccgagctgctctgatctctatatcaagtccccaaccgtctatggtgtcagttatctttgacgggtgaaataagcacccgtcacaaatatgcttcttccttgcgacctaaggttttatcacatgtgttggaggaacggggactagggtcctcagccctccggggtctttggggcaatagaggttttgaactttttgaagagatgtacaagatctacaccttctagagacccacaagatttagatcaccaaggtgccaggaagagaattgagacctacaagctctatatcaaggtgctgaggagacagctggtgacttggtgcaccctccacaggcggtgtacattgagaacttgttcatcaatgacatctttgagaagcttatccgaagtaacgagaaaagctataaatccaactaccctgggccaaattcgtgccccggacacacattgtgccataggcatgtggctgccccggggtatagcataggggtctcggggccctagcatgcatcctgctccgggctcgccttgggttcctccgcctatccaagtgggctcagacttttgaatccaaccaatatcatgatttatgttgcaagatgaaacagttggagaacaactcatctgcatataccacaaggacgtggccctgcatgcagcctcctacatgcccacgtcaaccgaaataataggaagggtgcggcatgtcgtgcccacatcaactcccatacaatatcaccttgctacctcacagggactgattggtgtaacccacggtgaccggcatgcccgctgcctccctctcccgcttcgtcccatatggttcaatcgaacctagaagatgagtgacggttattcagtaaagtctccttttcaaatggtaagaaatgataagagcaccactaatagtgattaacaaattgctctactttggagtgctctcagatgagtagctatactagtaaatggtcatgagggcactaccaagggaagtccaaccatgagattgtcacttggatctcatgaccacccattccaataacacgttccacatgttgatcactagtcgtagggtcaaactcgactgcagctctgacaatctcatcaccggaagaagaacgcaagtccaacggcatcatagctggcactgcaagcgcacgcctcgccaatgggatcaacccgtctgatcctatgtgtgggatgctgccaaagtcgctgtagaacaggacacaaccaacattgaggagcttgctgcgcgtgatgatcctcccaagaacaccggtgattgcagtggggtcgttgtgttcatctcgacggaccagcttgactgtgacctgtccttcaacggcgttggtcagcacagcgtagctcacctcagcgggaccatacccagtgttgactgtctcgattatggtactgttgtagttgttgaagagaccgttgcaggtattgtatattacctccacctcattctcattgttatcctcttcttggctaccgtcatggagacaaagggtaaagatgatgggggcatatgctgaggtggcaaacgatggaccagttagcatgatgttgccctgttttgggagaaaaaaaatccaattgaaactagcatagacattatttggaagcatgaattttgcaagattttcataaaaatatattgaatcccacaaaaataattttaagagtgaaaatttcaaactggactccttacgaagttcaatgttacaccaccatttagcccatatttttatttttgcctttttttatacattttttgtttcagtttggactccttttttttccacatcctcaagattactctccgtgtaccaccgtaaactgtgtaaaatcaaaggtgtttttgattattattctgtgatgaacaattggcattggagattattggttttgatatttggaatttattcacgaagtggttttggagatgattggatttataggtgaatcgcaggttctgttatttcatgtgaccggtcagatcgtgcagtcagaccggcccagcccgcggtctgactggccgacgctgtgttggtttcagtttcgggttgtttgtttggatatccgtgattatttcatgattatggcttctagatggatactatacgattgtttgctactaatgagtcaagttgtgatagcttggtctcggaatatggtttctttgtttatttcatgtgtaggtgactcgatgcctcgggagagtatttgcggtgacggaccggaagttggcttggggataagatgacgtccgtggtggtcagagatcatgcgggatatttaggctagagttgatgcacgtggttgatggagattccatatggcatacgatggagttattgtgtgcgtatgggatgcggagtcgaatttggaaggagtccaaatttggtatgagtggttatgtaaagtttgtttcttgtactagagggtttcctaaggtgtttaggactcctagtatgagtttggttcgtggttttaggctgcctacctcgggtataaatagagggggagcatgatgcttcccggtatcgtttttgagagcaattgagttgagttttgagttagagtttcgagtttagtcaaaatttctgtagggaatgctgttggtgcactttgtaaacacagagagaatcaataaagtcgtcaactactttaagagttcttcgatttgtgtttcaccgggtttcggcggtctaaccggcgatataccggcggtcagaccggcggcaagcagcagtcagaacggcggtggcgaggcggtcagaccggcggcggcgacagcgagcggcagctgatcttggtggtcagactggagatctaatctcggttagactgacggcaccacttggtcagaccgacagatcaatctcggtcagaccaacttccgtcgattttgagggtaacttttatttccgctaaaagttttcggtttttgggtataccaaccattcaccccccctctggttggcttagttattgtgattcgatcctacaagtggtatcagagccttgtttcttctttagatttttatcgatctagagtttttgccatggctactcctgttaggttttcaactaagcctcatgttttcaatggaacggatttttctcattggtatagtaggatgcaatcttacattatggctgaagtttatgatatttgaagaaaagtttctcatccttatgtgattcctgaagctattaatactgctgctgaaaaatttgtttttgaacaaaattgcaaagctcgcaacattcttttgagtggtatttctcgttcggattatgatcgtgttgcgcattttcgaactgctcatgaaatttggaatgctttgaataactttcatcaaggaacaaaaaacattaaagaacttcgtcgtgatattttcaaaaaggagtacattaaatttgagatgaaacctggagaagctttggatgactatctttctaggtttaataaaattttgagtgatcttagatctgttgattcttcttatgatgctaattatccacaatctgagatttctcgtcactttttgaatggtcttgatatgtctatttgggagatgaaagttacatctattcaggaatctgttaacatgtctactttgactttggagaagaccaacaacatcaagccaaagggttcatcccaagggaggaagctggagaatctcaggaaggctttttaacaagtttgcgccgccttcgagccactaagtgatgtagatggtgagagtggagatgatgacaagggaaagaacatctccggtgtttgtttcatggcgcgtggtgaatcggatacagagtatgaagataatgaggtaagtgcttttgaggaagctattaatattttgagtgcaaaaaataagaagtgtgagaagatgtatagaaaacaggaatttatcattgaatctcttaaatctgaaattgataggttaaaatctcttattcctaatgatgatgattgctcaaattgtgtggttttaatgaatgagatttcaaaaattaaagatgttaatgctgcacatgatttgaaaaatagatcttctcttgcttgtagttttgccttgcatacacgcactttggatgagttgtttttaactaaaaagttgttgcaaaaatatcaaattgcttttcatgctagtttgatgtttaacatgatttttgctaagaagttaaaacaacctcatgatgttttggattgctcaacatgtaatttgaataagttgaaattgaaagatgctttaggtcgtgtcgagttcatggaagatgttgtgaaaaacaatgaagtgctttcttgccctaaatgtcgtaaaagcaaaggtgtcatggtagattgtgaaaattgtgctaatttggaaaaagagttttcttgtttgaaaaattatttgctaagattttctgatggtaaaaagaacctcaacatgattttggatgaatcaaagattagcacacataaccatggtttaggttttaatccttatgctcataattctagacatcctcctgttgtgttaggtgttggtgctagaagtggtgagattttggttaaacctgatactaacaaaactgtgtttaaatctgctggtatcatgtttaccttgaatgcatcttcttcaaaatccaatgttgtgcatgcaaaatctcctgttgttgctggtattgctaaatcttctaatgctaccaatgtgtctaatcatcgtgaaaaatatacttgttctttttgtggaaaagatggacatattgttggtttttgtttcagattagctcacaaacagaaaaaggagagagagattgcttttgcaaaattaaagtggcaaaaatcgggttttccctcgaggaaacaggtcagatcgcagtgtgtcccgcggtcagaccggcgaccggtcagaccggtactgagcgttggtcagaccgggcaccggtcagaccggtggtacagaagcggtcagaccggcccccggtcagaccggccactatacctcggtcaaaccggcctcggaggaatttttctgaaaattctcaaattgattttgcacatggatatatgcctattggatctactggtcatgtgtctcagtactggattcctaaatttttattatcttctaaccccagtactgaggcttcgacttctgcttgtgtgtaggctttggtggcaaggaaggaaaacgtgtggatcgtggattccggttgttcgcggcacatgaccggtgataaaaattggttctcctcacttcagaaggcatcaaagactgaattgatcatctttggtgatgcctctacaagtgccattctcgctacaggtttggttaaggtaaatgaaaaatttgaattgaagaatgtagctttggttgagaacttaaagtacaatttgctttcggtttcacaaattgttgatgaaaattttgaggttcactttaagaaaactggaagtaaagttttcgattcttgtggtgattctgtgttgaatatttctcgctatggaagagtatttaaaactgattttgaaaatcctgtttcacctgtgataacatgtttggttgctaagtttgataaagatgtgatgttttggcatcgtagacttggacatgtttgttttgatcatctcactaggttaagtggtttggatcttgttcgtggtttgcctaaacttaagaaagatcttgatttggtttgtacaccggtcgtcatgtaagatgtttgcttcttcacatgctcctactgtttctgtgataatggatgcaccaggacaactattacatatggacactgttggtccagctagagtgcaatctgttggaggaaagtggtatgtgttggttattgttgacgatttttctagatactcttgggttttctttatggcaactaaggacgaagcttttcaatactttcgtggtttgtttcttcgattgaatcttgaatttcctggttctttgaaaagaattcgaagtgataatggtggtgagtttaaaaatgtttcttttgaacaatttcgcaccgaaaaaggtcttgaacacgaattttcttctccacgtgttcctcaacaaaacggtgttgttgaaaggaaaaaccgtgttttggttgagatggctagaacgatgttggatgaatataaaactcctaaaaaattttgggctgaggctattaacgttgcttgttatatttcaaaccgggttttcttgagatctaaacttggaaaaaattcttatgaacttcgatttggacatcaacccaaagtttcacatttgcgtgtttttggttgcaagtactttttcttgaaatctggaaatttggataagtttgaggcacgttctaccgatggattgtttcttggttaccccgcacatattcgtggctatcatgtacttattttggagactaacaaaatcattgagatttgcgaagttttttttgatgaggctagtccaggaactagacccgatattgcaggtacacagtcacaggttcagggggaggatggtcgtatttttgaagacgagagcgacgacaacgacgacgacgaggtcggctcggccggtcagaccgggcgtcaggccagtcagaccgccggcaaaactccggtcagaccgcctcaggaggagcggtcagaccggccagggacgtcgggttcaggtactgttgatgctgatcgagatggtcctccagagattactacttcgaccagtactgatacagaacgtggatcaacttcagaagtcgctgctcctttgcacattcaacgacaacatccgccggaacaaattattggtaatataggtgagcggactacaaggtctaaggtaacaactcatgatgtttgtgcaaattctgcatttgttgctttttttgaacccaaagatgtgtcacatgcattaactgatgaatcgtggattaacgccatgcatgaagaacgtgaaaattttgagagaaacaaagtttggactttagttgaaccaccttctagacataatattattggaaccaagtgtgttttcaaagataaacaaaatgaggatggtttaattgtgagaaataaatctagatttgttgctcaaggttttactcaggtggagggtttggattttgatgaaacttttgttcctgttgctagaattgaggcaattagacttttgttggcttttgctgcttcaaaaggttttaaattgtatcaaatggatgtgaaaagtgcttttctaaatggttttatacaggaggaagtttatgtcaaacaaccaccaggttttgaaaatcctgatttttccaaccatgttttcaaattgtctaaagctttgtatggcttgaaacaagctcctagagcatggtatgatagacttaagaactttttgcttgtgaaaggttttacaatgggaaaggttgacaaaacgctttttgttcttaagcatggtgataatcaactttttgttcagatttatgtggatgatattatctttggttgttcaactcacgctttggttgtagagtttgctgagactatgcgcagggaatttgagatgagcatgatgagtgagttatcgtactttttgggattgcaaattaagcaaacatctcaaggtacatttgtgcatcaaacgaagtatacgaaggatcttttgaggcggttcaagatggagaattgcaagccaatttcaacaccaattggttctacagctgtattggatcctgatgaagatggtgaagctgttgatcaaaaggaatatagaagtatgattggatctttgttgtatctaactgcttctaggccagacatacaatttgttgtgtgtttgtgtgcacgctttcaagcttctcctcgtgcttcacatcgtcaagcggtcaagcgaataatgaggtatttgaatcatacacttcaatttggaatttggtattctacttcttcttctatatgcttaagtggatattctgatgctgattttgggggttgtagaattgataggaaaaatactagtggaacatgtcatttcttggtacatcattgattgcatggtcttctaggaaacaatctagtgttgctcaatcaactgctgaatctgaatatgttgttgctgctagttgttgttcacagattctttggcttttatctactttgaaagattatggtcttacttttgagaaagtacctctcttttgtgataatacaagtgctattaactttgctaagaatcctgttcaacattcacacacaaagcacattgatattcgttttcactttttgagggatcatgttgagaaaggagatgttgaattgcagtttttggacacaaagttgtaacttgctgatattttcactaaacttttcgattctaatcgttttgcttttcttcgtggtgaattgggaataattcatccttttggcatggtttgagggggagtttgtacctcatggttttatcaagcaataatatgacaatgagaaaaattgagaaaatagagctttgtttatgcatatggtattttcttgtgcatgctaacaatattttgaaggtttatttgtctctagcatagcttgtatgtattctagtcttttcatgagatttagattttgcttttaagggcgatgatgcatggcacttaaattctatacttgaattaagtaaatatgcaatgttgatgctagcatatggtttgatttataaatgctctatatatatgctttattgaattgttattcctcaaatagctttaattgctcattgtgaaaaagagaataaaaaatataaaaaaaatgaataccgaatcctcggaaacagtcttgatgacaaggacgtattcgatgtgagcaaaataataggtgccgaatccctggaaacagtcttgatgacagggacgtacccggaataaaagagaaaaatataagcaaaaaggctcaagaaaagaaaaagttcaaaaattctctttgttgttttgtgctaaaggttatttgagaaagagtgataaatgcaataggtatatgtgtttagtgtttat

SEQ ID NO: 6468 - DNA, 4582 bp, Oryza sativa
gttcatcaaccttccttgccacttcctcttgcatgttgagttcgtagctcgatacccggaactctaggtctgcaatcttcgccttggtatctctcttgctcctcatccgactcctgtacgtgtggatgtcctccttgaaaccaatcttccaaggaatcacccctttccctcgtgttcgtcctggatgctctggagtctgcagggcgagtgtcagctcgtccctatctctgtcgggtcggaacgtgccctgagaggaggcttccactgcatctgttagtcgtcgcgcagcctctcgtatctgaacgccgaagaccagtgagccatcagctgggttgagcgttccaccgtgagcatagtaccagaacttcgatcgttccggccaattggctgttgccggttcgatacccctctcaatcaagctagcctccatctcctcccacttcggcatcgcgacgctatagcctcctgaccccaagtggtgatgatacttcttcttgttggcattttctttgtttctttccatcatcgcctgcccttgttcacctgtcttatatgcaacgaactcgtcccagtgatcccttagctttgggaatgtgtcgaagttcggtgtctgccccttcagtatatacttctggtacagatctcccttgaagctctgaaactgttctgccattttcttcagagtccaccttttcactttgtcctctgtacccgcaggaagggtgaatgtctcgagcattgtggtccacagcatctctttctccgaatctgggacaaagctctcatgatctccgcgtgcccttgttcttcgccagtacaccgtactgacaggcacgttatcccgcacaacccaatcactgtgacgtacatagttcttggcggcttcggccggggcactaggacgtccatcttcttccacttccgttatgatgtgccgaccctcaagcttcttcgctgcacctcgttgcccgcgtgccctcttctgtccaacggagggttgactaccactagcctcctcctcctggttcccctccacatccctttccacgtgcccctgctggttcccctccgcatccctctccacgttcccttcctcgttcaagtactggtttggatcctcgttcccctcttcttcattccagtactggctgcttccctccgcgattgtatcgtacaatatctgttcctcatcgcggtcagccatctgttgatacaagaaacatctgctaagtcacgagacatttatgttttaacaatctaagtcatgtatgctaagtgtaaatgtcgtacattagaaccctacacaaccttacgtgctaagtctaattacaaatcgtgatataagctaagtctaggtgacgtatattatacaaccctagctagtaaataattatatactaagtctaattacaaataaagtaatcttatattaaaactcaaataatattacatgctaagactaaaatagtcatgtatgctaagtgtttcgtgcgtatatgctaagtctaattaagactacaatagtcaattgttacttgtcgcaccacttccgtagtcaataattacatactaagtctaattacaaataaagtaatcttatattaaaactcaaataatattacatgctaagactaaaatagtcatgtatgctaagtgtttcgtgcgtatatgctaagtctaattaagactacaatagtcaattgctacttgtcgcaccacttccgtagtcaataattacatactaagtctaattacaaataaagtaatcttatattaaaacacaaataatattagaacactacacaatcttatatgataagtctaattacaggtctaataatcttaattaattgcattacaaatataacaatcatttatattactacgtcacttgcctgctccaattccttctagggctagctcttccactcaggcttgacggacgactccgacaacacgtcttttctgcaagatacaaaaagatgtattaggataaatgcgaagtaacatatacatacatacatatatatatatatgtatatatatatatatatgtatatatatatatacatgtatacatatatacatatatatatatatatatatacatgtatacatatatatatatacatatatatatatatatattgcatttcacgttaacgttcgtcctcgttcgttcgctcgttctcgttcacgttcgttcgcttgttctcattcacgttcgttccctcgttctcacttgtcttcgttcgatcgttctcgttctcgctctcgttcgttcgatcgttctcgttctccgttcacgttctcgcggcaacgtacgttgacgtgtccgttctcgctctcgttcgttcgatcgttctcgttctcgttcgttaacggcggtgtggcggcatcggggcggcggttggcgcggcggcgtggcgacggcggcggcagcgtggcgttgcggggccgtggcggcggcggcgtggcgtggcggcggcggcttggcgtggcggcgacggcgtggcgtggcgacggcggcttggcgcggcgtcggcgtggcgcgtcgtcgtcgtggcgtgtcgtctcgtggcgggcggcgcgacggagagagatcgagacggagagatcgagataaagggagatctggcggcggcggctctcaccctagagatgcggcggcagcggaggaggcggaggcggcggcgaggacgacgagctcgagacgacggcgagatacggcggcgtcgacgcggggatttgccctaggaagtggcggcgaaggagagaggccgagagagatcgatcggccgaaaacgtctaagtgttggtgaagaagacgagggcgcaccgggaatatatatacccccggatctttactcccggttgttctcaacaaccgggagtaaatatcttttcccgctatttcaaaattctttttaaacccggttagggttaagaaccgggactaaagattacagcactgcatatgattttcgcttacatatgtgtttataaaatagaagttaatgcattaacattatttaaagtacaaagattaatgacaattacttcgaaaaattatttttggctgtaataaattaagtggataaatcgtaataagcaaatataattaataaaaattccaataatcatatatacttagcatatatatgaatgatattattatattggtaaaaactctaattaagatatgtatgtacatactgcatgatttaaaattaataaaaattgtaatcatcatatgtacttagcgtaggaattatattaaattaaatgctaaaaactctaattaacatatgtaaatgccacatgcatgattttaaccttttaaaaattcgaatagtcatatataagtagcatatgaaagatagtaaattaaattatgaaaaactctaatatatgaatgatagttttaaaaatatattaaatttaatacttttaaaaattctccagtcaattataattagcatatgaatgatagtaaattaaatgttaaaaactctaattaacatatgaaattgccacttgcgtgatttaaaacttttaaaaatcctctagtcaattataattagcatatgaatgctagtaaattaaatgttaaaaactctaattaacatacatatgaaattgccacctgtgtgatttaaaacttttaaaaattgtaagtatcacatataactagcatatacatgatttaaacttgttgaaacctctaataatcgtgcgtaattaacatatgccatacatcaattgatttatatggataatcaatacatccaaaatagtttacatcgtgtacacaataattacggcattacatcggcggtggcggttgaccgcacgtactttctcctcactattgttccctccttgtgatcgctgcgtgagtaaggggtgtcttcatttgataggaggatgctagggtcaatcgtcaccgtgaaagggggttgcccatccaactgatcgtaatcctcgtcagtcttgtcctcaactccgacgatttttcttttgcctgggagaaccacttgacgcttaggctcatcaggccctctgcccttctttcctttgctagacatgtccttcacgaaaaagacttgcgttacatcattggcaaggacaaaaggttcgtccgagtatccaaccttgttaaggtcaacagttgtcatcccactgtcatcaatcattacgcctccaccagtcaacctaacccattggcaccggaacagaggaaccttgagaggaccatagtcaagttcccatatgtcctcgatggcaccgtaatacgtggcagttgttccatcgtgtcccatggcatcgacacgaacagcgctgttttggttcgtgctcttcatgtcttgggctctcgtgtagaatgtgtacccattgatctcatatccctggaatgtcgcgatcgacccagacggtcccctcgccaggaaggcaagttgttggttgatcgactcgttacccatgagatgttgtcgtagccacgcggggaaagtatcaatgtgatgccgtgtaatccatgcatcccacttaccgatgttcctggcgcgaactagagccaagt

SEQ ID NO: 6469 - DNA, 15213 bp, Oryza sativa
tgcggcagcgaaggtgggggtggcggcttcgccgggatctgccatccgcctcctctcctccctctccgccgccgcctcccttcccatacccctcctccgccacctcatccccacgtatgacggtggctgcctcctcctcctccctcagcaccatgaccactactagatagtggcatcaagatggtacacctattctacaaaagacagtgacacgtgtgccccgtgtactaactcgtccagtcaacagggtcaaagacgccacgtcatatgaaactgcctcccaaaccgcccaaggagtcgattgcaaactgttttgttagttggaggactgagttatacccggttttgaggttgagggatgcgattcaaacaggggcatgagttgagggaagaaaagtagacttattcaaacgggccttagtactctagtcaagtaccgcgccatgctcgatccaaacttgaggtaaagcccaaattggatcgtagccatgggttgggctcagaattttatgggccgaatctgagtcgtaccaacccgaatttttaggtgagagatgccactgaataggcccccggttttttacgctttcctcagaaagcaaaatccgcattcgactgagggttacgtaaacaaagtcccattgggggatccgccatctcaggtgaggaggcgggtagtttcctagatcaatcagcttgctcggtagtttcccagatcagatcctggtacctgcacaggcactgcaccattcctgacgttgctgctagctcttcctcattcagtgaccactttattagcagtaattcaacttactgtttcagcagatgagcaacacagtgccaggacaaaatgattactgcattttgatgtacatctacaggcaaaatcacaaatgggagagcacctgcaaaggtgtgtaaagttttgacgtgtcatcgggtattatatagggtgttcagacacttataaaaaactaattacaaaatccgtcagtaaaccgtgagacagatttattaagcctaattaatccatcattagcaaatatttactgcagcactacattgtcaaattatggagcaattagacttaaaagattcgtctcacaaattaatcgcaattgtattttttagcctttttttaatactttatacaaatgtttaaatattcaatgtgactgggtgaaaaaaaatttagggtgggatctaaacagggcctaaaaaacaaaaggccgacttaaaaccagtttagatgacagggtgagctgcactgttgcagccagcaatggtcatggtcccagtgccaggcaaagttaaataatgaacagcccatgttcttcaggcacaggctgggcacaacccatgttcctgaattgatgcactcagtacatggcaccagcaatgcaacctttttacagtaccgaaggaaccaaaccagcataacatttctgcggctcaagtgttgattgtgaccatgaattaccctcaaaagaactatagtacattacgaccagtaaatagataaagcattcgtgtattaacactcatggatcagcagcaatgggagaactatcagtaatgtggcccagaggagaattatcatgccatagattgcaataaataataaccaaaaaccatcaatcaaacgatcaaagaaccagatcacttatcttggagatgaatgtacaagataaatgataacatgactcgcacaagtacgattacaatagacgatcctaggtagtgggtacatctcccatttttcttttggtcctaccactaaccacaaacttagcatgacaaaagttggaccatgcatgccatgtataatacagcagccaccggacaaatgcataccaagagttcagaaggtgcataatattcagccatgaaacaaatccaacaacattctgataggacaccaacaatcccaaacagagtagcttacatgacaagggcttgtgaaaactgaaaagaaactgccttgtagataagcgattaaaaagccagagcttagaagcacttccggtgaacaattgctggacccgactcatcatactctccctttgagatccacatctgtagcatagatgccaaaagaatgatgttaacagaaagcagaaatacctgcattcttgctacctcataaagtgtaggcgtaaggtttacctgttggaaggtgctaagggaggcaaggatggaccctcctatccagacactgtatttcctctcaggcggtgccaccaccttgatcttcatgctgcttggtgcgagggcagtgatctccttgctcatacggtcagcaataccagggaacatggttgatccaccactgagaacaatgttaccatacaagtccttcctgatatccacatcacacttcatgatggaattgtaagtggtctcatggattccaggagcttccataccgatgaaagagggctggaagaggacctcagggcatcggaacctctctgccccaatggtgatcacctgtccatcaggcagctcatagctcttctccacagatgagctgctctttgcagcctccagctcctgctcatagtcaagggccacatatgcaagcttctccttgatgtcccttacaatttcccgttcagcagtggtagtgaaggagtaacctctctcagtaagaatcttcatcaagctgtcagtgaggtcacgcccagcaaggtccagacgcaggatggcatgaggaagggcatatccttcatagattggcacggtgtggctgacaccatcaccagagtccaacacgatacctgcatcaagagcaacagttcatgaataaagtgaatattttttaaaactctcaaccatgtgagtgagttattaccagttgtacgtccactggcatacagggagagcacggcctggatggcgacatacatagctggcacattgaaagtctcaaacatgatctgggtcatcttctccctgttagccttggggttgagcggggcctcagtcagcaacacagggtgctcctcgggcgcgacacggagctcgttgtagaaggtgtgatgccagatcttctccatgtcatcccagttgctaacaataccatgctcgatcgggtacttcaaggtgaggatacctctcttggactgcgcctcatcaccaacataggcatccttctgccccataccaaccatcacaccggtgtgacgggggcgccccacgatactagggaaaacagccctgggcgcatcgtccccagcaaacccagcctgccagcaattcgcaagaaaagtaaagtatacgattaaatcacataaacatggggataactgctacaaagaaatactacgaatgagcaccacgaaccttgaccatgccagttccattgtcacacacaaggggctggatgtcctcgccgtcagccatttcctcctactggttctgaattcctgacgcaaaaacagaacaacaggcatgcgccgcaacacgtcacgaaatggccattttccaacagaaactagacgcaaaccctccaggaaatcaaaatctcaaaagatcaactgctaatatttggcacatcaaaacttgcagcgaacagaaaacaaaacagaatatgcaaaactacatatcgatagtccgacacaccgagatctagaacttgtagagcaaaaagagtacgcgataatcaaccgcgcacaaagaatcaagcactaaaccgtgatgcaaggcaaactcaggtggcggatctagacgtggagcatgtgattcagttccaccccccacaaacattttttgcgcgcggggaaaaaaacacaaacaaacaaactgctaccagcatcaaggtttaataaggcgaatgaagcgaaaagtatccagatctagaacagtgaacagaagctacgagtacgtgcgtgcgtgcgtggggagggagagatgaggaagaggacacgcagatggatgctcaccggggatgcggccggaggagggaggacggtggcggcggcgcggcgggacggggagatcggcggcggaggcggtggcggcggtgaactccgagtcgcgaggaggcgagagtggagtcgacgcggagtcgagggggggagggggaggggtagataagagaagagaggggggttcctcgactagggccacacaatcattttttggacacaattaagcgcgctctgatttttcttttttcacttcttgggtacggttacgctctgaatctgagaactgagaagttggcgcctgtctgtcccaaaacaaaaataggaccctctatggctctatgggtttgtctatactgaatcccgcttccaaaatttaaagtttaaggtttgctttcaggttctttttcatctaagtttatcttttacattcaattttaaatcgctaagaatacatacataaaaaatttacctataaattattttttctctaatacgttgtacggcatttggcaaaaaaaagaaaaaaaaaaggaggagcctacgagttctcctaacacgatctctcatcaacttcggttatgtcgagctgaaaaacaaactagatggtagtatttcttttcacagtccagcatggattgaaataggagcacctatgaaaattttcatacaagcatgatgaagaagacgtcatctttatccacatatttggtcaatgaccattttcacgagcgtaggcaggtagtagagtgctcgtcaagggtgctagtgcatacctcaaggtgattataaccggttcatcacctataatatctcgacatggtagagcatgtaacttatttgctatacaagtaaaccacttaaaatgtactaatataacttagttttataatgcaaacaaaaatttattctttacaagaacacaatttaaaattaaaaatgtgtctctatattcttcctttgtgccttattttacttgttttttctcactcctcttccataattatattgttagcctagttgacagctaggtcgtatgccagtgttttgtaatatatatgatcggttctttttacatgagttagtagtaatattgtacttgtacatatagtctacatgcatccatccatatgcttttttaaaaataatctgagagatttttttaaatataatccagtatgatttgaggtaacgatatatgtgtaatttacacctttttatatttaagaaaagaaaaaccatgttaggcctcgtttggatcacattaattttcttcaatttcgtgcatgaattgattttcttcataatgctgataaatttgtttccaaacaaatcttggtaatcaatgctttttcaaaaggatatattatccttccatttgaacatttcttcatagaaaaagaaaaccatggtgtccgggctcttaactaattatcgcgttaacggtgcacatacattaacacacacgggcaatacggattaaaggtgcgattagtgcgctaatcaagtgggatcagcacaattaacctaagctaggcatggcagcaacacagccaggaacagctgttgcctgcgctgtcgtctgcctgactgatgatatgatccgatgggatcttgattttggggaaggatggaagaatttcaggctattttagtacacccccatgtgtgcctgaaaagctgcttgctgttcttgcgctgtttgatcaactcgctttattaattttgttcctcccccccagctgtgttgatcatgaccacatgtgggcaacccctggaaagaaaagcaagtaaagcttaattgggttggaatcataatcagttcatcaatcagagaactcaatgtattgtagttttgcttgctagatcatggcgacagagaaaaacattccatagtgaaattctaaaattttgggtgttttttttctaataatacgtgctaagtgttacgtaaaaagagattggtcatctggcaaacctatggctgcggctgctgcagtccactccttgcctcactgttggtgctggctgcactgccgtagtctcaagcaactaaacaactctaaacatttcacaaaacctttgcatctatagaaattcttattatttcgggttgtcttcaccaacaccgccttgaacttatgtgtgtttaataatataaaattaaccgtaaagttttttcttttattgtctaatttctagacaatattcaaccaaatgttagaagacatgcaatttgatgaaaaaggatgggtttctgtgtgatattatggctaaaatatgaggccccggttattccgcaatcgattttgctatacatcactcgggtgattctttacctgatatttgacgttttttctggccgctactatctccagggttggggtgggggcccatacggccaggataaagcattgcatgcagcaactccagtgggatcattagacgtgcgatttttttttctctcatttgttgttttttcgcgctgctctctatccttctctctcatttgaaactaaaataaaaataaaatacaaaattacagtcctatataactaaaattacatttgtaaattcagttgatacgatatgtaagtgcgctgtaattttgataacaatgatgtgtcagtaaatatgtatttgttattttctttaaaatataaaattacagtcctatataactaaaattacatttgtaaattcagttgatatgagatgtaagtgcactgtaattttgataaaaatattgcgtaagtatatatatatatatatgtgtgtgtgtgtgtatatatgtatgtatgtatgtatgtatgtatgtatgtatgtatgtatgtatgtatgtatatatatatatatatatatatatatatatatatatatatatatatatatatatatatatatatatatatatatatatatatatgtgtgtgtgtgtgtgtgtgtgtgtgtgtgtatatatatatatataaaattttcttttgtagtccgttggatgtaaatctaagggtagaaaaatctggatgatttcttgttaaaaatcacccgacaaatggatagacagtcccccaagtagacgtctacttattcattacatgtctcatccatagagctatgaaaaaaatttaattagaagttgacaagatatattaatttataacataatatatatatatatatatatatatatatatatatatatatatatatatatatatatatatatatatatatatatatataaacatgtaatttcaaattttgcttgtacaaattataacaaaagtaacattttttttaattcctctatgatttcggctagacgtgcattctgcatatagtccctcaccacagcacgagtagtcgtctcgtgtgtatgatgtatctgggtgtgccttcattgtggcacaacaaaagtaacaattttaatttacctgtcaatattcgtatactaattactccctccgtttcaggttataaaatgttttgattttgatcaaagttaaactgttttaagtttgatcaagtttatagaaaaaatagtaatattataaatttattataaaattatatttaattattaatttaataaaactaattttggtaatgtaaatattactatatttgtttataaacttagtcaaatttgaagcagttcaactttgaccaaagtcaaaacattttataacgtggaacggagggagtataacttatggacaatgaatttgaacttgcatgcttatatattgatatattttatcattgtttttaatttttttttattgatatgcaatagacaagtagatgtccatctagttgattagaagagtttgcttgataaggagtaactatatgatattcaatcaggggcggagctagaacaaaataaaggggttccactcgcttgttttagtctggtttgaatcaaatttagcttgatacgggtgcctaagtttaaactaacggggtatatatatagtgaaaatagataaattgtagctaaatttttttttgaatcaggttactgggcacccccctagctatacatagctccgccctgtattcgatagttgttttttatgaaaactactccctccatctacttttaatagtcatatttcaccttgacacacagaccaagaataagtaattctacttatcatccatttaaacatgctactagttattcctcgtaaacaagcgattcattaatatttacatttctcaatacccatgtaaccaatcatgtgtggtagaatggagagtcacgcattaaattcgagaaagtcattaagatgatgggtcgttggattgaaatatgactatcaaaaataaaattttcagatttggaaatatgactatcaaaagtagatggagggagtattatataaaaaaaatatctatagtataattagtttcatgctggacttgcaaacgtcgtgagcctccaactgaggttgggagtgctaattttttttttctctcttcgcatgattggcatgaatctctaagcaatttaacggtcacaaatccaattctccacatgtgtgctactgagtattttttgggagtagctatatttatggcgccatatttttcacgaaaaaatagtcggcatgtatttacattgtaacttcctaaattacatatgtaattttagtgtatttacaatataagtctcaaaattacatatgtaagtcttaaaattacatatgtaaatcctaaatttacgtactaattacatatgtaaatggtatgtaagtagggtgtaactactatataaatcagtataaatgtaattattaattttacgacggaggtgaagtgctaatgaggttggagcttgattaggtgcagttggttcattcgcataagctgtacgatgggtgcaggtgcttgaaacgaatctcatcggcggatcttacggttaaaacatccgactgtaaattgccctaaaatatgtcgacacaaatttagcaaaaccttatttttttttctctgcataaatctcaatacaatttaacaaaacttagatgtgtacgtagagaaattacaatgcaactatgatataattgcaatgtatcgaagatgtaattacaatataactatatatatatattataatttttttctggaactacattattaattataatgtaattagtctaatcaccttgtagtaccatattttaatagcacattctctgaaatatagtaaactctcgcagaacacatgcatgtaaaatccaaaatatggttgtcacgataaaacaagaaacccagcgtcctagcccatgatatttttttttgacacgaacccatgatatattgacacacattgaactgttttgtcttgaaaaaactgtcgccacaaatcagcaaatcccttgtttttttactactattccgttttggtttgagttacgtgtcgccgaacgaacttttttcgtttttagattttttttaatatttacagaaataatctatcggcgaacaaaattgcaaaaatagaccctgccgcccaccattggggcggcaagctggcgtggcagacggtgggtcgaccgcgccgtctgccgccgtcggccaaaattacgattaggcccttgccgcctatacagagggcggcaagggacccagatgtaaaaagtacggccaaaagatttttctatgcaatgttaataataaataaagaagtatttgttggtaaaacttgttaatattgttataaaaatgtattgaagttggttgttgcgcaatttcatatgttaagtgaggtattattttgtaccttattcgacgtattagtactcggataattaatataggcctatcgcagtctcggtcgtagaaacattatatggacttaaacaaggagaattatgtaacatgaagaaatagtagtacaatttgaacatgatacaactatttccattgcggttacatagatgatattagatttgaactaggagggaggtagtgcaatagttgaacacaacgacgatatagtaatgggacaaggaagcatgacagcagaaatttcaatatgccaagttgtccgataatagctaacccctacgtgaggatccctctcctctctcaaaccgcgctttagtaaccctgtattgctctggtagttcaagctgcacaacacggctaggtagagttagaacccttctggtgtctatccattctctgtattgacatctcattggtggttcctaggaggaaataatagatgtaaagcgagctaagttagtaaatgttgtgagaaaataaggattcatgtaatcaaaatattcttaccatgaaatcgtcgtccagaatatttggacaaacaaagaaccttcgacccaatgttgtaggatttatggaacgaagaacctgacaacgatcaccacacctgcatcttggacgggcttcccatggagggagtgccgtagttagcacccgccagtcgctctgttgttcacgacattgtcgttcataagccgcttttctctgtaagtattgctcagtactttcggatgcgaaataccagcgactttcttgtaaacaagtggttaggtcgaggacgggattttctgtatcgacccactcgatgtatgcgcaagccgtagtgcgggtctgccgaatagagtagtgttacgaagaataaagcgattgcctatacggaataaatgagcatatgcagataataaaataccccacggtcatagttagggcacctaaaaaagcgccttcctcgaatatcaggattcctcgaagccattagttggcatcgatcaccgcataggcagagaggacgctggcaccaaggtggtagtaggtatacacaaggatcgctgcgccagtttggatcctcaacaccccggcgtctaaccattgacgaaagccggtaggatttgtaatgaagaagtggggaagagagtactgaatgtgattgagttctgaaagattgtgaggcctcactcgttaaggcgacttatataggcgcaattcatcgagtgatatccttgacatgtgaacgtggtggggcatggtgggtacgcctgattggcgccgaaagttgcatgcttgatcggcgccgaaagttacattggtcgtatgcggcaaatggcgggcaaatactcgtatcgcacgcgaataaaggaggctgcatcggtgcggcagaaagtagtcgtgcatgcgccgaaaggtatcgtgcatgcgccgaaagatatcgtgcacatataacaacaacgtagtcattacacaagcatacaatactgaaaagtgaagcaagtaaacaaagagaagactgctctactgcccctgccccgcgccgcgaccacgcttggtcctccgggcctgtgctcgcacgtggtcctgggagtaggtgaaacgatccggtggcacagcacgggtagcacgagtgtctggcggaggagtggcctgcgcctggtcctgcgtctgcaccggcggtgcgcctcccagctgtgaggggccgatgacgtcctctgccgagcctgaagcgaagtcgaagtcagtgatgtcgaagagcacggtggaagacagcaagcagtccgacgaggtcccagcatggtccagtggtggaccctgactcgacgtgccggctgcctgtgacgaagtcccggtgtactgctggaactgcgctgagtgcgaggtcgacgcagctgcctgagacgctgaccctgcagcctgggagaagtgggcggcctgcgtcatagcgaactgggcgaaacctacacatcgacaacgggaccttgtaagctaggacataaaatgcatgtaaattgattgtcgaagtaatgttgtttttttaagtacttgtggggggcacaccagaaggcctagccgaggaaggcggggtgctgaacggtgcacgaaaccctgaatcaatcggcaagtgaaacggctcacatatatgtgcgagacatgtacagaaaaatccttaaaaatacttacctctgtgcggagggggagtcggcctaggaacgtgcgcagctggacggggaccagtcggtacgggtggccgctgtacagctgtgtctgcccgagcaacgtcgtctgcacgacaggtgagcactcggagaatcgactccaccatccgcgtgtacgtcgtccggtgttcctctacgggtaccggaatccccgcgtctaaacgttggctcgtcgttgaaccgtcaacgacgacccggttgatgtcgtccacctgcatggttattttgttcatacatattcgtaaaatttgacgatgagaaagacatgaaaacataaaggaatggtgcgatgcatgggtactcacacaacgagcgaagtcctggtcgcggtgcctggcgtagaggtctctagtgctcgcaatgtggggctgttgctccaagggagcgaaggtgaccctagtacgggtgcgtggctggtaccagcgtaggtaggcctagtacgcctcctcagtgtgtggctctccctcgtggtccacgacctccttggttgcgagcaaccagttctcaacaaaagtcgccaacttggcgggccagtcgccagctgactgctgacccttgcgcgagtgcctgcgaattaatgtactagtgcgaaacgtgccgtcagatcgtcctgccagtccacagccgtggtcactggcccaacagtgtctcccgcgagcggtagccccaacaagtacgatacgtcctgtagggtaggggctacctcaccgcatagcaagtgaaaagtgtgcgtctctggcctccatcggtcaaccaaagctgctaggagggacttgtccacagtccatcgtctggccgggtccacgtggccggcggcagcctccaccagccgacacatcggtaggaggccggcctcacgcagcctgcaataagaaattaatatgtcattataaaaaatattacagcgcaactaatttatagtaatacactgttcgtacctctcgacaaaggagtcgtgaaccgtgagtagctcaccgcacgtccgtgcccggaacgtcccaagctgagccccctgcaccgcagtaaggtgagaccggtgtcgctgatctatcgccgggtccaacagctgaggtgtatcctgacgtgccatctctgaaaaatatagtgtttcgtgttagaacaattcaaaaagtagtaatgtaaaacaaaagatgactcgcaaaattatgaaatagtaataaaatcatgagaataattatgtacaacaacagtacaggctatttaaataaagcaaacgttactaatggtacataacgatgacatgcaatttaacatatatgtagagttcgataatataacataacataacataacataacattacgtgtcgaagtccgacatacatcagcatacctaaagacactaggtgccttagtctgacgttacatcacgagacctaaagaaatgacatgccgaagtctgacattacacgacgaaacataaacacatcgataagttcgaaataaattacaagcaaacccacatgccaacatagaacataagaactacaccacgtagccagacgtggcacgacgacacctaggacgtggtcgagtggaggtagtgccttcacccgtagggcgagctccatctgctgctcatcctgatagtcctgcctccgccgcacttggtttctccttgtctttaggacaatgcttgtaggtgtgcccacgttcatcgcatttgctgcaatgcttcaccctgccagcctccgactcgtccatatcgttgcagatgcgacgagtcctcctccttccagccttgcctcggagcttcgatgggtcaggaatattgagtacttcatcgttagtctctgtgaactccccagctatgccgaacccataaatctcgccgctccatgtatgatatattgcttgcttactaaagtactgtgacacatatactgcatctggtatgccacactccgctgcggcagcaatgacatgggtgcatggcctgtggagcagcttcggctttgaacaagagcaatgacatgtgccgtcggctttcagaacacactcctgcttcactctcttgcggtagatacccctgcctgccttatcttgacataatatctcaaacctgtgttgttgggtaccttgcactagagctcgatgtttcatggcctttttacgcaactcctctagctttttctgcatgaaagttccaaacaaaatgctgttgttcggcatagagggaagaactgcctggaaccgatccctaagatacctgcatgtcccatgtaaaatgaactccactatgccaactagtggcagtccacggacaccgcgcatcacccagttgtaaacttctgccaaatttgttgtcattattccatatctagcaccacctgtgtcatacgccttggcccatttctcttttggttcatgcagaatccactgagaaaatttccgaatctccaatccagttcttctaaccaaagttggactatccgttgggagacgtccaagagattgaggagggtcatcaacggcggtagatggagccgctgcacgctgatcactgcatttggctgtcaactcatctaatctcttccaaagctcattgaattttttctcctggttctgattgcacagcctcttgaacatgttcatgagctccttgttcttgaattgcttgaagaaattagctcccatatgacacatgcaccacctactttgtacatcgtcccaaacaccagggtatcctggttccatgctcccaaactgcaactcttctatcactcgcagaatgccagcgtgcctatcatgtatcaggcacacatttggcctcataccaacaacttttgttttaaccaaatttcaggaaccagtaccagctgtcggtattctcactctcaacaaaagcaaatgccaagggcaatacctgattgttcccatctacccctattgctgtcaatatctggccccgatactttcctgtcaagaatgtcccatcaatgcagagaactggacgacagttcacgaatgccatcttgcatgcatgtagagctaagaacgccctttgcagcacactcttgccaggatgttcaattgatgggaatttcttcacttcgtaagagctcccagggtttcttccctcgataacaccaagcaggcgtggcaaattgtcatacgaggcttcgtatgttccaaatctcatctctattattttatgtttggccctccaggccttggcatagctaatagtatacttgtatgtctcctcgatgtgtcggattattgaccttggttcatatgtgagattatcgatgacatgcg

SEQ ID NO: 6470 - DNA, 10349 bp, Oryza sativa
ttggctaatgggaaatggaaatgatttccaacccaccaaaaggtatctttaaatcctaaccattcattctccctcttccatttaatcataacccttcattcatttcccaatcccaatcccaccccccatttcccattatccaaacacacccttatattatgggaacgaaaggagtagttatcaatcgttaagtttttcttcacatgttacaaagcacaaccattttgctagaaagaaaaagttagacaacgcaacttgagcctgatgtggttttgtgcattagattgcattcgagattcatgcaaagagagaagctagcgggacagttcatcttcctgcatcggatcacagccaagtcaccggcaactctattttttatagtgattttaacatattgtttctttacttaaatgagatgtatttcacatgaaatatggtgtttatatcaatagccagtaaaataatacattatttcttcatttaattttactataggcatttaaattttaaatacgcccgtatttggacatacatgtatgccggtgcgcgtatgcgcgagggcaaaaaggctgaagctttccactgatgcatactggtcaagatcatctcccataggagtcagcagaggtatggggaacaagtctctcacttcctttcgcaaagggtgcaccgtgcacaacagcagagggtgaaacaagtttcgattcaagggaacaacacaagtgtgtcctccctccgtcccaaaataaacatagtcatgagccaattccgtgtccaactttgattatttgtttttttagaaagctaaaaaaacataagtcacgcataaaatactattcatgttttataatctaataacaatagaaatactaattataaaaaaattaaataagacgaacgattaaagttggacacggaaatttaggttgtatttattttgggacggagagagtacaaaggaagctatactgcatgtctaacttcctttcgcaccagcaaaagttgtgtgttttgcaaagttggctgtgtagcctctcagcatgcaagttgtttcttttaatttgtgtcactataagtagtccatgcccccagcccagaactatttttgtactgtacataagtagtgtattttggtaagtttgtttcatatgtagtgaactttcatcgatgggattaagcctgtcgttttattttatctaaatcgtcgtctttataaattgttgtctctgaaacgttagatttatttaattaagtatttaactaatttgcctctcagaaaatctgacatattataacatgtgaataatacagataaagttagtcgacacaaccaaaccagccagtatattcgtttgaaaatcgatcgttagcacataattaattgagttttaattattttaaaattagaaaaaatggatttatctaatattttaaagcaacttatatataaaaaatctacgtctaataaaatcagaaacgaacgaaactaagggcctgtttgcattggttggtaactaaatttgctacatctaaccttaggcaagccacaattttagtagacagtgtttggttcttgccacaagtttattttttcctaactcttagccacctggtccacacaccggtggagaaaccctttttactcccggttggtaaccctccccggttttccaaccgggagtaagaatcgggactaaagaccgctatatttattcccggttcaaatacccaccaacttctagtcccggttgatacaccaatcgggactaaagatctaaattttttttaaccagaactaaaaatgatctttagtcttggtttttattgcgaccgggactactgtggaatttggttgatcgactaaagatgatttctccagtagtgacatgtcatacactctattttcttgccaaacattatccaagtttagtttgtcattttacaaaaagtgtggcaagattaagattagctaccttagtaaaaaaaaaatgacaatattagtccccaaccaaacaggtgactctaagattcacaatgtcaaccacctgctgctagctaggtatgcagacgatgagcccatgctctccccgtgcaggccgggtgcagcctcgttggactcctgcagatcatagatcgaggctgcctgcagcatgcgtatacgttggttagttcattttggccaatggtccatacagcgtgcctctccctcattgcttcgtcgcatgatcagctagctactgtccgttggtcgtcctagcctagctcgccatacatggacgacgatggtcggtcgacatctctaatcggagaggggcaatcgtactgtctatgagtactactcctgttttacacactgtatatacaatgtacgtttgaccataaatcttattcaacgattttgacgtaaatatgcaaaaatgtactcccacgttaaaagatgttttcactttagttaaagtcaaactgcttcaagtttgaccaaatttatagaaaaaacatagtaatactttcaatccaagataaatttattataaaaatacatttaattgttaatttaataaaactaatttggtaatgtgaatattactatatgtctataagcttagtcaaacttgaagcagtttgactttaaccaaagtcgaaacattttttaacttgaaacagagggagttcactaagccatgcgtgtttaaagtacttctgagatggtaaaacatctcacaataaaatgataaatggtactctccggttttatgttcgacttggctgattttttaaatatatttatcattcattttattaaaataaatacacaattaattatcatttgtatatattgttgttatctgttttattaataaaggtaatttgagcatgattttttgcttcttgttgttatatttgcgcaaagtttttaaatatgatgaatgggcaaacatatgtaattatgtacaacattaaagactaaaggagtaattatgtaatttattccgaatgagacgaatggttaagttgtatattcaaaagtcaaagacgttgagctgaatatatacgtgcataactgggtatccacaaggttatttgttaaaaaaatgcatgtgcaaaagagaggcagacatcgcaagtatgtatatatgtcttgtgccgtagttgtaggatggtaacgctgtcaaactctaacatttctgatgtcatcttcctttttcaggaaaaaaaaagcatgtgcacttaatttggagtggcatttagtaaggaaaaacttaatttataccggcagatttctaattaaagcaaacctctcacaatcatattactactaatatatggaaggaaatcaaggaagttcgattgaagacattaattaattattgcccgatgcatgcatgctcctgcatgcttacgtacgtgcatgcgtgcgtgacggtcacatgtaataacgggatcaaatcttaatttcttagttctaaaaaaaaatcttaatttctttgttgtatataatggctgatcagacgaattactagatgcatcgtaaagtttattaagatgtacacatgcctatccttaattatgaatggttaatttggaagtgcacctaggtatctagctccttaattcgattgatcgatcgattgtgtccatagctagctgcgcatgtgattgatgcaaaggaggaacggctggtccaatgctgcctgcctctgaactctctggtagccatggtgacaacatcaatcgactgatcagcaagcacaggcatactcctgcatacaccccctcctcctctcacatacactgatacacacacatacacgaaaaagagtagccgctagcctgcaatccccgaaaggtgcataccttttgccaaagaaccactactaccttttgcccaagaacaaacaagactagtattgctctagctagctgctcagatgaataaattaatatatactgtactactatgtaatatgtacctagctaggcgaatatatgtatagatatagcgtatataatacgttaatgttacactaataatacagttaatataggcaaaaattaactaaaaattcaaattcgttgatcccaggtagtataattatcttgaatacttgattttaatattttatggacatgcattttaatttcaggaatgacggaataccacctcgcccaccctccggtatatattgaaactatttcaccgaacaaacaaaaaatcaaattcggtcaaactttgtttacatttcaaataacttggtttcgagctaagcgagagcaggtgagagatggctaaagcgagcaggtgatggctttggcgtactagacgacaaaacacgaaggccagcagctaaacccttcttgcgccctcctcctcctcctcctcctcctcctcttcctctcccgcagcggcgtgcgaggcggcggcggcgggtgggtggaggccggcggccggcggcgcggaggtgctagaggcgatggggatcctagcatatctgttcctactggtggtcgccatcatcggtgtgttcgccgttctcgcgtccctgctcgaccccatccacggcttctacctgcgatcgatcaaggaagcactcgagtgggccgagttcatattcacttggacaagctcgctgtactttatactgcccatgtatgtagtactatatattatccttctctgatatatatcgatcgatccagatgcactgggatgggatggtttaaatatattcctgataaagctttggccttgcatgatgcactgggatggtttaaattcctgataaagttttggccttgcatgattgaatgttcaaaaccccaatccctagctagttgcatggctgatatgtatcttgtgttgttttcccctgcctcaagaacacgcgcgcgcgttgttggtttgttgttattattgctcctgtttgattgatttatagcgggttcaaactaggagtgcagagtagtacggttatatataatcagcgggcccatacggaaagaaaataggtagagaaatggggagggagaaatagatcattcttttttcgctcttagatcatttcgcaacataatatgatgctagcccgtgtaatacacacaccttgtttgaagtgagagtaacattaattatattgtgtttttatttgatatggacttctggactacattctttttcttacatgattgtttgattatatttttacacatgtcatgccatttttttcttgtgagacctctatccaaatctgatgtagtacgacttgttgtttactttccactgatttcttctctggattacctattttattcttcgtgtgtgtttagttcacgccaaaatttgaagtttagttcaaattggaacgatgtgatggaaaagttgtaagtttgtgtgtgtaggaaagttttgatgtgatggaaaagttggaagtctgaagaaaaagtttggaactaaactcggccttcattctttcattactaacttagtcatgcacgtgcaatacacgttttccacaaaatatatcagtgcattgaaattttgaaaattattatctgctaaaattaacctctttaacccaaatttataaaatatatacccctttgtaactggaaaaacaaaattaaccaacattatcggtacttggtattcacttaggacttcatcaacataaacttccatgtactgatcttaggcatattactagtatacgaaccacagccaattgaagtaaaatattcacatttgctggaccttgaaatgggagaagcacatagattatacatacttcaaatttttttgtgtggttgtatatgccatcctaacaaattcaggtttgaatcaattaaatagcatgatatctttgcttcttattgttgcatagtttgaatagattaaataacacaatatctttgttgagagacattctataactaaactaaaaaacaatctctgcttttttttccgtgctacaaataacgtgcaaaataaagccctatgaataaacaatgtgcaattattggagcggagaacagtgaggatggatggcctaggcggcgagtagggcaacagcgggcaacgaggaggatagttgtgtgggctggcggacggggttgcatggcgacgatctcttggtcgtcaagagagcgtgtcgagggagccaagggaacttggaggaggagggagcttggagggcgtgatgatggcagggtaaaacagtcttagggtctgtttggtagaattccaacgcctggatcctaactcctaactccaactccagtaggagctaactcctataggatctgagaatgatctaaaagtgtttggttagattgatcagttccaaaactcttaaaagagagaagggaggaaagatggacaatactgcccatggcttcttatatctgataatttcatgtttatttatatatgataattcatgtttgtgatagaatcacccacatgcatgcaaaatcactatttctcttccagatctgaaattgaaaaaaaaaaggaaaaatgcaaaaacaccggccgtgcgccgcccgctcgcgccagagagccgccgcccgcgcttcgcccactcgtgtcgaagggccgccgtctgctcgttccagaggttcacggcccgcacgccacccgcctgcgtgtcgtcagcccactcgcgccggaggtcccgttgtccgcccgtgtgcgccggagggccgccgccgtcgccctcgtgccgcctacccgcaccggatttgggagaggtgagggttacaggaaagagagagaggggtaaggaggtgggtttgaggtcgttcaatgacattttttgcgtaaataccttaaaaattaaagggtaatgtgtgttttggggtggagtggagagatggagcagcaaaaacccagctccacccccatagtacaattttgtggagcaactctgctagctccgctccaaaaaatgaaggatctagaccgtttgacacggcttcttctctaggtaagttggagttgggaggtagagctgtgccaaacaggtccttataatgtgtttgcgagggtccaggggataggatcggatcgagtgagttcacttgttggattgcatggcacatggtggagcttgaaatctggaccattggatgacatggttgaaaatgactaaggatagcatgtatacacttctcctgggtgaagctagcaaagagtatgaccggtgcttttcatattggaatagaaatagaaaaatacaaataaatagctggtttttaatgtttgacttattttgtatctcaatgttatatacttatatctaccattagttccttaaaattgtttggttaggcagttaaggcttgttacgctaccttttcaatctaccatactctgtttattgatggactaaactgctatttatatgtgcatcatcaattaggaactcttttaattgccatttttaaatttttatgtttaactatttgccatccatatgtcaattacatgtgggccctcgtatatctgacacgtgggtctagctagtggctaatagttaaatatctctagtatgatgtactctgtgatgcatgccccttttttttacttcttttgtatccattcatgtataattggtgaatttgtgaatacagggtcttcttctcgaatgccacaaattgggcttcaactttctatgattgctttaccccgctaacactgtggttagaggggatttactctggaatcgttctgctcctcttcgtgctctttattggaaatctggatgaaaactggggccgcataatgatagagttttctggggtggccatacagatggctggaatattttgctttgtgatgataaaggtgtcacgtgatgacaattacacgatgaaagaagctcaaaaacaggtatggataagggttcaagaattctgttatttcacacttataagaaacatgagattcattgaaaaaaaatctcctatgcagagtatcatggcccttgtcatcttcaagattttctcttttattatccttacgttcatcaaggctaagttggtgcccacagaagataacgtcgtgatcccaagagcatttgctgccataggttgtctgatccaatttgtgctaatgttgagttcgcctatcggccgttgggtaggtgatggctttctctcatttaaactctatatgtggttgttgaataagctttgttcttatttagtctttcttccttttcagttggacaacaattttaatgatgatgagcctaccacccgcaagatcaagttgtcggcagctctgatcaggctaatcacgctatcattcgactgctggcttttcactgtaagaggatactggagctcgccactgaagaagccattggcggtaagtgattcaaggttttaacccctctagattctgccaagaatggttcaagttattatttgttcaagtttaaaagttagggtgaaaaacaattagttttgtcgttgagggtgaaaatggacttccagcaattcaagggagataatggaatctactaaaagaatggataagtcctttttttactagttctattgttaccacttcaactttactcgatgtctatttgtcacctacacttataaaactagacaaacttcatcttaattatgattgtttctattgttagcttttgccctataaagaatcacactattatttttatgctatatatgttgctaacttgcatttttcccgcacatcatgtgcttaacatatctttactcctcacatcccttcactgtattatgcgatagaatgatgggagaaatgtgtggcatgtagagtcactgccatttttctaatgtttggggtgaaaattttacttggaacaaaattaagggtcatatataaatgtatttatcctagtatttctaatgtgtgcatgcaggaaatgacagcaaccaacttggtctttaccagcattgtggtggtctgtcgttacataggccccaacaagctcaggaacttttgtgttgatatttggaattggcttcgggctgtcccggaaaagcttcaaggcaagtggaatagcttcatacagtggaagaccgacaactggactccattcacgaatacagtgaaggtagcattacagagtttctgtactggctgttgcgctatgtttcaaactgggtggaatgcattgaagaacagggtgagtcaatgcattgaggacatgtggaatatactggctggtccgggtggaatgcattgaacatcaagatgagtcaatgggttgagctgtgttacttcagcagtaaagcagagtacaatatgcacgattttgttaatcgatctttacttatacaaagtttgttgatctttacttactagctgggttacttcagcagccggaggctgtgttcggacttttttttgttgagtgattagattttgttgaatgtattctcttccactatgacttccccggctgtattcatatagcgtttatgccaactgtatatagtcactaggtcagatatattaatatatagtgacacgtttgagtggggacgtatctaatgtaatttctgcttccattttcccgaactatagaaagcatgtttctacttactacttccaatattctgatattgttcttgtttccggcatcagaatgattctggtttgaaaaggtttaagaaatgcttggaacagttttctttcttttctcgatgctggtcgattacatgccaaaacagaaatgacgatccatgtccacaatgctcagaccgaataaatccacatgctttgatatgggaaatggtggcttttattacaagtcatgaaacccaaacagtcacaatagacacaattaactcattcagtttcaagtgcgaacaaggttacgcaaatagaacaagtcactgatccaaaagtagcagccggtcatcatttgagcttctcaaggagtttcggtgctacctgcagatgcaccccacagaaaatatgttattaacctagcttatatatgcagagcttctccataaatcatttgtttggttccagatatgcgatattgcacacacacatgcagatacttacacatttgtcaatgcatgaccaatagtcgaaatattgcccagtgcagtgtttatgcccagtatcatccttctccactctcttgacgcacttctgcaaaccatacaaacaccattaggatttaagcgttgaattcatcatagcgcatatcattgctaagtcgtcgcgatattatgagcctagggtgaaagggaacatcatgatggctggcaactcgaaatttagcatagaagattactacaacacaatatcaaagaaaattgaacatatatctggtttt

SEQ ID NO: 6471 - DNA, 30540 bp, Oryza sativa
  unsure (1)..(30540): unsure at all n locations
atggcgacatacatagctggcacattgaaagtctcaaacatgatctgggtcatcttctccctgttagccttggggttgagcggggcctcagtcagcaacacagggtgctcctcgggcgcgacacggagctcgttgtagaaggtgtgatgccagatcttctccatgtcatcccagttgctaacaataccatgctcgatcgggtacttcaaggtgaggatacctctcttggactgcgcctcatcaccaacataggcatccttctgccccataccaaccatcacaccggtgtgacgggggcgccccacgatactagggaaaacagccctgggcgcatcgtccccagcaaacccagcctgccagcaattcgcaagaaaagtaaagtatacgattaaatcacataaacatggggataactgctacaaagaaatactacgaatgagcaccacgaaccttgaccatgccagttccattgtcacacacaaggggctggatgtcctcgccgtcagccatttcctcctactggttctgaattcctgacgcaaaaacagaacaacaggcatgcgccgcaacacgtcacgaaatggccattttccaacagaaactagacgcaaaccctccaggaaatcaaaatctcaaaagatcaactgctaatatttggcacatcaaaacttgcagcgaacagaaaacaaaacagaatatgcaaaactacatatcgatagtccgacacaccgagatctagaacttgtagagcaaaaagagtacgcgataatcaaccgcgcacaaagaatcaagcactaaaccgtgatgcaaggcaaactcaggtggcggatctagacgtggagcatgtgattcagttccaccccccacaaacattttttgcgcgcggggaaaaaaacacaaacaaacaaactgctaccagcatcaaggtttaataaggcgaatgaagcgaaaagtatccagatctagaacagtgaacagaagctacgagtacgtgcgtgcgtgcgtggggagggagagatgaggaagaggacacgcagatggatgctcaccggggatgcggccggaggagggaggacggtggcggcggcgcggcgggacggggagatcggcggcggaggcggtggcggcggtgaactccgagtcgcgaggaggcgagagtggagtcgacgcggagtcgagggggggagggggaggggtagataagagaagagaggggggttcctcgactagggccacacaatcattttttggacacaattaagcgcgctctgatttttcttttttcacttcttgggtacggttacgctctgaatctgagaactgagaagttggcgcctgtctgtcccaaaacaaaaataggaccctctatggctctatgggtttgtctatactgaatcccgcttccaaaatttaaagtttaaggtttgctttcaggttctttttcatctaagtttatcttttacattcaattttaaatcgctaagaatacatacataaaaaatttacctataaattattttttctctaatacgttgtacggcatttggcaaaaaaaagaaaaaaaaaaggaggagcctacgagttctcctaacacgatctctcatcaacttcggttatgtcgagctgaaaaacaaactagatggtagtatttcttttcacagtccagcatggattgaaataggagcacctatgaaaattttcatacaagcatgatgaagaagacgtcatctttatccacatatttggtcaatgaccattttcacgagcgtaggcaggtagtagagtgctcgtcaagggtgctagtgcatacctcaaggtgattataaccggttcatcacctataatatctcgacatggtagagcatgtaacttatttgctatacaagtaaaccacttaaaatgtactaatataacttagttttataatgcaaacaaaaatttattctttacaagaacacaatttaaaattaaaaatgtgtctctatattcttcctttgtgccttattttacttgttttttctcactcctcttccataattatattgttagcctagttgacagctaggtcgtatgccagtgttttgtaatatatatgatcggttctttttacatgagttagtagtaatattgtacttgtacatatagtctacatgcatccatccatatgcttttttaaaaataatctgagagatttttttaaatataatccagtatgatttgaggtaacgatatatgtgtaatttacacctttttatatttaagaaaagaaaaaccatgttaggcctcgtttggatcacattaattttcttcaatttcgtgcatgaattgattttcttcataatgctgataaatttgtttccaaacaaatcttggtaatcaatgctttttcaaaaggatatattatccttccatttgaacatttcttcatagaaaaagaaaaccatggtgtccgggctcttaactaattatcgcgttaacggtgcacatacattaacacacacgggcaatacggattaaaggtgcgattagtgcgctaatcaagtgggatcagcacaattaacctaagctaggcatggcagcaacacagccaggaacagctgttgcctgcgctgtcgtctgcctgactgatgatatgatccgatgggatcttgattttggggaaggatggaagaatttcaggctattttagtacacccccatgtgtgcctgaaaagctgcttgctgttcttgcgctgtttgatcaactcgctttattaattttgttcctcccccccagctgtgttgatcatgaccacatgtgggcaacccctggaaagaaaagcaagtaaagcttaattgggttggaatcataatcagttcatcaatcagagaactcaatgtattgtagttttgcttgctagatcatggcgacagagaaaaacattccatagtgaaattctaaaattttgggtgttttttttctaataatacgtgctaagtgttacgtaaaaagagattggtcatctggcaaacctatggctgcggctgctgcagtccactccttgcctcactgttggtgctggctgcactgccgtagtctcaagcaactaaacaactctaaacatttcacaaaacctttgcatctatagaaattcttattatttcgggttgtcttcaccaacaccgccttgaacttatgtgtgtttaataatataaaattaaccgtaaagttttttcttttattgtctaatttctagacaatattcaaccaaatgttagaagacatgcaatttgatgaaaaaggatgggtttctgtgtgatattatggctaaaatatgaggccccggttattccgcaatcgattttgctatacatcactcgggtgattctttacctgatatttgacgttttttctggccgctactatctccagggttggggtgggggcccatacggccaggataaagcattgcatgcagcaactccagtgggatcattagacgtgcgatttttttttctctcatttgttgttttttcgcgctgctctctatccttctctctcatttgaaactaaaataaaaataaaatacaaaattacagtcctatataactaaaattacatttgtaaattcagttgatacgatatgtaagtgcgctgtaattttgataacaatgatgtgtcagtaaatatgtatttgttattttctttaaaatataaaattacagtcctatataactaaaattacatttgtaaattcagttgatatgagatgtaagtgcactgtaattttgataaaaatattgcgtaagtatatatatatatatatgtgtgtgtgtgtgtatatatatatatataaaattttcttttgtagtccgttggatgtaaatctaagggtagaaaaatctggatgatttcttgttaaaaatcacccgacaaatggatagacagtcccccaagtagacgtctacttattcattacatgtctcatccatagagctatgaaaaaaatttaattagaagttgacaagatatattaatttataacataatatatatatatatatatatatatatatatatatatatatatatatatatatataaacatgtaatttcaaattttgcttgtacaaattataacaaaagtaacattttttttaattcctctatgatttcggctagacgtgcattctgcatatagtccctcaccacagcacgagtagtcgtctcgtgtgtatgatgtatctgggtgtgccttcattgtggcacaacaaaagtaacaattttaatttacctgtcaatattcgtatactaattactccctccgtttcaggttataaaatgttttgattttgatcaaagttaaactgttttaagtttgatcaagtttatagaaaaaatagtaatattataaatttattataaaattatatttaattattaatttaataaaactaattttggtaatgtaaatattactatatttgtttataaacttagtcaaatttgaagcagttcaactttgaccaaagtcaaaacattttataacgtggaacggagggagtataacttatggacaatgaatttgaacttgcatgcttatatattgatatattttatcattgtttttaatttttttttattgatatgcaatagacaagtagatgtccatctagttgattagaagagtttgcttgataaggagtaactatatgatattcaatcaggggcggagctagaacaaaataaaggggttccactcgcttgttttagtctggtttgaatcaaatttagcttgatacgggtgcctaagtttaaactaacggggtatatatatagtgaaaatagataaattgtagctaaatttttttttgaatcaggttactgggcacccccctagctatacatagctccgccctgtattcgatagttgttttttatgaaaactactccctccatctacttttaatagtcatatttcaccttgacacacagaccaagaataagtaattctacttatcatccatttaaacatgctactagttattcctcgtaaacaagcgattcattaatatttacatttctcaatacccatgtaaccaatcatgtgtggtagaatggagagtcacgcattaaattcgagaaagtcattaagatgatgggtcgttggattgaaatatgactatcaaaaataaaattttcagatttggaaatatgactatcaaaagtagatggagggagtattatataaaaaaaatatctatagtataattagtttcatgctggacttgcaaacgtcgtgagcctccaactgaggttgggagtgctaattttttttttctctcttcgcatgattggcatgaatctctaagcaatttaacggtcacaaatccaattctccacatgtgtgctactgagtattttttgggagtagctatatttatggcgccatatttttcacgaaaaaatagtcggcatgtatttacattgtaacttcctaaattacatatgtaattttagtgtatttacaatataagtctcaaaattacatatgtaagtcttaaaattacatatgtaaatcctaaatttacgtactaattacatatgtaaatggtatgtaagtagggtgtaactactatataaatcagtataaatgtaattattaattttacgacggaggtgaagtgctaatgaggttggagcttgattaggtgcagttggttcattcgcataagctgtacgatgggtgcaggtgcttgaaacgaatctcatcggcggatcttacggttaaaacatccgactgtaaattgccctaaaatatgtcgacacaaatttagcaaaaccttatttttttttctctgcataaatctcaatacaatttaacaaaacttagatgtgtacgtagagaaattacaatgcaactatgatataattgcaatgtatcgaagatgtaattacaatataactatatatatatattataatttttttctggaactacattattaattataatgtaattagtctaatcaccttgtagtaccatattttaatagcacattctctgaaatatagtaaactctcgcagaacacatgcatgtaaaatccaaaatatggttgtcacgataaaacaagaaacccagcgtcctagcccatgatatttttttttgacacgaacccatgatatattgacacacattgaactgttttgtcttgaaaaaactgtcgccacaaatcagcaaatcccttgtttttttactactattccgttttggtttgagttacgtgtcgccgaacgaacttttttcgtttttagattttttttaatatttacagaaataatctatcggcgaacaaaattgcaaaaatagaccctgccgcccaccattggggcggcaagctggcgtggcagacggtgggtcgaccgcgccgtctgccgccgtcggccaaaattacgattaggcccttgccgcctatacagagggcggcaagggacccagatgtaaaaagtacggccaaaagatttttctatgcaatgttaataataaataaagaagtatttgttggtaaaacttgttaatattgttataaaaatgtattgaagttggttgttgcgcaatttcatatgttaagtgaggtattattttgtaccttattcgacgtattagtactcggataattaatataggcctatcgcagtctcggtcgtagaaacattatatggacttaaacaaggagaattatgtaacatgaagaaatagtagtacaatttgaacatgatacaactatttccattgcggttacatagatgatattagatttgaactaggagggaggtagtgcaatagttgaacacaacgacgatatagtaatgggacaaggaagcatgacagcagaaatttcaatatgccaagttgtccgataatagctaacccctacgtgaggatccctctcctctctcaaaccgcgctttagtaaccctgtattgctctggtagttcaagctgcacaacacggctaggtagagttagaacccttctggtgtctatccattctctgtattgacatctcattggtggttcctaggaggaaataatagatgtaaagcgagctaagttagtaaatgttgtgagaaaataaggattcatgtaatcaaaatattcttaccatgaaatcgtcgtccagaatatttggacaaacaaagaaccttcgacccaatgttgtaggatttatggaacgaagaacctgacaacgatcaccacacctgcatcttggacgggcttcccatggagggagtgccgtagttagcacccgccagtcgctctgttgttcacgacattgtcgttcataagccgcttttctctgtaagtattgctcagtactttcggatgcgaaataccagcgactttcttgtaaacaagtggttaggtcgaggacgggattttctgtatcgacccactcgatgtatgcgcaagccgtagtgcgggtctgccgaatagagtagtgttacgaagaataaagcgattgcctatacggaataaatgagcatatgcagataataaaataccccacggtcatagttagggcacctaaaaaagcgccttcctcgaatatcaggattcctcgaagccattagttggcatcgatcaccgcataggcagagaggacgctggcaccaaggtggtagtaggtatacacaaggatcgctgcgccagtttggatcctcaacaccccggcgtctaaccattgacgaaagccggtaggatttgtaatgaagaagtggggaagagagtactgaatgtgattgagttctgaaagattgtgaggcctcactcgttaaggcgacttatataggcgcaattcatcgagtgatatccttgacatgtgaacgtggtggggcatggtgggtacgcctgattggcgccgaaagttgcatgcttgatcggcgccgaaagttacattggtcgtatgcggcaaatggcgggcaaatactcgtatcgcacgcgaataaaggaggctgcatcggtgcggcagaaagtagtcgtgcatgcgccgaaaggtatcgtgcatgcgccgaaagatatcgtgcacatataacaacaacgtagtcattacacaagcatacaatactgaaaagtgaagcaagtaaacaaagagaagactgctctactgcccctgccccgcgccgcgaccacgcttggtcctccgggcctgtgctcgcacgtggtcctgggagtaggtgaaacgatccggtggcacagcacgggtagcacgagtgtctggcggaggagtggcctgcgcctggtcctgcgtctgcaccggcggtgcgcctcccagctgtgaggggccgatgacgtcctctgccgagcctgaagcgaagtcgaagtcagtgatgtcgaagagcacggtggaagacagcaagcagtccgacgaggtcccagcatggtccagtggtggaccctgactcgacgtgccggctgcctgtgacgaagtcccggtgtactgctggaactgcgctgagtgcgaggtcgacgcagctgcctgagacgctgaccctgcagcctgggagaagtgggcggcctgcgtcatagcgaactgggcgaaacctacacatcgacaacgggaccttgtaagctaggacataaaatgcatgtaaattgattgtcgaagtaatgttgtttttttaagtacttgtggggggcacaccagaaggcctagccgaggaaggcggggtgctgaacggtgcacgaaaccctgaatcaatcggcaagtgaaacggctcacatatatgtgcgagacatgtacagaaaaatccttaaaaatacttacctctgtgcggagggggagtcggcctaggaacgtgcgcagctggacggggaccagtcggtacgggtggccgctgtacagctgtgtctgcccgagcaacgtcgtctgcacgacaggtgagcactcggagaatcgactccaccatccgcgtgtacgtcgtccggtgttcctctacgggtaccggaatccccgcgtctaaacgttggctcgtcgttgaaccgtcaacgacgacccggttgatgtcgtccacctgcatggttattttgttcatacatattcgtaaaatttgacgatgagaaagacatgaaaacataaaggaatggtgcgatgcatgggtactcacacaacgagcgaagtcctggtcgcggtgcctggcgtagaggtctctagtgctcgcaatgtggggctgttgctccaagggagcgaaggtgaccctagtacgggtgcgtggctggtaccagcgtaggtaggcctagtacgcctcctcagtgtgtggctctccctcgtggtccacgacctccttggttgcgagcaaccagttctcaacaaaagtcgccaacttggcgggccagtcgccagctgactgctgacccttgcgcgagtgcctgcgaattaatgtactagtgcgaaacgtgccgtcagatcgtcctgccagtccacagccgtggtcactggcccaacagtgtctcccgcgagcggtagccccaacaagtacgatacgtcctgtagggtaggggctacctcaccgcatagcaagtgaaaagtgtgcgtctctggcctccatcggtcaaccaaagctgctaggagggacttgtccacagtccatcgtctggccgggtccacgtggccggcggcagcctccaccagccgacacatcggtaggaggccggcctcacgcagcctgcaataagaaattaatatgtcattataaaaaatattacagcgcaactaatttatagtaatacactgttcgtacctctcgacaaaggagtcgtgaaccgtgagtagctcaccgcacgtccgtgcccggaacgtcccaagctgagccccctgcaccgcagtaaggtgagaccggtgtcgctgatctatcgccgggtccaacagctgaggtgtatcctgacgtgccatctctgaaaaatatagtgtttcgtgttagaacaattcaaaaagtagtaatgtaaaacaaaagatgactcgcaaaattatgaaatagtaataaaatcatgagaataattatgtacaacaacagtacaggctatttaaataaagcaaacgttactaatggtacataacgatgacatgcaatttaacatatatgtagagttcgataatataacataacataacataacataacattacgtgtcgaagtccgacatacatcagcatacctaaagacactaggtgccttagtctgacgttacatcacgagacctaaagaaatgacatgccgaagtctgacattacacgacgaaacataaacacatcgataagttcgaaataaattacaagcaaacccacatgccaacatagaacataagaactacaccacgtagccagacgtggcacgacgacacctaggacgtggtcgagtggaggtagtgccttcacccgtagggcgagctccatctgctgctcatcctgatagtcctgcctccgccgcacttggtttctccttgtctttaggacaatgcttgtaggtgtgcccacgttcatcgcatttgctgcaatgcttcaccctgccagcctccgactcgtccatatcgttgcagatgcgacgagtcctcctccttccagccttgcctcggagcttcgatgggtcaggaatattgagtacttcatcgttagtctctgtgaactccccagctatgccgaacccataaatctcgccgctccatgtatgatatattgcttgcttactaaagtactgtgacacatatactgcatctggtatgccacactccgctgcggcagcaatgacatgggtgcatggcctgtggagcagcttcggctttgaacaagagcaatgacatgtgccgtcggctttcagaacacactcctgcttcactctcttgcggtagatacccctgcctgccttatcttgacataatatctcaaacctgtgttgttgggtaccttgcactagagctcgatgtttcatggcctttttacgcaactcctctagctttttctgcatgaaagttccaaacaaaatgctgttgttcggcatagagggaagaactgcctggaaccgatccctaagatacctgcatgtcccatgtaaaatgaactccactatgccaactagtggcagtccacggacaccgcgcatcacccagttgtaaacttctgccaaatttgttgtcattattccatatctagcaccacctgtgtcatacgccttggcccatttctcttttggttcatgcagaatccactgagaaaatttccgaatctccaatccagttcttctaaccaaagttggactatccgttgggagacgtccaagagattgaggagggtcatcaacggcggtagatggagccgctgcacgctgatcactgcatttggctgtcaactcatctaatctcttccaaagctcattgaattttttctcctggttctgattgcacagcctcttgaacatgttcatgagctccttgttcttgaattgcttgaagaaattagctcccatatgacacatgcaccacctactttgtacatcgtcccaaacaccagggtatcctggttccatgctcccaaactgcaactcttctatcactcgcagaatgccagcgtgcctatcatgtatcaggcacacatttggcctcataccaacaacttttgttttaaccaaatttcaggaaccagtaccagctgtcggtattctcactctcaacaaaagcaaatgccaagggcaatacctgattgttcccatctacccctattgctgtcaatatctggccccgatactttcctgtcaagaatgtcccatcaatgcagagaactggacgacagttcacgaatgccatcttgcatgcatgtagagctaagaacgccctttgcagcacactcttgccaggatgttcaattgatgggaatttcttcacttcgtaagagctcccagggtttcttccctcgataacaccaagcaggcgtggcaaattgtcatacgaggcttcgtatgttccaaatctcatctctattattttatgtttggccctccaggccttggcatagctaatagtatacttgtatgtctcctcgatgtgtcggattattgaccttggttcatatgtgagattatcgatgacatgcgcatacatctcagatgcaacaaatgcacatgtaatgttcctgtggtatttctgaacaccaggtaaaaaacatgtatgcttggtaacgactgacactgtccaataatccttccatttccccttatacgcgtgcactctccagggacaaccatctttttccttaacacactgaacttcatattgcgaccgattggacttggcaaccgaaaactctctatgaagtgacactgcaaaatgttttaccgcctccttcatatcttctgctctactataaatcgctccctgaataacctcattttctttgtactcccatctcacactatcctctttagagacgatcagcccagaaaaatcctgactagcccattctgctggattaatatccgtctcctcatctgacgaatcaccttcctctacacgctcgttatcagaatcctccctctccatttcatccacaatggctgcgacagtcttcccctcgtcggccactccacctggttgaatgcccacaggagctactacgcccctatcctctcctgcgttgacctcctccacagaagtctcatttacttcagcacttggtccctcgccatcatccatgttcatctgcacacctggatccttcgggtgcacaaacggaaccaaagctagaggccacccacgttgcattgcattttccacataccatctccacacttgagagttttgaactggaattagttcccaataaaaaccctcagttgcccgacttactacaacattgattgttatgtcacttgtctgtggatcaactctcaagcccctcattaaccatccttttatagaaggtacactcctctcagccggtctctcaatttccctttctgatacaataaaatctgacagatctaccccagttggcccgtaacggacgtttcctggtccatggtaaacttggaatattggtttgttcgacatatctgtcaacgaattaactagatcatattactctttcatgcaataaacatctacaacgtaatatcttcttgtgtaagccaatgcaatggtaaagtattgattccaaactagcagatctacgtagttaccgatatctacaatacgcacttctaaattagtacaactaaaaccctaaaaatataatgcatttattcaaacaaatttttaaaaaatacacactatttaactcaatagtcacatataggaactatgaatattacctgaaatcggcatctgaatccggcagggcttcaccccttcttctcttctcctcccctctcttcttttttttttcactggatttgagaggggtgaggaatgagggctgggggctgggcggcaggccttttataggcagcgaggcctgccgcccggccagagggcggcaaggggcctcctgcaaaatggacggccccctgcggctcttttgcattctgcacccttgccgccccaccagagggcggcaagggctttcatgcaaaaaaaaaaccaccctccgtgaccgcccgttcctcccccgtttgccacgtcagcttgccgcccaccattggggcggcagggtctatttttgcaattttgttcgccgatagattatttctgtaaatattaaaaaaaatctaaaaacgaaaaaaattcgtcgccgaacccgagttgggccagaaggatgtgggcttgtccgactgcgaaaagaaaccatcatcatttatccgagccaataaatcttactacttcgctacctaagaggaatcgacaaatcgacacagccaaagccgtcgtcgtcctgcttcctcctcccccgcagtagtcgccgtcgccgccgcgcaatccccaatcccttggtgttcttccccgcctctcgccacccaaaaccctaacccccctctctcactccacccgtgctgtgcacatggaaatccccaatcagatcagcggcggcggcggcggcggatcggttgttatagaaatcccggccgccacggagatcgccggagtggataccgcgccggcaaaggtatgtgacgatgatccccgtgctcaacccctccgcgaccgcgagtgggtgtcgcagctgcccccggaccaccccctacgctacacctgcggccttccgaacggggtcttcctctccatgtccttcgtcaccatcatctacgccgtgattgctccatggatgctgtggcgcgttgctaccgatcatgtgtccctcatgtggacatcgtcgatcctcgcgtgttcctacggcgcactgtggactatagccttgtccgaacggctagcaggtgccttcttggctatcatcttccgcgtctcctatgttgccttggtggccttcgcgtccacgcacctgattggtaccgccaatgggatctcgatcgtgtatctcgacacgttctacgttgctgggatgctcgggtacgccgtcgcggagtatcgtctccgtcgtggtaccgagcaatgccctagcgccatcttagccgccaaacctcctccattggaggaccaagagcgaggcgacgaggaggccgggctctactacatgggcttcttgtttggttcggtatccctctgtttggtggggaggatggcgtggctgcttctctacccctgcggcggcaagtgtctcatctcttacgtcatcgaggagctctcgtttgaggcatcaatgctgatctacatatgggttatctttgtttcccttactcagttggaaggggctctggtctgttacaacactctgttctgcaagatgccaatttgttttggtgcatggttcgttcttggcgtgcttcttggcgtacctgtgagtggtgctattgagatgctaatcttttggattggcactatggctctggctggattctttggatactgtctcgcggttcacgcatattgcaaaaggtaccatctctgttcctggcaagattattttacttttacgtttaattagctgatcagatttatgcagtcaaatataaaactagttgtgaatcatgttcttttttttctatggacaattacatgcaaactatgttttcaacgcttttcaatgtgagctgatgagatttagacaatttgaatatgctgcatgtaccattgcatgtctaacactagacttgttcttggtgggattgtgaggagccaaaatgatatcaatgtttatatcctagactgttctttatactctctccatctacttttgatagccatatttcatcttgatacacagaccaaggataagtaattctacttatcatcaatttaaacatgctactagccattcctcgtaaacaagcgattcattaatatttacatttcttaatgtccatgtagccaatcatgtgtggaagaatgaatagtcacgcattaaattcgagaaaatcattaagatgatagattgttggattgaaatatacctatcaaaaataaaattttcagatttggaaatatgactatcaaaagtagatggagggagtaattcagaacactagacccattcttaatgttgaactgaatatcagtttttgagcaaattgttctgttttttttacgaaacttttaataattagactattgcaaaactgtgcatgattatttatgacattgttggtgtctcttgtggtttttttctgaattttgaacatcatgattcacgaatgccccttttttaataagctgtaagtttgaaaacatatatatgttttagttttcttggatatgttgctatagtaatcttctatgctgaacttaattgttagcgatcatgttgtttctgttcacctaggtaggttgatactattctaaagattttaccatgcatatattatgtgttcaacatttcagtgaatcttgcgtatattgcttaagacattgaaattttgttgtcgacgattgaataggaatcagaagacaccagcttagagatttgcgggagctttgatgaccgttttgagaagccaggctttactctttgttgctcttagagaccaaagagcgattttaaagtatgatcaagatctcattctctaggtgtttggttgagtgctcttagaggcagagtaacgccaatgcctattgtgtgtagtattaacttacattgtatggtaaagtttattgtaaatgttgctgattgtgcataattggaaggtggtgactggatgaagaaatacactgtgttaggttcaggacgaaaaaggttaaggatatgcagaagtagcatatctgatgcaggcgtatatatatattgcaatatccgtcttttgcatttgttgtgttcgatcttataactgctttgacacggcgagaagcacgcaaacacgtttcgacttggctaggctcctagtagttagctagcacgttttgcccggtcagtgttaatttgccgcttggtttgcgtgagtagttaagcatcctggtaagagcaggtacaataatgggcggtagtagatccacgtaggcgcgcgtaattggccgtacatcccacgctattcagagcaaagagatgcctaataaacacatcccctaaagctatattttgggaattaagtctaaatcacaaattgagatcctaatatttcctcacgcccaataccagcccaaaggtgagactcttcaggagctgtccgtgctcctaatcgctgcatacgcaggagaaatcctagaaaatttggcaactctgtacatgtattctgaatgtgggctatagcgtgctgttatgcagagaaagaattgttttgttcatgaaatcagctgtcagttttagtctaattgataatttacttccaacaatcccctatggaaatattgatattttgcttggtagaaaatttgagtgaccaattcctctcaaaggggctgccccgagtagtctctatgcaggatttcttgatttgcttcttggacatcgcatcatatttaagcatgttttccttttttatctatactaatataaaaaggaggagttgtccccctctaatcctataggtgaaatcatccggattaatccgtaccgtccatccgcgcgcaagaggtctccaccgcacgattgagtactgccgcgaagactactctccattcacgcgcggagacttcgctcctcctcctcggcgtcctcactcgctcctctgtactgccgccgcgccgctgcatcctcgccgaagtcgtcttcttctccgtccgccgccggagccgaggtccccttccgccgctgccggatcctaccatccgtcgcggccggcgctcctcctcctcgctcgctcgctcgctccggattactgccgacgcgccgccgcatcctcgccggagccgaggtccccttctgccgccgccggatcctaccatccgctgcggccagcgccgagggcggccccttccgccgccgccgccgacgcagtcagtgcctccctctaccgccgcctaggcccccgcctccgtgccgtccgggagcaggagtttcggcagggtcgtgtggtcgccgtcgtgccgccacagatcgagactcgctgtcgccccgccgcaaatgcctctggatctcgcctcccaccacagccacgtgatcttctctcccaccggccttccactagctgcctgcacctcctcagtcgggtagccgccaccgacccttgcccttcgctgccccgtcatcacggtcgtccaagccgcgtgccgccatcgccagccatccttcttacactcacagaatgtagcgtatcttagcagatgccaatgtgaatgcagtgacatatgtgggcttcagtaattaggaggaaccaaatagcaaagaaggctcctaagctcctggtgcatattttcagttatttcattttctggatctagcttgattgattgacttgaacattccatttttccaggtgacatatatgaggttatgctcctataggttgatttcatatttttttcccctgtgaacgcaactgacctctcggtcaatagttcttccttactgtgattcatgtgcttcaagttaatagtctggttctttcaaaatgagcagatcagtgcttcttgaggtattctactaataacctttgcctttggttttactcacactctgtgagtgtgtaaaagtagctttccactggacttccttgatttccatggatatgcagttagacataggtgtgtgacgcattaacgtgtctttctgcaggttggcacttgataattttgtattgtaatatataaataactcagttgcgcaggtgattaatggttgacagaaaattgccttcaatttagttccgtcaataagatactgtgatctaactcaattctcttccatgcctgacagcattgattcttgctgtaaatttgtatttctctacaaatcaacttttattgctgaaaaaatattcacttcaaatacatagatgtgctttaatgactatttatgatgaaattcattcaaagctttggtttgccatcgtttggccaccagtttttaattccgattgctacagaggaattcgctgttagtttttatttgctatgcttgtttctaatttaccttgcagttgcaattacggagccctcaccaagaacggcaacaacagcaggcaaagctcaacagatttgggtttggcgctgcaagctggaagaagtaggcgcatcaacagcataatcctttcagttttgggatacaagatgcgagtgctcagtcacgaaatgctcttggccaatcaaaggttcgtcatctctaatcacaaaacaacttttgattgcacaacattttcctatataggggtatttttgtgtatatgactaacaaattgttgtattagcttttccaaatatgtgaggtaaggaacagatggacatggaagaattggaggtaaccaatattgttacgcatatattttcctatctgaatctgttgtagagaatggcagatttccttctcacaggcataattgcagacggtcaatactttgaaagggtagcttcggttagaggtttgtagtacctttgctagcatttatctactcatcttggagatattagttaattgtgaatcgatgagcagtggtcaaaaagaagaaagagcatgaattccataactaaatcttgtgggctattttgtcaatccataactaaacctcagtaaaacttttagtacccaacctgtagatcataactgaatattcacctaatattgtggcctacaatttcatttcccaattcgatgctctagaagtttagaactataacatgcataatttcatttttcttgcactgcataattttgtaattacagcatgtattggacaaacctgcatcttttgcttgtatataaagattatgttgtagaaagcagtggaaatgatttttgatgtttcggttcagtatgcagtggataacgctggtgaaagctccaaaccaaattcgtccgcacgaacaggtaatgatacatttacatttattcagctgatgcattcacgtttccagttcactaattatcaatatgtcaactagaccatcctaatatttatttaattgtttctatacatttctgaatagttgtgccaaccctgactaatctgataccacatattgatgggcctgtactgccaacttttttcatgccttgtgatgtgctgtgcttaaaactcctacactgctcctgaccattgaatcaggcatgtgttttgaatgatgactacttcatgtaagcctatggaaaaaaaaacatttcagtggacggttatattactcaatgtgattactcaatgtgattaaggatagcaccccaaggtgatttagaactggtatttttctgcaggaaatgaacatatgcagtctgtaatgatacctatgtgtttccccgtttcagaaaatgacaatgtatcttgcatccagcatttgtttcttcagaaaatgtacaatgcctataccattcagtgtcacaaaatgtttcttcagaccacacaaagtatgggattgccacgattaaatcttctatccctataagctacaattgatgtacaggtaagatacatcaacctgggatttgttaggtgaattatgtccttgcttagtaataaatggtcttcctgaaattatttttatggacaccattatttgcactattctctatttccatttccgcactgttttacactaagttttctaccacatttatctcttgagtttcataaagttgctgaagtgattaaaatttggttgtattgtacatggagtctaatagttacatatattcttgacattctcaagaatttgttcggtcatcagcagcatatatagtacaagactttgagtttgctagaggcagcaataggataatgatttttgtaaaaagtataggacactaagtttgacaaggatgaaacccataaggattgtagctgaatttttttgtgttgtctatgaaatactactactatgtaatgtggtatgatcaaatggttaccagatttaatccttttacattatattatctacagatttattttgccaggcaagatacttttttttttcaaatgctggaagttactctcttagcaaaatataaagagattaagtctgttatatatatatatatatatatatacttttttttttcaaatgctggaagttactctcttagcaaaatataaagagattaagtctgttatatatatatatatatatatatatatatatatatatatatatatatatatatatatattagcacaaaggtgctttttagtatgtagatctagctaggttctttcagtatgtagttctagatggtgttatgacacaatctgtgccgggttatcctctattaaacatagtttttcatgagttacatttttttttaatgggaaccacaaataaataatgtttgaatgtgctttcttttaaagagaagaatgtgtgttgcagataattgaatcaacatatacttcttatgaagaagaatcactattggtgcacatttcacatggtttggtaactaatttgattgcggctatccatgggcgtgaagcagcatatacagttgcagttctaggagaaccatgtcatcatgtaaaaaacatggcaagacgcaggaatgttggctggatcaatttttcattgatccattatttggtcttgatatgggtaactttcagtcctattttgcatggtcaagtacattgttcattgagttattctctttcatgcattttcgcaggctaattcatgagtttaaccataccattaagcattctctttctatccaatctgtttcattgatgttaaccataggaaatccatttcattatttgactaaatgttttataaatagaaaatgtaacaagatgctacagaaggagctggatcacacaccaacacacaccaacagtaaaaactgacccttcatactgggtggcaggacgagcagctaccttgaataactctattgatacatgcaagaatgtacagtatatttaattgaaagcatgtcacgtccatgacttttgacaaactagagaatgttgtaggatgaatgtatgtgttgtatagtcttacctgaagctaatttgacctttggtatttacaaaaagtgcctgcaaagagttattaagatattgcaatttacactacaatatatatgtaatttttgaactttggttgttcacatgttgggtgtgatatatattgtggaaaaaagcaataatcttcgggtgattttacatgattagtgtgacatgatgtgggaaacgtgccttgcacgttcacgtttactagtatctgtaatgctagaagatcagcagcatcgacctttttaacctgcatattgtaacgggggaatttcttttatatatatggtacacttttaaatcaaagaacagccatgttctgctttgaaaacacagtaatttctgttattatcctgtaattaagcaatcacaatcagcatatgtggctgttgctcaatggcatatatatatgcacctgcctatgactcgggcggaggtagagtatgtaagggggttaccaggaatctggtcaaaaaaattttttaagctatacttcacatatcttcaccatgtgtgcacctctctcagtgtaaacttaggcacctgcaccaacttaaacttgatttaaagtaaagtaaattaagcaagaggcacctccttcatttcgttctagctccgaggctatgatactactagaaaaacgatttttcatggtgtttggaaaatattcttcatggtggctacaagaaaaaaccgccatcacagaaaattaggggggtggggggtcacgggccgccagcgaaaactgattttcgctggtggccacattaagaggtccaccataaaaaatacttatttttcgaggcgaacctcttaaatgtccgccagcgaaaatcagcgttttcgctggcggctactaaagagatccgccaacaaaaaaacggatctgccagcgaaaagcaaaggctcgctaaaaacttttcacggcatttaaaactatgcgcgcgcgagatcgattccttcacccacccacgcatttaaaaccggttttcacccacccacccagtgcattcatctctcctctatctctttctcatctccacccaccgcatccctctccttctcccccacctctctcccctactcccggagcccccagccctcctcctcctcctgtcggtgacgacgacgactgcgtcgacgacgggcgcggacggcgaggccctcacctctctcccctccccttcctttccctctccctctcccagatctagccggagggagggggcagcggccgccgcggcggcgacggcaggcgggtggcggcggagctgacgcagccgacgacgtgccggacctggcgggcggcggctctcaagcgcgggtggtggcgctcgggcgcgggcggggaggccggcaccgacctcgacgccgttgactgtactgcctggctccctcctctccgacctcgacgccatcgaccatgctgcccggctccctccttcgtgatgatttttgtgatgcttgaatgcttgtgttgatttttgtgatgcttgaatgcttgggtgaacgaaaacagttgactgtaaattgttgatgtaaatttctgtggttttttgaatgctttggtaaatttctgtgaaatttttgaatgctagagcgttgacgaaggcggatggagcggtgtcgctccgtccgccgttttttttaaacttggccagtattaacactcccggctggcacaatgtaacccgccagcgaaaaaatattttcgttggcggccgtcttaagccaaccgtcagcgaaaatggatctttgctggtgactagcttaagatgaccgccagcgaaaatgaattatcgctagcggtcgataaccgctagcggaaatcttgatcttcactggcctttgttttgtggctgctccaaattccgccagtgaaaacctaaaatcatcaccaagaaaaatggttttttagtagtgtgacgagatgtgtatatttgcttgagttatctgctcttgcacttgtatattttgtatatggtgagtttgtttctaaatcctatgcatgtgaagatatatggtgaatggtagcattcctgattcttgtcaagatgaattctactgtgaagtatcaaatatgaaatgttgtgaattatctgtgaaccctgacatatatgcactactgtcaagacgttgtaattttttttctaaatctttcaggttaataataagagaaaattcgacctatagcacaggaaaaaaagcggtaccaaaaaatagcataaaaagttcccactttcgatctatagcataggccaccgtttttttcgcccggtagcacttccgtcgcattttgaagtaacggcgttagatcggagtggagaaaatttttgtcggactcatttacccttcgttccccacttgtttggccgcgtgttcggtgacgcctgcgccggcggcggcggaggtcacggaggagtagaggccgctgcttaggaggctgttcctcgaggaggggcggaactcgtccatcaggttgtcgtcgtcgtcgttggacatcaccgagctggacggcatgtcgccggacagctactgtgtctgggtgtcctcgccgtcgccagcatcctcgccgtcgcgccccccacggaagagcgggtcgacggggtccatcacgtggtggcgctgcatcagcaagctcgtcatcggccgcaaccacagcgacggcaaggagaagttccgcgctgtcgtccccggccagggagcaccccaaaccgaagcccaccgacgaagggcgccaccgccaccaaaccgcgttcttcactgacggcggcaaagaggccgcttgaggacgaggacgacgatgatgacgtgggcggccctagcgtcgatgtggatggatgtgggccgttgtacgccctcgggctcattagctccgtcatcgccgatggcgctggcgaacaacgccatggtggccgtactcggcgtcgcagcccacacctccgctgtcctatccctgctgctactcgccgtcgaggttgctgcctacctccaggggtggaacctcgaggaggtggcgtcactccccgctatcgacggcctcttcgccgcgcctccattgccctcttgctcgggaaaaagggcaaatgagtcatttttcatgtcgactcacatgtttggatggcaaatgtgacgggagtgctataaatcgcaagaaaattagtgtcatgtgcttctggtcgaagtagaaaatttgtcgtgctattttttggtaccgggttttttcctatgctacggatcgaattttctctaataataagcactactggatcgtagcagcgtcatgcacagggagaaagagatcgtaaagctagggatcgtcttcgccttccttctccacatgtgcaacccgacgtacgatgaactgtagcggcaaaaaggaaaatcagatagcggcgacgggcgaggcgtcgaggtactgtagcggcaccggcaccgtatgcacagcaagaaaattagatggatcaactgaactaggcccacctgctgactccagcctctaaacgggttttgggttttgagggaaaaaaaaaggttaattggattcatgccatcgtaaatatgcatacttagataaataccattacaattcacctattcgtagctatactattgaaattttataaaattaggatacaagccactgcccgtcatgtttccatccatctcttttttttccgttttctcccggccggcgacacgagttgagctgtcccccggcgtgcatgagccggcgacgcgccatggtcgcgagcccgcgcatgcgacaccacggacgagagtccacgctggtaacgcacaagtcacgccacaccgagcgccgacaaggctgcagcgccaaggtgccgcccgccgtgcctgcgtcacgctgtcgcacggcctcgccgagcagcgccatcgttgcagagctgctgcggctgccaagccactgggttgcggcgcaccgccccacggcgactggcaccatcaaagaagaaaagaaaacgaaaaaagaaaaagaaaaaaaaaactgagagcagcaccggatgaccgagctactagcctggtgcgcgtcgccgttgctcgcgttgtgccccggccgccgcagccgcacagccacgccagcgccgtcgatccgggcgttccccggccgctgcagatggcagagtcatcaggggagaagaaggaaaaggaaagagaaggggaacgcgggaggcagtgtcgatggcgacgccgttcaccgtcgcccacgctgcgccagcacggaggccactgcacccgcgccgaggccgccgccccccgagctcgcgctgaaacgtaggcatcgatgcaggcgtactcgaccttcgccgcgtcgagatcccgtttctcctagttgcttatggtgacgcttggcttctccgtgagtccgtgtcgaggccgagccagtggttgcaggcatcctccaggtccaccggccggcgcggcgcacgagacaccgtagtcggcgtccagcttcgccgcgtcctctccaacgccaatgcttgcgtcggggcgctgcacgccatgctttcttgtgccatgccattgtaaatcggtagctcaggaagaagacgggagaaaaaaaatggaagaaaacggaagaagatggttggaacgagacggaagtggcatgattctaattttgtaaaatttcaatggcacggttataaatagataaattgtaatgacatttatctaaatacgcatatttacaatggcatggattcaattaacaaaaaaaagaaaaaaagaggtccaacgtacagggtccctactactagagtcctaggaatatataggaaggccctcaagtcatactcccgccgcatcccctaatccccatcaacggtttgtatgcgcagaagggaaaaattctggtcccatgctccttcgagcctgccgcacacacgagcttactggatccctagctacggcatctagtttcgccgtttgtggttgttggatccacctgcatctagtttcgccgtttgtggttgttggatacagtggtggatccagaaagaaatagattagttcttagcaaactagatagtgttacattccccctcctatctacatatggtaaaaaaaattagtgggctcttcgtggggctctcatagttttcacggcagtagtgggggctcgagagtcgagaccccgccgcccccatgctggatccgcccctggttggatcctcgcctgctctggccactgccctccctcgcgacaagctatctatgaatgacaaggtctacttcaggagcttctgcaactaccggactgtttagttggcaaaaattttgccacacatattacatcagatatactgacacacatttaaagtaaccgtagtctaataacaaaacaaattatagatttcgccaagaaactgcactacaccagattctcacacctgtgacggtatatctgtgacggacataagtgttggtcagtgataagggtcacctttgacgggtcctacggaatgccgtcatcgatgagccatccggcggcaacccgtcacaggtaactagtcacctgtgatggtccaaaaatagaacccgtcaaaggtgaggtaaagtcacctgtgacgggccaaaaatatttagcccgtcacaagtaactagtcacctgtgacggtctaaaaattaaacccgtcaaaggtgaggtaaagtcacctgtgatgggtcaaattttttgtgtccgtcaaagatgataaaaaaaaagctctcataaccctgccctctttccgtgcaactgtatcgatccatccttatcctctcccaaacacacacagccacacagggatccttatcctcttctctttcaattactccccctctctctccctctctcatcatcctccctctcagtcatatcctccaaccctttctctcatcatcggcgccggtgggtgcgcgggcaggaggggaaggtggcaccggcgggtgcgagggccgcagggggaggcggcacgggcaggtgcgcgggccggagggggaggcagcaccgacgggtgctggggccggagggggaggcggcacgggcgggtgcaagggcggaggcagcaccggcgtcggcgccagttggaggccaggagctcggggtcgccgcctccatcgcccaccgcccaaagtcgcctccttcacagccatcggcctccaggagcttggggtcaccgacgccttcccccgccttccggccgctgacgccgtcgcctcgaccgccgccttcatcaccgacactaccgtcgtctcccgaccaccggtcgctagatctggccgccgggaagccggatctggccgccggtgccttcccccgcctcccggccgccgacgccgccaagtctagcctccaagacgcggatctggccgctagccgccggatctggcctccgggatgcgaatccggccgtcgacgcctcccctacctcccgaccgtcgtacatgatcgccgcggcctctccatcgattgccggacgttgcttcctcttccaccgacagctgactgcctcctcctcccgactgtcctcctccaccgacgcctcctcctccgccaccgaccgtcggccaccggatttgtttgtgcttgattttgtatgttcattgccaaatttcaaattggggcttttgttgcttgtgtggagatcgatacttgtgtgatgtatattgttagatgtatcctgcatttttttgcttcatgtgtaattgtttgttggatgttggatgctatcagatattaattaaaatgcaaagttgttgtatcgtgtggatgttgagatatatttggtttttcttcatttcgtacgttcggggctgaggcatttcttttttgtttgggacagcttattatctgtgacgggccgaatgtaaggtacccgtcaaaggtaagtcacctgtgacgggttgtaaccacgtgactgacctgtggagacctcacctgtgacgggctggaaaatacaggctcgtcacaggtgactgtcacctgtgacggcacccgtcacaggtgactgggactcaatagtgaccactaatctgtgaccatgcccaaatccgtcaaaggtgatagttagggcccgtcacaggtgatgtgatccggtgtagtgctgctagacaaatttattaagtctaattaatctgtcattagcaaatatttactgtagcactatattatcaaatcatggtggcttaaaagattcatctcgcaatttcctggtgagctgtgtaattggttttatctacatttactactccatacatgtgcctaaatatttgatgtgacagcgtgaaaaattttaaacatgccctatgtcctttcgtcataaggtcgtcataaaacacggcttattatgatgttatctcattggttcttgatgaaagtgcctcgtcaataaaggttagaactactccctccatctacttttgatagtcatatttcatcttggtacacagaccaaggataagtaattctatttatcatctatttaaacatgctactagtcattcctcgtaaacaagcgattcattaatatttacttttctcgatgcacatgtagccaatcttgtgtggaagaatagagagtcacgcattaaatctgagtaagtcattaagatgataggttgttgattgaaatatgcctataaaaaataaaattttcagatttgaaaatatgactatcaaaattagatggagggagtattacggtgcacctacctacccgccaagggagcgagcagactgaccccttcccggatgcaatgagtgtggtgggcacatccatcgacatccccaacagcgtcgatggcggtgacaacaaggcaattagcgtgaaatccacaccgcggagattgttagagatgaggaggacatcgccagagagaaggagaagaatcctccgctcactccctcagtgagtatattgcatatacacgtaacatcagataattttaatccatctccaggttgagtctgcactaattctgcaccatttccgacatccgaaacaatccactctacattcgcatatgctccaaatccattatggtgtaggatatggtatgaccactatccatttgaacactcgatgttttcacctctagatgtgtgacatctcaaacgagtacaaagttaatcttgcaaacatcaattaatcctcagcgcttatgtgaatttcaagtgattctccaaccatggatattgtaacaaagttatgttgctttgttccggtgaaatactcgtgcgttagaacacagactcattaaataaagttattattatttaaacttagtagtatgtccaaaagaattttattttgagttggtatatataataaaattatactccctccgtcccataatataatggattttggagggatgtgccacttcctaatantatgtgtttagattaattngtagnantagnaagtggnacatcccctccacaatcccttaggcaatgtttggctaatgggaaatggaaatgatttccaacccaccaaaaggtatctttaaatcctaaccattcattctccctcttccatttaatcataacccttcattcatttcccaatcccaatcccaccccccatttcccattatccaaacacacccttatattatgggaacgaaaggagtagttatcaatcgttaagtttttcttcacatgttacaaagcacaaccattttgctagaaagaaaaagttagacaacgcaacttgagcctgatgtggttttgtgcattagattgcattcgagattcatgcaaagagagaagctagcgggacagttcatcttcctgcatcggatcacagccaagtcaccggcaactctattttttatagtgattttaacatattgtttctttacttaaatga

SEQ ID NO: 6472 - DNA, 78488 bp, Oryza sativa
atcatgcgctgtttttcgtcaatatgtatacagtaatatatttgcatctttctgtaccggtctaggtcgtctatatatggtgtatatctccttgttcacacatgatataacactagtagaaataaatagggactgcatcactttctaagaacccacaaaatataaatatctccaactccagcaatatagagacttgctatttatttctcctgtatttctacttatactatgtctacgtatagtttaacaccttaagaattcaaatatgaatatttctaatgttagatttcaaccatattcaaattcaaacgtcataatagttaaagttcgaatccttaaaggctcaaacatgggaaaatgggaatgagaaatcctgcgtactaccaagtatccaagaactatagtcaatagataaagttaactctctatacacttttccaatacaatctatctgagaaatttttttttaaaaaaaaagctccttcaaattaatcctggaaaataccctgaagttataaatcacaatttgagacaaaattaagaacaagactgaagaatcattccaattaattccccctctacctcataaacttcagcgcatgcagtgtcaattttagaaggtcaaaagccaatacatggccccgtttagataacacccaaccatcttcaaataatgaagcgtacgtatgtcttgctgcaggaattgaacaaattaacatcgatgattcgaaagctctgaacggagctaaaacaacatctctcatcaagtttaaatgttctgataggacttaactgagcagtccagtttctcgaaccacttcctcctcctaaaatgttacggagtagcatattttaggtggacacacgtattaagaacgtagatgaaaataattggttgaagattgtgattggttaagatgagaaagtcgataaagaaaattaaatgaaaaataattgtgattgattgggagaagatgataggcaaagaaatacctttattttgggacagacattcacttacaaaacaccttatatgtaccggatcataggtaccggtttattcaaaaccgacacctattaccatttcccacctctttaggatgaaaattttagataaaaactggcacctataggtgctagtttgttaaaaaaaactagacctatgcttatattataggatttggttatagctagataaaaaccaacacttatagtagtactacttttttttaaaaaaaaatcagcacctataataaactacaggtgcagccgaaccggcgctccaccacgagccgcccctcttctccaaaccctatccactccccttgcccacccccatcgccccatctctctctctctctctcactcactttgggccttgaataataatcggcatcatgatgtacttttgcttcatgcacaaccaagggggaaggttgtaaacacatagggtcacaggccaagcagtggcggatccagaaaatcgattcattggtgtaataacgtgtctattggtgtcatagtatgctaattatgcttagatcatagcgttataatatatggatgaacagttttgctataggttttgctgaaagtcgccggtgtagcctgacactggcccttatactgtagatctgccgctgaggctaagtgctacgaccgctactcatctctccaaatggattcatgcgattcgtactaaaaccaaaccttatattccttgcatcattaccgaagtcctcaaatattttgtcgatctttcgccactatgacccgtcgacagggtgtctcaacatcccgtcttgtttacgttcttctacgtgccagcgcatcattcaagcatgcgctttagtcttgtacaaatgtctcagacgtggtattatagggaaataccacatcaccttagcaggaactctcttctttgaaggttgtcggttaacttcatcggggtcatctcgtctaatcttgtatcgtgatgcattacaaaccgggcatgcttcgaggttctcgaactactcaccgcgatagaggatataatcgttcggacatgcatgtatcttctagatttctagtcctagagggcagactaccttttaagcttcatacgttgtttccgacaattcgtttccctccagaagaatattctttacgagtttcaataacttgccaaatgccttgtcagtaacgccattattttgccttccattgcagcaattccagcgtggtacccaaccttttgtgccccctgttcgtaacctgtgtacaataacgttttgtggtccactaacatacgctccaatttttggacctccttttcactttcgcagtctttctttacgtcgcacaatatctgacctagatcatccgcaccgttgttttcttcaacagctccacccccatcgcctgttgtatctgcaaatccaccgtattgagcccagtctggaacgttgtcattttcttcatcatcttcttccattgcaatcccaaagtctctatgcaaggtccaacaattatagctaggtatgaattctgattgcaataagtgggtatgaagagtccttgatgcaaaatactctttctagttttgtactttttgcatggacaatatataaaaccttaggcctgtgggcattggccacataaaaaataatgtacaccatcaacaaactccttcgatcgtctatccgcggtatgccggtatacatccattgccaattcatctacatcaaataaacaaatgttaaggaaatccacgaaagtgaaaataattaaataatcatataatatttaaaacatcataattaaactcacaactgaagtcacaaatctctctgactatttctttaagaaaattgtaaatatgcttttccatgtattatccttttaaaaaaacattttacaagtttttaaaaaaatgaaaacatatttttaatgattttttcttatttctaactattttaatgtgttaaaaatggacttagttttctattttttttcttcattttctacaattttcctttgttttatttttttaaaacatttttatcaaatgtgtcttattttctccaaatatttttctctccctctttttccatatacttttttgagagataatgacatataaaaacatagctagaaatgtaatatgctaatcatacatcaatacagaataaaattgctaacctttcatatcccttcgatttgtgtaatatcaccaaattattttcacgaaaaattttggcaacacctcctttccttctccaacctcttggcagcaatgacacgggccgaaggaggaagaaggcatataatttttagtactggttggtgttaccaaccgataataaagatcatatagtatcagttggtaacaaaagagcccagggtgcttaacatggtagtactgacaaagttcaaccgggactaaaaacaatctttagtatcggttggtgttactaaccagtactaaagattgtattgtgtcgtgagggttattaaatagtactaaagacggcatctttagtctcgattggtaatagaatcgagagatttgtatttttgggaaccacaataaaagatcagttctccggtagggaatgcgggacacaggcactatgcaaacgccaccacgtggcaaagcatatgacatgatatatagaaacattaattaccctctattgatacatgtactctctccatttcatattataagattttctagcattgcccacattcatatatatgtcaatgctagaacactactacatgaaagattttcttggacactagacccttttgtttccaggcggaccataagtgcaaccgcacatgaaaatgagggaagggcgtcgggccatcgcccacacaggaaaatcatttttcgtgtgcggatcacttaacagacccgcacaggaagataagcctattttcgcgtgcggttgttaagtcaaccacacaggaaaatagcccaccccaagtgctgcccatcatcccatcttcctcttatcctcctctccatcctcccatcacgcgcgcgcctcactcatttatggtcctccccatcctacctatcctcactgtccctctcctcctccccatcctcccatctccctctccctgtccctctcctccccggcaacggcggtgccctcggttagggcggcgaaggtggtggcatcggcgggcgtggaggcggcggcatcggctacggtgttggcggcggagcggatctgtctccggccgccgcgtaaaggccagatccgttgccagccgccgcgggaaggcaagatccgtggcccgccgccgctgggaggccggatccgtggcctgccaccacggggatgtcggatccgtcgcctgccaccacgaggaggctggatccgttgccggcgaccgcggggacgacggcggcaggcctcaggcaaggtggcgatgacgatgacaggcctcgggcaaggcaacgatgatggtggtggccgtggtattgacggcggctaggttagggcttgcgggtggattttgattttttttgtttcagttttttatttttcccatgcgggcggccaaagcgcccacacgcgaaaatcgatttccgtgtgcgggggcgtcacccgcacaaaaaccaggatttttgcaaacgttgccttccagacgggtggaagctccacatgtgaaaatcaattccacccgcacggaaaaatctttcatgtagtagtggaaagtcttataatatgaaacggaggaagtacctatcatgtgtttacatgattcacgtccattaattaccctctattgatatatgtacctgtcatgcgttacatgattcacgtgtgtatgaacacgggagaccaaattaagttggcagtttgtcctttttacatcatctgctgctcccagttaaatgcaaaatagttcgtttgaaaaccgcttgagattgaaatatctgtaatggcatacatttatatcttttagataatgacatacatcctctcttactataaagttacaattaatccactaaatcctaaagcttaccatataaaaatgtcacattattatccactaacaatatgccaaatcaccatccactaataattactctctcggttccatgatataaggcacaactattttttttggatgttccataatataaggcatatatgcatgtataaaattaatcaggacctcttctccattaaattattactttttaaatcctccaccctcaagatctctaattctattggatgcatgcattatatttattagggtgattcaaactaggatatgataataattattttttggtctttgcgttaaaggtggtcgtgccttatattttggaacggagggtgtattatatttaaacatcatacaagcatgctatattatctatagttttatattttattaaattttagagcttttaaaatgcaaacatgctaaatcgttattccacataattcacataatattttaatatatatatttattattttttataatatcatatatacctgtatagttcattctcacttagttaatgttgtttctctcttctcttattaagcaatattacattaattgtttttagtccttagatgattaattaatctatgatccaaattatatatcttcttttttctctcattaagccatatcacctcaattgtttatagctgttagatgattaatctatatggtccaaactatctccttcgttttgttctcataaagccacatcactttacttttatatttatatttgaatcattattctatatactatttaaatttaaattatcataaaccacatcaacttacataagcttatattatcttgctatcttatatattatttttacttattgttattatactaaaattttataacaacacgcggagtttcacctaatttatatagattcggaatatgtgttcacatagataaacggcatgcatgccattgatcatcttttattaatatttatgcgggtgacactgggtagaaagcagtgcccaacataattattcagagatttatataccatcaaggtattctatcttacctaggatattttaaccactacttcatataccacacactactacaaaacatcacaacagtgccgccaatcactgcaggttagttaaaaaccgacgctctctataaatcaatgactgttaattagactgtaaaaaaaacacagggatcaaatgagagagacatagacttaaaggaaaattttcaagagataaaatgcacgagaacacatgcatgtttcctagtttttaagaaaattgacgcaaagttacttttgcgaaagctgaatgcttcaaaaaaaaccaaacggccaggttaatatagttaatttaggaaaaatgatgccatattaatgacttaaaatgaccagtaaaccttttattgtaacagcagttgcttcctaacaaaccaatcatacagcacagccacgccagtagacccagccaacattgaagagcttgccgatgatcctcccaagaacaccagtggtggcagtgggaccagcgtgttatcccgacgagctaccttgacagtgacctatggctgtgtttagttgagggggaagtttggattttggttaaaattgaagatgatgtgactgaaaagttgtatgtgtatgatgggttgatgtgacggaaaaggactgaagtttaaagtttagatccaaattttgaatctaaacacagcctatatatcattggaaggcgttggtcagcacaacataggtcacctcagctgggccataccatgtgatgaccgtctcgactatggcactgttgtagtcggtgaagtcacaggtgcaggtattgcagaatatctccccaacgttatcttcctcatcgtcatcttcttcttcttggctaccgtcatggagattgatcaggtcaatgccgacatacaccgagatggcaaaagatgggccagttagcacgaggttcccctgttttgagagaaaacataacccaattaaaagtggtttaagcattcttcgaaagcataaaatttacataattttcacaaaaattatattgaatcccatgaaaatattttcgagagttaatttcagtttggacccttcttatcgaggtttaacattggaccttatttactccataatttcaccttggacacctttattttacccttagtttttcctctgtactcccttttattcatactcaagatttgtctcagtgtgctacaattatctgcaccttggtcatacttcacactcatcttgtctcgttacgtccggaaaaatacaaccatttttttaaacgcttattgtattaatccctgtcccatgaacacgccaaattcctcgctgttctactgctgcctttctttgtttcctctgtttcttctcatcttcttactctccaagtcttccaaatcgccgtcgttgcggcagagctcctcggtgcactagctctaattttgattgcctccggttagttttatggtgatgattcactcggcttcttctttatggactgctcgttgctgctgattgatctacagtgctgcttgatcaccatcgatactgtaagtatcatgtattcaacatgttcttctactaatctccaggcatgagttgcatcgatctagttaattagtgattattgcattttctataatttagtatatgtgcaaaagctatgcagggtactgttcatgtagattatatataatatcattgcaggagcctaattatcgactcacttccaattatgtccgatgttctatgcattgcatgcaacgcaattgtttaccaactagtgggaagctctgcagtattttcattcatggattcttctattgactacttttgttattgcagcagtagattacgttcttaattttgttaaggtcattcgcgatgatattaattcatgagctccgtttgatgcgtgtatggcatgtttgattcgatcatttcaataagctgcttaaaaattgattttttttagacacaccccctttattttttttcaaacgggccgaaaaaagacccatacgtacaaagattttcgaggtggccagcaaatacctgtatgtgaaaattaattttcgtgtgcgaaccttgtgatatgttcgcatgcacaaataggtaaattgctttatttgtgtagacaggcctgttaagaggcgtgcctagtaaaaaatcaaccgctcaatcctctccccctcttcttttctctcctctctttaaaaaaaaaaatctaattccccacttctctcctctcatctcctcctttttcaccagccccctcctccaccggctggccacgggagcagcaacaacggtcgtgatgaaggcagcgacaagagcggccacgacgcccggagggacaacgatgtgagccgcggaacaggcttgagctggcataaatggacccacgatggccggatccaacggcggtggccttgccacagttggatccagcggagatggcctaggatgacaacctcaacaatgacgatgaccccgactgtttgcgcgtaatggtagcgggagcagccaccgagcgccttggcagctcctcctccactaccactggcaggcttgcaaaggccggatccggcgctggcgggctcgcgacagccggatcctgagaaggtggccccgggtcgatgattccgattgctagcagcggtggtggctagggtttcttgaccggagggcatggatcgatggcggcatcccctagatctagtgagaggggaaggaagcagtggagagggcttcggatccaacggtggggtcgtcgtgttcaccccgatgaaccctgtttgacagtgacccatccttcgacgacgttggtcagcactgcgtaggtcacctaagcggggccatatagcctcgattatggccatgttgtagtcagtgaagagaccgttgcatgtattgcagattatctccacctcgttctcatcattatcttcattttgttcgctaccgtcatggagacaatgggtacagataacaggggcatatgccaaggtggcaaacaatggactggttagcatgatgctgccctgttttgagagagaaaaaataatccaattgaacctagaatatgcattatttgaaagcatcaattttacaagatttttaaaaaatatatcaaatcccacaaaaataattttaagagtgaaaattcagtctggactccttactgaagttccatgttacaccccctttagcccatactagaaaattggctgccggttggctcgccttgtagctagcccgtccatatggctttaaaaaaatcatttaatcaatatagcctcttatattgctacatcgatttctattttgttgtaacctatagcaggtagtatttttccttgtcatatgctaatcaccatctattacatatatgcaggtaattttcagggcaacgcactggctccggttttaggcaagctacaaagatgtgagtatgatggggagttcctaaaggttgcatgccgcaggttggagtcaatgcttatgtaactatttgctaattatgggtgaaggttaacaaatagacttcaataaatgtgttcttcttaaatgtgttcttcttattttggctaggttacctttgtttactcgtttctggggtgctactttgtaataattggatgtaactctttttaagcaaatgctgggatgatatattctattatcttaaaaaaatgcatattggctctgcgctagcttgttgcaacccgcagggaatggggttagaccggctgtgctgtgctcgggtggagcatgctaaggtatagctttgtaaaaaaagaaaaaaaaaagtacgaattacccaattacagtactagactattttaaccctaaattttttaaactggataaattacctcctataactcagctcgaagcggttttaatcttagtctcgaagcggttttaatcccacaggcacacaagtggcagtctaatcgataaaaataataaaaaatagtgggccccgcttatcagcatcttctctcttttgctttcttccacctccttcccctcccatccatctctctctccagtcaccaaggagcactgagtaatggcagcaacggcatcaccaacgcgggaggagaggagcagcaggtagcgtgcgtcttgcagcctcaacggcacgcgctaggggtggcggaggacggcgcgacagtctaggcgagggcggcggcagcattcccggcggcaggcggcaatggtgtgcgagacgagggcggcgaaacgggatgcggcctcggcttccatcaacacgcgggagctagggcgagctccggcgctgaacctctccggtaaccggctcaccggcgagttactggaggggttcttctcgctggcgctgctcgagaaggtggatctctccgggatgccggcgagcgccttcctcggcacgacgctctgcggcgccctgctcgccccgtgcgccaaccccgcgctgctgccgtcatcgctcgggaacagcaagggcggagggaagctcacccgtggcgcggtcatcggcatcatcctcgacgtcgtggctgtgctcatcgtcatgcttgttgggaatagtcccacgttgaaagtttagggggagtgacaccaacttaaaaaggggaggggtccctcacctcatgagctagcttttggggtgtagaaaggctttctcccggttgggccaacatctcccggttttgggccaacaagtggtatcagagctgggcccacaatctctctaagtgccgtgcacactcgtgtggtgtaagcccgaagcccagtggaccgcgggtgtgaggcccgtatgtgcctatgtgttgggccagtcagtggaccgcgggtgtgaggcctgtatgtgctcgtgtgtggagcctggtcagggctaaggggcaccaatgtgtgacgggagagattgttgggaatagtcccacattgaaagtttagggggagtggcaccaacttaaaaacgggaggggtccctcacctcatgagctagcttttggggtgtagaaaggctttctcccggttttgagccaacaatgctcgccgtggggtacttggcatgcttccggcgctgagcagagcaacggctggtcggagcaccaccaccgcagcggccacccccgacatgacggagcccatcacggtgaccgtggcgaggacggacagcgagacaaggacgtcgccgtcaagcagtcagcagtcgcactcgctggcgatgatgacaggcgaaggcaacaagctggtgttcctcgacagcgtgccggagcggccgtacgacctggacacgctgctgcgcgcgtcggtcgaggtgatgcttgcgcgggtggtcgattacgaggagtgcggcggcggcggcggcagcagcgaggtggtggtttgctctggtggtggagagaggtaggaggggagtgacctgatagtgggccccaccgacttttttaaatgaattgatgactggactgccacgcatataccacgtaggaccgaaaccactccggattgagttaagagggttatttgtccggttttaatagttgagggtctaaaaggtctggttttcgagttcgagggggtaattcagtcgtctacgatagttcaagaggtaattcgtactttttcctaaaaatacaacgctatgtttgtacattgacttagcataatatcgttgcacgcatcatggtattgataggatcatcacttcaaatgagttcacgcgcgatttgaaattattaccttcccatatatatgattgatgtagcattattatttaactttactttttctccattttcttttttactatagcccttttgtgccttcagtatttttgagttagtttataattttctttggagatagcagtgctgttattttattggtgtttcaaagtttggtagggtaataaacctttgttacatagttgtacaatgtatgtatttgattttttttttagaaagtggctaagtccataccagtttgtttattagattatatatgctcagatttttgtaataaaaaatagtcgtgacatccttttaaatataaaattttataattttacacttagctttctttacaacatgtaggagtgaaatagagcaagaaaagaataataaggaagatagagggaaaaaaaaagaaaggggggggggggcaaggcaggcccaagacaaacaggcccagcacccgtctcctacctgttgggccaggcgagctgaagcccacgccccagcagcagccagtttggctctagtgcgggcgtagcgcgagcgtttgatgaagcggtagcacgcgttgcgcaactattggtgccacgtggcgcataattttgcaagagaacccgtcaattttagaatattagatttttatttttgttttttatacattttttttgtttcactttgaactcctttttacctaatcctcaatgttactctccgtgtgacaacgtaaactgcactctggtgctcatctcgaccatgccgttgcattgatgtcctttgcatacccaaagacggcagggttcaggaaaatgggactaaagtgaatcaagaagatgtttaaaaagggtgtccaaagtgaaaatatgctaaaccaaatcgaaacttgggttaaatactaaagttaatctatttctttcttgattaatatgaatgctagttgcaaatatacgagttcaaaatttttgagtttttcatttgcactataataagaaaaaaagcaatgtacttgtatgtagcaccaataattattggtccggaacaaattaaggagctacacaaatcctgaattgctcattcgccattactagtcacgggaatattaggccctgttcatattatagccaaaataaaacttaccaaattttagcaatgccaaaattttgacaagatggtaatattgttaaaattttggcaggatttcttatgtatttaacaaatttagcgacaacctaaacatagatatttttttgacagcttaaaaaaaaagggtatggttgaaaatggcattaaagtgaacaggcccttagtcttgagactcttgtgtaggtttagactctgttgtacagttttagctaaggcccagtttagtttccacaaaaaaaacttttcaccatgttaaatcgaatgtttgcaactcttgtgtaggtttatcttgtgtaggtttagactctgttgtacagttttggctaaaacccaatttagttcccacgcaaaaattttcaccatgtcaaatcgaatgtttggacacatgcatagagtattaaatatagacaataaaaaataattacaaagatttgcgtgtaaaattgcgagacgaatcttttaagcctaattgctccatgatttgataatgtggtgctagagtaaacatttgctaatgacagattaattaggcttaataaattcgtctcgcagtttacaggcggaatctgtaatttgttttgttattagtctatgtttaatacttcaaatgtgtatccgtatattcgatgtgacacgccaaaacttttcgtctcacgatctaaacacagcctaaattcagagtatgaaacaaagtctgatggtttacgcaggaaagctgatttatgagtcagattctagaattgtggaatacgatgggagtcttacacaggggcggaacccaatggaccaagggggtgcccaggaacccggcccaaaatctaaaataccttgttaccctcgtacctagggaaaagtacacccaaggccccttaacttgtcatcgagatacaaaatcgtcccccaatcataaaaccagataccgggcgtctctcaactaacaaaaccattcgctttaggtttctcggtggttttgacccggttttatcccacgtggcggctgagtcagcgtgggacccacgtgggtcccacatgtcaggctatccatgtcagcctcctctctctctctttcccatccttccccttcctcatctctctctctcatttttctcctcttgtccgacggagcaagcgagccatcgctcggcggcgacgatgcgggagaaggggagtgcgttaccgatgcagtgggcacggcaggcccggcgggggaggagcgcggcggtggctcctggaaaacacggcctcgagctcactcccacgcgcttcaaccgcgcgtgccggtcccaggaggctgtcgtctccgatgatggcgacaacggcgacgatggagacgcgctaccaccgccgacaacgacggagccgctccgacgatctaccaccgacagcaacgacggagccgcgcccgcgcgctcctgattcctaaaggcggtgcctgcttccgcgcttcgtcgcccgtcacctgattcaagaaccgatggctgcggcgacggcagccgtgcagcagctggccgcggacggtgaaggtgacggcgtaggcgcccacgccacgggcccgcgcgtagccgtcggcggcgtaaccggcgttgagctcgttgcagcagccaacgatgtggaggccgggctcggcgatgaggtggttgagaatcgtgaggttcaagtccccgggcacggcgaagacgtcgctgacgcccacctgcacgaggcggtgtgccaagtggcggccgagtgtggtgtcgccggaggcagcggacggcaccaccgcctccttaggagatcctcctccgccggtggtctccattgtccttgttatcgatcgatcttaattactccgcatgcgggcgtatatatatgcatgatgaagagatgatgtgcgtggtggctgttgtaaatatgtggttgtcgatcgatcttaattactttgcatgcgggatttttcgccgccgctgtcctcatccgctcccgctgctcctttgatggtgcccgcgatgacggtaccggccctaggaggttgtcgccgacggcggtggcggcaacgacgacgaagacgcaccaacgcgctacatccgctgtcgccgctgacgaagccgctcctgggcagacgtgctaccgccgccgccgccgacgcgcggacgcgctactgccgctgctgccgatgcgctacagtcgtcgccgccgacggaaccgctcctgggcagacgcgcttccgccaccgccgtcgacagagccgacgactcatctgggtgtgtgtaggagagaggaagagaggaggaagggagaggaggctaacatggatagtttgacatgtagggcccacgtgggtcctacgctgactcagccgccacgtcagacaaaaccaggatcaaaaccaccgagagacctaaagtgaacggttttatcagttgagggacgcccggtatcagattttgcgtttggaggatgattttatatctcgatgacaagttgagggaccttggatgcactttttcctcatacctacagcatagaggcaccacaccctcctctcgtccggcccaaatttgaaaggcccaaccagaagaaagccccaaaaccaaaacgattttgctatatctcactcggaagattttttcttatctctcactcgattttctcacttaaatttacagtgcattttcttgtaagttacagtgtaatttatgaaacttacactgtaacttttgtaagttacactgtaatttttgaatcttcacatgtaaattttaaattttgtattggatttggtctttttctcgaggatatggtaatttaatgttcattatggtgtttcttaattgctttttgctttttattatatctatcggattttaatacaaatattaaaaatctgtgtgatacgattataaaaatcttttgaaagatgtataggtactcccaaaccaaaaattaagcagtgggagaaactgaaacgtccaacgacgcttcccctcgaagcctcgcgtgataccgaagcggtagtttcgattttctcgcctgagtcgcctcaacgcccaatctctctcctcgcattcgtctgacctgtcacctctccccgggaggtcgcccttttctcgccgcctcaccggggacccagcccggcagccccaatcgaagaaatttctcatgtgtaaagcactaaagcctttccctggtaggtttgcctcccttttccaaaattttgcactgattaggctagcttagggcttgcaactatagaggcatatagagatagatgacgggggcaggaggaggatgactggaggaggacggcggcaagctgcaagctagcaacggccaatagctggagcttgccggctggccgctcaccctagcttatcgatctactctgagccccacaaaaattgcagccagcagcactagctgagagcaactgaataagtgaactctttctctcaatttttcttatccttagtttgtagttttgtgccaaaataaacttgaaaatttttatttggtcttaatagattgctatatagcactggatagtacgaacaatatgaagaaatttgttttaatttgtaccaaatcatttcataacttattctcggttgaaaattaaactatattttcaaggtcattatcctatggaggaatgaagacggtgacattcgcatgatatattcatattattagttgatttcttcattatggtacgtattttttatttttttatgtatttcttgtggtatattcccttcaaatgaagaaataatgcttatatttatttattggtatgcaactatttagtataatatcgctctataattatagatgttagtattacataaataaaggtaggaatccctcgtcttttctctagctccgcccctagtcttacatgggtgtcgcagggcggtgggtaggtggagtcgtcagtacggctgcggctgtagatgacgtcgttgcagaagctgatggtgccgcagggcggcggcgcccgcgaagatctccgcagttggtcgtacgcggccagatcgtcgccggtcggggcgtcgctgtaccccgtcgccgccgccatgaatgagagatcgaatactctcgtcgatcgatcggcacccgcccaccgattaccgaatgtatcggggacagtctgcactgagcgaatagtatcaaatcagtgggtagagaaagacgcaaacggaaatcaaaaccagaaggagaagaatcaaggaggaggaagctggagtggaggaggagatcgatcgtcgaaccttgcggcgccggagcaccgatcaccgctgtcgggcgtggagtagcactctaggagagaactagacaaaaaggaaggagagaagatcgaacgactactcgacgaggattgccgggatgcggcgggccggggagcagcgtggaggctggatccgggcatgacgacgacctctctctaggccgcaccgccgtgtgcgtgtgcccctcctccccgagccgccccggccccgccgcgtgcctccgccacgatggaaaatttttaatgtgttttttctacttttgtatttttcaaaagaatttctcaaggaaatagtccaaatatcaccttagactttggacgaaattccatctagaatcatgagttttaaaacccgatatctaaccccctaaattttatattaccctctaagatgattttggatggtggtttttcatattttgaaagcttacatgaacaactttgaataactaatataatatatttgcataccatcaattgtaagtcaccaatttatactcatacagtgatactatattattattatacactggttcttatttataaatgtgagctaacgagtgataaaaagaaagatttaattaagtggagattttaatatatatatgtccaatttgtatatcacatgatcaaattcatccaagttatatacaaattagataaaaatcactaaacaaaatcaccttaggggataatatgaacgattttgcaaagtttagggagttgaatttctagttttaaagttcaggatgatggatggatttctatctaaggtttatggggggtatttggattttcttcatttttccaataatgcattctaaaagggccctgacagaacaaaatgattctctgataaaatttcattttaattttcctagatggaaatcacacgaaccactgttttcaaaggttcgataatacaagttgcaaatgcccacggtaataccattgtcttcttccaattaattaatgtcgatcagtatatagtcaactgcattatatatatgcctcacgtctgcaaaagggacgtgtgtattaccttctcccacagcgcgcacagtaagcagcaaccaacaagcacgctggcacacagtagatagctagatgagattattacttcaatttattcgttgcgcatataattaagaagaaaccaagatcattctgtactgctgccaatttatagctagtcagtccggtgtccatagacgcaagctctactgctgttgctcgatcgaccggtgtttgcaattatcatgagcctggtcaagaagtaagtttttaatttgttcactttattgcctatttcattatctacagattagtgaaatactccttccgtccaaaataaaaacacactaatctccttccgtccaaaataaaaacatatagtatagattaatggacaaagagtttttcagatttgttgtattagtaggggtcatatttcgattattttttattttcggatggagggagtacacatttatggcatagtttagatctaaagtttggatacaaacttcagtcctttaccatcacatcaacctgtcatatacatacaacttttcagtcacatcatctccaattttaaccaaaatccaaactttgcgctgaactaaacacagcctatagagagcgagatagcccgcaaaattgatcgactctatgccgctgaattgacaatctcattccaagtttcccacacgatttctgaggaattgtccgtggtacggcgttttttgaaccagaaaaggtccgcaaaacgaagttaattaagacaaacatatagtacgatctatattttgctccagatctccgatgttttagagaaaatatagttttatatatactcaatatcgtaatcatattctcttgagctatcccaacgcaattgtaaaagcgtgcgttgctaattgctctaggactgcaggatttctcacataatttcactgatatatcactactacgaaaccggtttttgcaaacgggcgaaaaacatttttgtatgtggttggaccagccgcatgcatgaaaagatcagcgaaagtcacgatttttgcatccggctagggcaaccacatgcgaaaatcgctattttcgcatgcggttgcttacataggccgcatgcaagaataaaaatccaaaaaaaataaaatcgcaaaaaaaaaatcacgtcggccgcgcaccggcgtcgtgccctccgctcccaccgtcgtgggagccaccactgcccgctcccaccgccgtccactccagccatcggatctgtgcaggacaaggcccgccgccgccggatctgggtgggaggaggcccaccgctgctgctcccaccggcgtcgtggaagccgctcccaccggcgtcgccgctagccgctcccgctgccagacctgggcgggaggaggccgtgcgcccgccgtcgaccgctattgccacctcctcctcctcctcgtcgacggttgcagcatcgggggggaatggagccggtcgccttctcgtcgttgtcggcggcggcggtgagttggggatggcggttgcgccgccgcccactcactggatccgccgcctccgttgcgcgcctgccgtagccatagccggagctggccctcctgagggtggcgccgccggatgcgctgtccgtcgacgccatcgccgcccagcctgctcctggccgccagcgcccactctcggagagggagagggagaggatagaagaaagagagagagaggagaggagagaaagagagaggggagagtaaaataatagaggggtagagagaggaaatgagttagaaaaaaattgaagtggtgagagggaaaagagagtggagggatatgaaaaaaataggggtggcatttttgcatacgggtatcttaagtggtccgcaattttacatgcggacaacttaagcgttcgcatgcaaaaatcatgcggctttctaaacttcgaatcgaattttataatactaaatgaactcatgtgaaaaaattgtcaaaaataaagctgcaaaactcattgagatctgccaatttgcttttggtcatttctccatccgaatttgattgcactatataaaatttgaattttaaaatataagaaattcaaataatttttcagctagtaaatgatttcaaacggaaaaattgtcaacaataaagttgtataaagcatcaagatctacaacttttgttttggtcatttttctatatgactttgtttcaataatttgaatttgaattttaaattatgacaacttcaaataatatttcaaatactaaataatttcaactgaaaaagtcatcaacaacaaaaacaacaaagttgtataagtcatcaagacctataacttttattttagtcatttcttcatccgacaaagttataataatattgttcaccaatttaacatatatctcatatggttttataaattataagagagatatgtaaattttttgaacaatgttactatcactttgtcggatgaagaaatggctaaaattaaaattttatatcttgatgagttctacaacttttatgttcatgactttttcagctgaaattatctactacttcaaaatattatttgaagttgtcatctttttaaattcaaaattttaattgataaaacaaagtcacaagaaaaaatggccaaaataatagcattaagaacacaataacatgatagagcatgattttaaaaatatttaggaaaaaaccatccaatttggagttcatatgagtaagataaactagtttcaaaatttcaaattttattttcgcatattttcaaattttattttcgtatatggccccttcaggaaaatcgatttttccatatgggcgtcttaaggagccatatgcgaaaatgccgctcgatttttccagacacggtaagttatggtccgtttgcaaatatcgtgagatctcgtacacaaaaatcgtttgtggactagtgtatagagctgttttaaagcgtcagaacacacgaatttgtactccgtaactcattaagtcataggttaaaaaacactcatttgtagtgttacaaagtactccctttgccctataaaaatccaatcatgtatatgtctatatttaaacgcaggattgggtttttacggaacaagggagtacgttgtaactatattctttacaaatgaaaaaaaataatgcaaaaccatatatgtagcgcaaacttaaatattactgtagattccagaaaagcatgtctgagacttatcaacgtcattatgagtacaacaagtagggatacaatttataaataacataatatcggaataaaaaatattaatttttcagaaaaacacaatccatctagaaacacaatgatgacaaatgacaataaaaaagggagaagcaagagggccgcgaaggagcagggcgacagtggttgatgtgacatctaaaaatataaataaacatcaaatagaatcccaatgatgattaagaggagggacgacagccaggacattaggcatctgttaagccgatggttggcggaacttctataaagtaaaaaataaaccacaatgataatcaccatgatttttaaaatctcaatgacaataaaaaggaagggcaacaagtgtaaaaactataaacaaaactccaaataaaatactagtgatgattaataggagagatgacgggcaactcgttaagcatcacaatcacggtggttggcgagacttttagaaagtaaaaataaaccacaatataatcacatttgattttaaaatattcaatgataattaaaaaaaagtatcgtgcagggtgtagaggacttctagatgacggtttggcaggacttctataaagttaaaagtgaacaccgatactaattatgttcgagtttcaaaatctcaatgacgataaagaaaggaaacggacggacagtagaggagtagagtggcggcatttgacgggacttctaaaaattataaaaatgaaagccaacaagatatttaactctaaaatttataaggtgcaattttaaatttccaaggaggacgaatagaagccgtaatagatcgagcatgcaaataaatgggtgacaaaggagtaagaggtagtgataggtgtgacttttaaaaactacaaaattagaaatatggagatgataaggttcagtcttttaaagtccgaaaataatgagataaccatttaacaaattttaagtgaactcatatgtaaataattttgtatggatacttgtcgtgcgattgcgtgggccacctagctagttcttattttatcttatagtaattatcaggtttatactacatattttcccacaaagaattcatttaacacttgatatgtgtgtatacacctatagtaaaacaaccagtgaataatacagaactgtaggcaaataatacaaataatttgtaaaattatgattgttttgtccctatcataatttgttactaaaaccagacatagtggttaagtgactagacacaggaccactaccaaaaaaaaaaaaacctcatcggtactgcccaagaagacccatcagtgctggttccctgcctggcacaaccatttgggcaccaatgcacgccgttcggggtattttgctatgttaagatgccattcggactgataaccgcagggaatattttccagcgcacggtccagggcgcacttagcgaccagctcggcaacaatgtcgaggcatacgtcgacgacatcgttgtcaagaccaagacaagcgactaattgattgacgatctgcgggaaacgttcgacaacctccgacgatatcgcctcatgctcaatccagagaagtgcacgttcggagtaccgtcgggcaagctgctcggtttccttgtctctagcagaggaatagaagcaaatcccgagaagatcaaggcaatcgagaacatgaagtcgcccacaagactcaaggaagtacaaaaactaaccggatgcatggcagcactaagcaggtttgttgccaggatgggagaacgaggacaacccttcttcactctgctgaagaagcaagacaaatttgtatggacacaggaagccgaagaggcattcgttgcactcaagcgctacctatcaaacccccctgtacttgttgctccccaacctaatgaagaattattcctctatattgccgccacgtcatattccgttagcaccgtcattgttgtcgagagagagaaagtacaacgaccagtctattacgtcagcgaagctctccacgacgcaaagacaagatatccacagatccaaaagctgctttacgctgtaatcatgacatcaaggaagctacaccactactttcaagcccacatagtcacagttgtctcctccttccctctcagtgaagttgtgagaaacaaagacgttgtcggccgcattgcgaaatgggtagtcgagctgaaacaacttctgacgtgtcattcagcctcaatcggccaactcatagattcccctccacctcagcacatttggttgcttcaccaagcacggaaagccaaaatatgatacctgttcctcatcaaaactattactctaggctcacacaatttcgtgtcccgtgccctccgggaagagagaaaggaccaaaggaggagaggcatccacaccaccgagctcgtcgaaaagagagagaaagaggaccgggctagcgctggcgacacagccaccgcggacaagaaccggaaggggtgaagaagggaggagggggaaaggggagctcgacgtcgatccacgccgccgcttaagcctcaccgccgccgccattgttgggggtggaggagagggcgccgacgaagacaggaggggggagagggagaggagctctcggtcaacccgtggtgccggtggaagaggaggaggggaggcgcggcagccggatgaggaggggaggcacagcggaggtggtgctccacccccgacggcgccggctaacctcgtcgtccaacgctactgtgccgccgagctccggtgaggaggaggggggtggtgtgccggcgagcactaggccccaccgcctggctctctatggtagggaaaactgggaaaggaagaggggagagagggggaggggaaaagtgaaaagtaaagtagtagtggtgggacccactataaacatcttgcattgtagaacatgtggctaacattgtttttggtctaggtggcatgcgaagtccaccaaagcttcgtgacacactatgaaagcccttagtaccggtttagaaattggcattgatgcgcatgtacgagcaaaaaagaatatgaagcggcggctccaagaatcggctctagccgattcttcgagcccgcccccatgatccacgttttcaaattcatatcccttaatcaatccccttcgacaacaagaacactcaatcccagattgatcaaccggaagattaactataaatcaatcacaagcaagaacatgaagagggtctggacattcctcaaacaagagtgaaaaattataaatattaatttataaaggtgaggctgaggatctgtacaccggagaaaaagagggcaacaactgctagtctgctaccacctctccctagggtttatcttatcgtttgggccggggttaccgtcactccgtggtagctcgataactgtgataatcacgcggtgaccgcctataatcgcacaaaaatcacttccaaaaaattgaattcaaaactctatggtttcgcggtttcaccgcggttaccgcacggtttaccgcgatatgtgggatgtgggatttgaactcaagatctctcacctcaggcctcacgcgtgttgccatcatacctactacacacatctagcttggataagatactttgttttttaattaaccctgaagacatctttagtactagttagtaacaccaatcggtactaaaatatcttaagttcagattgatgttacagtgctggttggtaacaccaacccgaactaaagatcctctagctttagtctcggttggtgtgttaacaaccggtgctaaaaatgtttctagggacttatacttttagaactggtagtaaagcatctttagcactgttttttaatctaatcaagatatttgtgttttgggggtgtaggatataaaagatcatttctctagtacttgtgtatgtatgttttttttttgacatattttctattcaaatttgtagtattagaatgtatatttgtttagatttatgatattaggatgtgacttattttatactaggttggtttattttgagattgagagaattaatatattagtatatgatatgcattgttttagtacttgttacactaattaaaattcctcgaccgaacgaaatcggcgtggcaaaataatcttggctagctaagtaataaatcggaggatggagagaacagtcgtcgttgagaatgtggactacaatatcatgacaagcaactacagtgatttcatcatcgacctccaaagcaggctcgctgagcatccagaacaggctaacttccacggccgtcccgtgctagcaaggcaatgccatcctaaacagccggcgagatggttgtacattaaccttgtgggcgagaacaacgatagggcaaccctagccgtccgggatgacaatgtctaccttattggcttcaggaacctgaacggaaaatggttccatttggggttctcgctgaggagcgttccgattcttccggaaccatccacgtttttggagtgcgacgtcacttatcgaagcttacttggtggaaatgtgaaagatgttctggtgagggtggacgtgcggaagatttctgtgatacatgccgtccatagactatcgggctacgcgcagcgtcgatgtggagtcgatggagccaccaaacgggatctagcacgcctgattgtcgtgatctgcgagtctgctaggatggctgcacactacaacacggtaaacgatggttggctcattcgcaacaggcaaattagactcgacctttggcacgtggattacctgtggaactgggggcttatgtcgtgggtggtgcagcagcagggagggaagatgtggcccatcaggcttataaactccggaatcaacagcataagtgaggcgctcgcagtactccaactgctgcttaacacggcgagaaggcctttgccagatctaccacgagcttcaccgccgccgccagtgctctatctgccacgtcaggcggcaccggcagtaccctgcccaccggcgcctccgttatggttgccatcgccatcggtgccgtcgtcattggcgttacatgtgcccctctttcatgcgtcctccttagaaagatggagtcctacagcattagctatggcgccgccgtcattgccgttacgtgtgccgttctttcatgcgtcctccgtagaagaaaagactcctgcagcatcaactgatggcgacgaaggatctaccgtcgactactgtgttggacgcttattagtggaggtgttggccgtgtggtccagctttgacagctgtaccatcgcagtatttgacgggaaacgcggccagatcatctacgagaaccaccgaggagatcacgatggcatccacgattctcaggtaaggaggacggagtatatatatatggactctctccgtcccataatataaaagattttgggtggatataacattcgtacattgaattttaacagatcgtctatttagatttattataccaagatatgttacatccatctaaaattttttatattataaaacggagggagtacgtttctagctatagtcttaccgttacttcttgtgaaaatgaaagatggcacattcgtggatgtgcatatactactccagccagtacttctctctgtcctaaaatacaataatttgaaactggattgaacatattttagtcgtaggttgtattttttttagaattaaatagtacaaagcagacactcacaacgcacgcacactcacgaatttgaaaagcttataagggtggtatactaaccgaataatacctattggattttaaaagtacgatttcttcatgaattttatccgttagcgttgcatgataaatttaattttgtcatttatagaattacctgctggagattgggttcaaaaattatggtatctagggcagctgactcttgaagttccattagaaaaatagaaaaatagagaaaacttatattgctataaaagacattagatatataaccatatataaattaaattacgcctgcttttttctttatcagaatttttagaattttctttaacttgttaagagaatatttaggagcattaatcacatatttgatttaattttaaattttttttgtgttgtttatcaatcataaaatccaggtactatttcttacttcgtgcatgcatgcctgccgggcatatgtaaattctggtctatgcaactgcaagcttgtcacacagagacataattaaccctaacgtggtatttgcctatttgatggggtcacgtcatgtaactggattgggatgaccaattttaaattttttttgtgttgtttatcaatcataaaattcagggactatttcttacgtccatgcctatatgcctgccggacatatgtaatttctggtctatgcaactacaagctatgcaactgcaagcttgtcacacagaggcataattaaccctaatttggtagtatttgcctatttgatggggtcacgtcatgtaggacatgggtggataggacatggcggcccattttttgtgggtgtttggttgctgggcaggggtgggatggggcggcccgaagaggaatattctcctcagatgctggatggggggatccgaccgatttgcccggatccagccgcccgagcgcccgggcaagctaggcaagcgagggaggcggtcgcgtcacccgcgagcgagggagggaggcggtcgccgggcgagctggccggcaggatgcgggcacggtggccggcgcgggtgcggcaacgggaagcgggagcggcggcagcaaggagaagagggggtggcggtgagcccgaaggcggcagcagcgggaggagggaaggagacgacggcggcaatgcgagttcggcggcggcgggaggcaagctcggcagcggcgcgggatgcgagctcgtcggcggcgggaggcgagctcggcagcgacgccagatgcgagcttagcagtggcgggaagaggagcgacggtgagcccggaggcggcgggagcagcgagctcggcggaggcaccggaggccttctcttttttttttcctatctccttctctctcttttttttttgggggaatttgtgatttgtagtatatatgaatttgatgaggggggtatgctcaccctttctaagtgagaggtgaccacacctgctcatccacctacttcctccaaccaaacaaaaaattggatcaccaaatccatcttcatccctacaaccaaataaaaaactggatcgccatatttacccaatcaaacaaaaaactgaatcgccctatccaacaaaatatggtccgccatatcccatccaacctatccaatcttgaccgtgaaccaaacacaccctagctggattcggatgaccggggtaggcccgagcacgggagaggagggtgggcctgggatgacacctttgactttttatgtatatgtttcatcatccgtctcaattttaaaaaatatatgtgattaattttttttcggggaatgtgattaatttatagatgaactatttttttcatatttatataaaatgtttgaatgagatggatggtcaaatatatatagaaaagttaaagttcacggtgtcaatctattaaaatcggaggaagtaataaaatgtataatgtgcaggtatagggatcacactatttttttatttgacaataaatcatagtccatgtgcaccttaaataattgattgaaatgtcatgatataaaaaaaagactaatcatcaaacaactcaacttataaaaagttattcctagacgatcacacatatattagctcatgtctccacatgcatgtaggcttgcatgagacacccgtaactgggagattaggctatctatccatggaatttttatttaaaatcagtaacaaaataatgatttagatcttaaccaccgtggagaaaaaaaggggagggaggagagacgcatacacaggcgcgtgaggggaggcgagggcaacgacgccgtacaacattggacccacacattcaaggaaaaatcatacgtggcagtctgagagcgtttttaaatcgccatatggtcgtttgagagcgtttttagaaagtttaatggaagaaaaatcatatgtggcagtctgagagcgtttttagatcgccatgtggccgcttgagagcgtttttaggaagtttaatagacttttagtatataatagaagataaatttagattcgttggattaggatatgtcttatccaattatagattgttatattttagtacggaggcagtatatgtgtagttgtgtgcacacgtgtgtgtattagaaaagtacttgttgattgactgaaactctgaaggtgctatatatacagggtaatttgatgctgactggaccgtacagggccatctcagccgacgggagcttcctgatcgaagttcataccaacaatgctggcgatgttgatggtacgctgttttgggactgctacgacgaccgcaacgaccatgagcacgacataacattgactaacaccatcaacacaagccttggccccgttgaggtgacctacgcggtgctgaccgacgcagtggaggccaccgtgcaggtcaagctgctgcatgcttctcgccggatacagcaccgccacgcggtcgctgccaccatcttcgtctacggtgatatcaccgcgcgcagcgaatgcttcagcgtcgggagcgtgctcttcagccgtggctcgcagaacaaggtggcgctcacctcgggctccacccttcttccactgtcgcgatgcgttgttgcggtgccacttaacgaccaggtcgagatagaggtgaagctgtatgttggaacttccagcgaagagagtatcaattacacttttatccatcgtattctcgtgttctactcgggcggtgaacagctggcacaacaaatattcctccatggcaacccagcgattgaagtcacttggacaccgtacttctgaaggcaagttgaactatcaacctacttcaaattaacgttgtatgttccttcttaattacattttttggactcatatattagattgaccatatatatcatatatcttccaatatttaattttacagcgagtgctaaacagcataagttgacaaggagattaattatctgcagttacaactactacagtggctgcaaggacagccaactgcatccatccagaaaatatgttgggtcggtatatatctagatatctctcaattactctacatgactatgtgttccagtaaataaggctctttacataaacggaattgtttaaatacgacgatttcagtaaagaagcaggttagtgtgtgctctatatatgatctgtactagtacaatatatactatgtgctcctatacgttctgtgatttgtccaagatatttatcatacaggtgattaattgtgtgtcagtgtgtggttgtgaactcatattgtactagccacttagtcgtgcgttgcacgactttgaattcccatatgaaagccatgtatatatacatcgtaattaaatcaaaatcaccaatgatgagcgaattaaactcattaagatgagactgaatagatttaccttctgccatgcgaattgtgtacgggtgttatttgaggcataatttgttggcgagacttttcttcatgtatataaaaggcaggtgtataatcatgaaattatatgcttgaaatttgaatatttgcaagattgtatgacatgataattaaatctagaaagacctttatttccaactaaaaggttcaaacgttatattcaaaattgaccgtttactgttggttccaataaaaaaatgctcattttatgctcatactactgaagtgcttgttgagttcctagtatgtttttatgagctggggtaaaagaattaggcaagcacagcatctggcccctcgttggcttcttcccgatgtctctagactgtttgctctttttgtactgagcttctttcactagatcgtacggcatggactgaatttctgttgcatccaacggctcacattaagcagatccgacggtggtcgtttaccagcagttgtatcggacggtccctgttttatggatgacgtggcccaaccagattgcaagaaactttatttctttcaatactttagatccctcgaatagtttgattgttaactataatatacaagtatgtgactattgattgtcgaagctgctcctgtttaatttttacattaatgaaaatggattacatctccagcttctgttatgacacacaaccataaattttatagtaataaaaaaaggtaaagataaaagtaaatcaaaatgagaaataaagtgatgggacaaatctccaactcccctttactattgactagcgttaaatcacataaatttttttagttagcaattataatggaactacatcacccatagtggaataatagacccttggctaccgattcgaagagtgtagcaccattgcgcatagtatcctgctcctcctgtggtagcattttagaccaaaagtggagccagtaagaagacattaagataacctgcatagggttagataattggttaccattaaaaactttatcattacgacaacgccaaattgaccaacatacaacactagcttggaaatgctactgggcgagcgattgccctcgcccgcccagggcgatcagatccccctcctcctccccctccctccctccacctggtttccttttttggcgccgtattactttcctattttagtaaatttatacacctaaagtttatacacctcaagtttacacatctaaagtttagagaccaaaagtttatatatccgattcaaatttgaatttgaattcaaatattttttatatatagtatttctatacatctaaagtttatacacctaaaatttgtagacttaaagtttatagacctaaagtttatatatccgattcgaatttgaattcaaatatccgattcaaatttgaatttgaattcaaatattttttgtatatagtatttctatacatctaaagtttatacacctaaagtttatagatccaaagtttataagtcaaaagtttacatacccgattcaaatttgaatttgaattcaaattttttatacataattttttctaacttttgtttttttaaaaaaattttgtggtgtactgtaataggaagagaagaaggggaggaggaaggggagaagtgggaggagtggctatagggggaggggggcgggatccgatcgttgggcgatcgccctggcaatcgatcgcccaatagacccctccgcactagctcctattagaataatctttttaatggacctagatacccctctaagccaattaccaaaaatatttttggcgtcacggggtggagggatattaaagcaaaaaacacacatctctaaacaaaccgagcaacatgacactaaaaaaaagatgttggattgtcttttgtgcatagtagaatgaacaatgtttgtccccaagttttatttttgccaggttatctttcgctagaactactttcttgtgaagaaactacataaagaccttgatctttagtgaaatttttaagtcccactagaatttacagttcatgatcgcgccatacatagatttgattaaaatttggccattcttatggaacgaccatacaaaacagtccttttcatttgacagaataatattagctagcctgaggatcaaatcgttccactcgacgcgcgcgctgccgctgctgcacttcaccctctcgctgctcgccggcgaggacctcctcttcttgaccgccctccgcacccaccactccaccacgtcgtcgccgcccgccgtctccctctcccgctttgtctcatatggttcaatagaacctagaagatgagcgagggtcattcagtaaagtatctttttcaaatggtaaaaaatgataagagcaccactaatagtgattaacaaattgctctactttggagtgctctcagatgagtagctacagtaaatggtcatgagagcactaccaagggaagtccaaccatgagattgttacttggatctcatcaccacccattccaataacacgttgtacatgttgatcactagtctaaggttcaaattcgacggcagctctgacaatctcatcaccggaaaaagaacgcaagtccaaatcgatcgtcaacagcatcatatatagctggttctgcgaacgcacgccctgccaatgggatcaagtagagatggcaatgggggcccgttcaccgtttccccgcggtgaattcacctattaggtgacggggatggttaatatctactcaccatggggaataaaatggttaaaaccctctcaccatcggggatgacggggacggtgaaccattaaccgtccccgccccccacggtgacccgactgtactgtacaagggaggaattctagactttttagatgtattgacccacaatattgaagcccatttaacaggcacatatataatctaaccctaagtcaataggtcaaactccaaatcctccacccacccaaatccacaccagccaccactcccggccgagtcacgcgcgccgccggtcgccagtccgccgggagccgcgcgcgccgccgttcgccagccaccaccgacgccgccgggagccaccacgcatgccaccactcgctgccttctctcgccgggagactgaagccgccgtcgccatggactgaagccgtcgttgctggcctccttcgtcgatgcgccgccgggcctgcagccgtcttcaccgggagccgccggcagcctccgtcgacgcgccgccagcctgcagccgtcttcaccgggagccgtcgtcggcgcgccgccgagagccgccgtcgccgccgccatctgtcgaccatggcttcggcctctcccccgtaagctacgacagcgacgatgcaaggtgagcatactacaatccctaatcccttctctgtgcggggacgggttcaccacgaggaaaaattcaccgcgtggtgatcagggatggagaaattatagccccgtcgtggttgacgggggcggggacggtgaaatattttcaccacggtgacggggacgcaagcatgacccccgacggtgaattcaccgttgccatctctaggatcaacccgttcgatcctatatgtgtgccgctacttaagtcgctgtagaacaggacgcaaccaacatcgagaagcttgttgcgtgcgacaatcctcccaagaacgccggtgcttgcaatggagtctgttggcaactttttgtgacaagttaacaagcacaatcacaacactgtacctaaacgccttacggtgattgtagagtcaccaaccaccctaacccagcaagcactaggtcaagatgggttttgatagattaaaccagctagcagagccgatttagatgaaaactagggataactatccatctcgtaggcaaatggaaggttttcagaacaaacctacaaagaggtgtcgcactctcacagcggcagtggataatttacaacgcaaatcgacaaagatagacgaactaaactagaactaattgaaagtaaaaaagcaatattgaaaaaaacgattctattgattgatcgttggatagattacaattgaaccggccttgtcccttatataggggttgatcttaccctctacaggctctcctccacgtccaactcgggatagaaaccaaaagaaatccgaaacatgccttcccaagcaagaaaaattcgagacccgacaaaacagactcgggctcggactctgccggtcagaccagccacatgtcggcggtctgaccggagttcaggccacggtctgaccggcctatacacggcggtcagatcggcctgctagaggaaaacaccgttggatcccaaactttggcaattattcctatttcaatcctaggtgctaaatttgggtgtaaacacataccccctacctttttggtgaacaacgtgaacctgaaggcatagaacatgttgtcttagggtgataatccaattaccggccatagaactttctaaatatcttgccaaacactcgggaagtatttcttcaagtagttcccattgactgctctctgaaaacgctctccatgaagtgtctccaaaaaatacgcgttccctgaacaatcccgcatactcgataaggacattcccaactaggagaccaattaccgaactccttagatcgagtaccctctcccacttgaaacaattttgctttcacccttttgttgtatgctttagccactctcttcttctctttctctatttcttccaaagcctttaaacgtttgttgataacatcatcaagattatccctatcaaggtcttgtagtctccactcaacaaatcgtcttgcttgatataccgaagagagtcaagatttacctcgaccgacaaaacggcttcatatacataaatcaactcaaaaggagtgaccttagtagcaccatgtttagatatcctatgcgcccataatgcttcagaaagcaccttatgccacttatttgggtgttcttcaatcttctttttgactaatttcaacaatgttttattactcgattcagcttgtccattagcctgagcgtagtaaggagaagaactcaacaatttaataccgtaagattcggcaaaattcttcacttccttagacataaaagaagcttaaaggtataaattcgtaattacaacttaaaataaggacaagaaaacaattaccctttaaaaaacttaatttaatagtggaccataaaaaaaaccttatttcaaaaattcgactgtaacctcaatactaagtccgaagatgatgagatctaacaactaaacgttgcatagggcagcaacctctctgccgccatgctgccctagtgagttggtggccaccgtgaaaagggggtcaacactcaacatcaagagttttggcgcggacctcccaacctcaacgccagtgattctagcgatgaagtaaaggattttttttattagaagttctagatctcaacaatgctatgactgcactagatgtgatgaggctagacaataacaacggtggtgtgtagaatagcaatgagttagtagcggtacgggagtctggtgacgctaaaactcgagttggatgacatcatattatctactcccgccggtttgataatacttatcgtattggacaagagcatagttttcaaaaaataattttgaccattattttttattataacatgtataaatcgttaacaaatatatgattttattaaaatactttttaagactaatatatatgtagtcaccatatttaaaagataaatatttaaaaaatgatttataatcaaagattcgaaagtttgacctcactcttgttcaaaaggacaagtattatcagtctggagagagtagatgttgtagtcattttgagctcatgatcaaggcccctatctcattgctaggtccatttgatgctgaggttatttgaagacactaaccacccgccatgttgatccaccagatcagactcgtacccatggcggtagggaagtcacactactagaaaatcaatttttcacgcgtttgaaaaatatttttcatggcggctaagtggaaaaaccgccagcgcaaaaaatcgtgggggtgagaggtcaagggccgccagtggaaacacatcttcgctagcggttaacttaagacggccgccagcgaagataggatatcttctctggcgactctcttaagttgacgccagcgaagatatggtaacttcgctggcggtaaggggacatggcccgccagcgaagatacctacatcttcgctggcggccctcttaacttaactccagcgaagatgccatatatatcttcgctggcggtgtggtgacgtggaccgccagcgaagatacctacatcttcgctggcggccttcttaaccctccgccacctcaaattattttcaatggcggttcaaacgaaccgacatatgacgaccgtcaggaaaaatgcgctgaactatatcacccagctacagtaacttcgagcaccattaggagcacgattttctctatgcgcagatcaacattttcactggcctttgctttatgacggctgcgatttccgccaacgaaaacccaaaatagctgccacgaaagatgatttctataatagtgtttagtgctagtctcgttggcattgaaatggtgaagctcagtgttacttggcattttaggttgaggtttacttttaaaacatttaaataagcttttagcacgcggtccgtttttaaaatacgtacgtttcttgaaggattagatttcctttttttttctactcctgtttcgtccaaccttgcattgcactcgatcttggtaaccatttacttcactatacaaatcctgctgtttatataaatcgaggtgcccgtggaaactgatctgtaagcgtctgtctatttccggtgcagcgcggacagcgccagcgccaactgtttatttattggttcgctggtgacctggtgtcaacgtaccccgggcagccaattaaccaccccttgtcaaggaggtagagtaattaagagccatatgacagtctctcttacagtctgatgatctcaatatcacacgaattatactgaccaaggacaatatttatatgatggattgagatgtttgcattaaacatgtgaatatatactgcttaccgtatggcttaccgtgtaattcttaatgtggtttgacttcttctatgccttttgtcaactaaacttacagcaaaatcgaaatgtcacagcaaggagaccggccggaaagcaatctgaatgcatgcttttcacaagtcacgaccaggccgtgaaaactacggctaggctgacctgaggtcaacctttctttttttctacgttggatattatatagtacttccttcgtcccactgaaatgatactaattcgattgatttgttacgcctataaattaccaacagatcgtgcctgcaactctgcaactgtcatactgtacctcttagtttgcgaagctagcaagtctggtgtccttggacgcaattagttgttgtttgatcgaccaatcgatcgaataccgtcatccgagcagtaagcaccacttcttcgttcagctatattacccgtttgattatcttagttctcttttcggtcataaatacttgaatttcaatttgagccagctttaataggcaaagtttcagcatgaactaggaccatgcatgtatagttaccctcctttgcactttggaccatgttccatccatttaacaaaatggcacttaactcactgcataaaatacatgcaggtaaaatgatttagacaaagtaccaaaagttaccaagatatataattattgaatacaaaatgtcacatatttatgaactgatggactatacaaaattattaaaggagtaacatgttaacaggcccccttttctccaagcaacaactagcattatagcaatcaagtattttggcggaagaagaagaaaatgggagataagaagtttctgtgagtttctagaaactagggaaagggttggaggtaggaggaaaggaagatcaagttaatttcaagccttccccgttgccattctgcatctgttgtttgatccccttaaaaaaaccgttgttgcttttgttatctgccttgggctagctttagtgaattgttgtaacgaccatttgggagcccatccggtcctaacaatcccctctcttcgaaattcagcttgtcctcaagccagtaaagtgaatcctcttagatcccatggttgtccaagatccttctggctagacataaaacaataattggaattaattgaacaggacaattattttcaccccatataacttcgtagtccatttaaattctccatgtatgatgaacgatagcagcactgcaatgaattgctgttgaacagtgagctccaacaacatgtccaggagtgtgctcatctctcaggattctcatttcaccagctctagcaacaccacgtctcatctatttattgatagtgtcgaaactcaattgatctccttgagaaggctaatccctacatgcgaattggagaacacgaacaagaacaaaaaagatgacaactcaattgcagatgaatgatttataaagaactcgaagttgggtttccacaaaccgatgaacggcaaaattgcaataacaaaaataatctaagcaaaacctaaccctaactcgatgattaatactaaatatatagattctagggtcaaccttggacccattgatgtgtccccattgtactccaacacgatacacagcccaacgggcccacctggacagattctagatgccttcttgtttcaacaaatcatgttgactcagaaggaatttaacgtgggaccagatccattggaaatgtgctctcgttggctttccatgcatacgtggactttcgaaaacagagtccgaatgcaatctaggctacaattttagtgttgactgctcctggagtctgaggtggactcgatatgagcccaaaattgcctattacccctgttggaaatttggtcataattctgcatattttaatccaaaataataagataataaacatgatattcggaatgggatttgatccagtgatagtggtaaatataatcaacatgagcatgcttaatatagaataagcatcaacaatcacatagtaacgcaatgctgacattgcgattaacagtaaaaattctaattgaatagagagaatggaagtataccccaagaatggtcctccactagatggtgagacattataatgggtatacagtgtcttcggtattcacagaccctaaggcggccttcttgggccagcccactagttggcgaagggcctctatgggccgctgggcctcccaagcctttagccaaaggcattccctattccaggcgatggccttatgcttcgcacaacagccttcgcccgcgatggatcttcggttgattggcaggctaggaggcgaacccttcggtcttcattccatggcttcgccctggcatgatggcgaaccatttggtcttcgtcattcggcttcgccccttggtgttcgtttgggacttagccaatgctagatggtttgaatggtttcggcaggttggctgaaggccctcgtgacatacctccaacaggagctaattcagggctaaaaggtgggggttaataattagcccatggaaccaaacagggccctggtggcccgcacacgaaaagaaattaatgattctataaagtgaagttggagataccttttagagcgagtttaatgtatagctaacttctaaccttaagtcagctataatcaatctagtagtcttcatgctatagttaagtacctataaatatatatatcacaccattaatatttggtcccacctttcatacacacatagtgtattggagtttgtgctgcagttagctacaattatgtagcccactttcctttctctcttctcccttatctcatccacatgtgtttataagacaatcttatctcatccacatgtgtttatatgtcttatagcctgctattgtaattgctcttacttaatattctccttttagcttattttttataacatgtggatacaagttagatataagtgctcactttaagattaaattaacttggacgccctaatgtaggtgagtggatattatgtgttaaaactaaaaaaataagtgaaatctattaacttattaagtgttcgctctcgtgacctagaaaattctcatattaatcggagaaaaaaaacagagtccatattggaatacaattttaaaatagctgaaatttggaattaaaaataagaaatattgttagagaagactacagtccatacttgtatacagtagaactaatggaaattcggaattaaaaaagaaaattaaagtagatgttacagtccatataggaatacaaatagaaataacaaaaaattgaaattaaacaaataaagaatattggaataagaatatagagtccatatagaaatacaatttataaataactgaaattcaaaattaaaaaaagaaatatagaaagataagtttagagtccatatagaaatacaatttagaaataatattattttaattaaaataagaaatattggaagaagagtatagcgtccatataggaatttagaactaattaaaattctgaataaaaataataaaattaaaagaagattttagagtacatatagaaatataatttacaaataactaaaatcagcaattaagaagggaatattggaatacaatttaggagtaactgaaatttaaaattaaaaataaataatattgaaagataagtttagagtccatatagaagtacaattataaataatgaaaattcggaattaaaaaaagcattactaaaagaaaagtctagagtccatatggaaatacaatttataaataatagaaattcagaattgaaaaataagaaatattgaaagagaagtctagagttcatacaggagtataatttagaaaaaaaactaaaattttgaatttaaaataataaatataggaataaaatttattaataaaaataaattcataattaaaaacacaaagaatgttggaaaaggagtctagagtccatatagaaatataatttagaaataactaaaactagcatggtggcccgcgcagcttgcgcggctagcatcattatattttctctcatataatagtatatatgttttctcaatatattattcaaatatattaaaatgacaacataattttaaattttgcaataactttacgaaactactaatgggtaatattcatattgtattttatatatatgttagttattaattatttttaatatcaaattttaattatttgtaaattatatatattcgtatatggactctagactcgtcttttaatatttatctttttaattccgaattttctgtaaattgtatttctatatagacttcatgctcttattctaatattattatttttatttctgaattttttttatttttaattgtatttctatgtggactctaaactcatctttcagtattctttaatttttaatttcgaatttcagttacttctaaattgcattcctatattaactttaaactcttcttcccatgtttttcttaatctcgaattttagttatttgtaaattgtatttttatacggactctaaactctacttttaattttattatgtttattctgaattttagttagttttaaattcctatatggactctgtatatactctacttctaatattccttatttttttaattacgaatttctatttttttcttaattgtatttctatatagactctatactctacttctaatattccttatttttaattccgaatttctatttttttcttaattgtatttctatatagactctatactctacttctaatattccttatttttaattccgaatttctaattgtatttctatatagactctagtctcctcttctaatattccttattttttaattccgaatttcaactatttctaaattgtattttatatgaactctagtctcctcttctaatattccttttttttaattccgaatttcagctatttctaaattgtatttctacatgaactcttctttttctttttctccgattaatgtgagaatttctagaccatgagagcgaacgtggaggcttctttttctattcctttaataatataatagatttggtattaaaaaataattaagaactatcacgtatatacaacacaaaatgaatagtaaacattgatagtttggtcaagttagtacaaaatttaaattatgttgttattctaagatattttaataataaaataagaaaatatatatgctattatatgagagtaaatataaagaggctagccgcacaatttgcacaggacaccatgctagttcaataataagtggacataaaagttctataaatttataaaaagaattactaaaaacatgtgtaggcatgaactatattaccgtcaaatctagcttaagtccaaacttaacttaatttgaatgggaaaaaagatctaaattacaagttacattgtttttatctgtttgatagttttcactggatatttcctctggatataggtgagctaattcctggagatgcatggatcgaaccgaagaaaattggttatggaggtgagagttgaggacgtgaactacaacatcatggcagacgactacagtaaattcatcgaggatctccggaaaaagctcgccaatcatccgcataaggagatgatccatgatgttcccgtgctggcaaggcaacaatctcctagacagccggctaggtggatgtatattaatctggtgggcaggaagaaggacagggcaaccgtagccgttcgggatgacaatgtctaccttatgggcttcaggaacatgaacggagaatggtttcacttgggcttttcgaagtggagcgtgcccattcttccggaatcatccaagtttttagaatgcgacgtcgcttatagaaacttacttgatgtaccacaaggagaacaggtcatgagtaggttggtggaggtggagctgcggaagacggtggtgctagatgccgtccataggttgtcgcgctacacacagcgagggcaagatgatcgtattgatcgattcaccaaacgggatctggcacgcctgattatcgtgatctgcgagtctgcaaggatgaggccacactacactacggtaaacaagggcttcgttcacgacgagacaaccagcctcaccaagctgcacgtattctacttgtggaactgggggcttatgtcacgggcgctgcgccaaggctggcggccatggcccatcagacttgttgaagatgcccgggcagtagtccaactgctgctcaacgctgcggccgcgatgccgttgcgaatgaccgaaacggaggctgcctcctcgtcctttgccaatgacatgccttttgcctcctcggcctttctcgatgtcatgcattttgcctcctcgcccgatgagatggcctttgcctccttgccctttctcgattggatggattttgattactccaacactaaagctaaagccactgaagcaaacgagcagcctgcagccatagatgacatggcgccagtaaacgacgaggagcccgcagtgacgactgatgacttggcttgggaataccatgaggagtcggcagcgagcgatgacattgatgacctggcgtccgaagaccatgaggagtcggcggcgtccgatgacttcgcgcccgtagtcgacgaggagcctgcagcgacggattacgaggacgaatttacaggtcaagtccatggccgacgattagtggagttgttggccgtgagttccgacttcgacagctttatgataagtatctttgacgggaaacgtggccagatcgtctacaatcaccaccaaggacatcatactgtcatccacgactctcaagtatgtattactcgaggttgttatgtgtaacgcgcaactttttttaaagaaaaatcattggtctaacttatatatggagtacatgtggttttacgaaattaggacatgtaataagtttttagaagttgatgaccgaacagctgattaaatatatataatcagatggagtacttattatatagatggtctcttgaggtcatttatatatggactatatatattttcaaaccaatgaatataagcattaatttgcccttcacaatgcatgcagcgcaatttggtgctgactggaccatatagggccatctcagctgacgggagctttctaattgaagttgataccaacaatgaggatgtccatcctgataagaaaagaaaaaacaatgagagcgaggtctcatctgatgatgttgatggcactctgttctgggacagctataacgattacaactacactaggtctgacaggatattggctcacactatcaggacaagccttggccccgttgaggtgacctacgcggtgctgaccaacgccgtggaggccaccgtgcaggtcaagctcctgcttctcactggagacggcgccgccacgtttgctggcagtgacaccctcttcgtctacggtgacatcacggtgcgcagccactgcttcgacgtcgcgagcatgctcttcagccatggctcgcagaacaaggttgcagtggcactcacctctgacaccgcgaccattccactgtcgcggtgtgttgttgcggtgccactccaccatcgggttgagatagaggcgaagctgtatgttgaaacttccaacgaagaagagagtatcaattacacttgtttccaaggtaagctggacttcgccgccggccgtgaccagcagatacaacagatatcccacggcgacaaccctgcagtggttgaagtcacctggtcgccggacttcttttgaaggtacattgaactctcaacctatatttcaaatgttttcggattagttggctatatgcataattttcagcacttatctttcacacttacagggatcgagtggtaaacagcatagatcgagacgacggtcgatcggcggagattctctatggtgaaaaccacaaaagtattgtaaggtgaaccaataaatggttcgttctagaacatccaggtatctagctatatcgcttaattattctatatgggttctgtataaataaggctcttcatataaacggaattgttttaatacgaggatttcgatgaggagaagcagatttgtgtgctatactatgatatgtaccgtctataaaatattgtgtgctctgacgttgtgtggcttttcgaagatctatcatataggtgattgtgtatggttgtgaactcataaaacaacaattattgtatccctccaatagttttgtgttaattacaagtatgtgactattgctggtcaaaattactatttaatttgtgtatagtgcaaaattatagttatgggtcgcaaagagcatggccaaacaatccaatatgctgattatacaatggaaccccggaaacgccaactcacatttcaaatttcaaacgttattgtattgaactttggcaaagagaagcaacattagatccacggttgcaagaggttaaccacacccgaccccatctgtctgatgctcacctccaaatgcctttctgtcggaagaaaatgtgccacacacagatgagcaatggaaaagtatgcaaccaggtagctcatgttgctgcacaatcatgaaatggtatagaattaaaattatcaagtccatttgtcaaataaaagcattggagaacatgagcacagcttgaatagaaccaaatcaaatcagatggtagaacgaagcaaaacggatcgaagagacagagagaaaaaaaaatcatagacaacaaggaacgagggggggttcaagaggtcaaaaaacttaaccatgcttgttgccaaatcccatgatgaagcgtagcttctctgcagtggcatgctaggaaatgcgctaccgtgagctgaatgcttcttctgatttgtgcgacacctaattaatactgcaaaagcattaacatagtggctttggtgttaggctcaactacaaaagtgtgataaagacatcaagctaataaatgatacatgtcgtaaacttgagtcaacggtcatgtaaatttttgccaacttcggatgaaggttcactaatagaattcaataattgtgggtctttcgtcttgtgttggtgcttattagtttgtttcttttctttttaggtaaatgttgctacatgatacccaaattttgtgtaatttgcttatagacattgaaaaacatgtcatggttaaaagacatcctaaaaaacttgtaatttgctatatgaatttttcgacttaattgaaaagataaattgttaagaaagacaagaatgcccctagatcacgtgcttcaaacacaacgttagagtaaaaatttagaaattatgcaactttaaatttagcatcacccttagtacatcactagtaaatattatatttcatctttactctagtctcagctcaaaaacttttgaccatagtttttctagattataaaaaggtaaccacaaatagtcttagactctcctaaacggcttatatataaagctaggcgacattgccgatcttaggtcttaaagaaacattaaaagcccaaaaagacatttgaaaacttttgtatctatacggtgaaagcagcaagctttcttacacgagaatgtgtcacatcatcacaaatatattagccgtcggataaagagtttggataaacaatggccattggattaaaagggtatatgtatttaaaaaacacaaatgggctaaacatatggaaatttctggaggtttctggcacctcctcctagacacatgataaaaaagagagttaaaagagagaagaaacacaagacttctagtgattgctcttataaacatataatacaacttagttaaatctataattggctagcgaaatcaatacttatatcaaaacatttttaaaagcttaccttaactaatagaacatatagaaaagttcttaaacaggattaaaagtcgcgcaacgcgcgactatgtggctagtcttccagaaggaaattcgcctccaaacaggttgggctttaaaagcccaaaaccagacctccctcccgtaaggccggcctggacaaaattctggcatgggccctaatctctgaaaaattccaaactataataataaccagattattgaatcttcccatggctgacaagtgggcccttatacagagagacgctgacgccagcatgacgctgcggtgacgcccaaaatttcggggaatgggaccaaatggcacgcagacgcagcagcaggtgagaggcgacatgcatgcgccggccggttctcacctcttccatttcagcaacagctggaaaaagcgccaagaaacaaacacctcatcatcaagccaatgcaattcaaccccacaaaaaggccttccgaatgatacagctcacatcatcacaccagccacacatctgcacaaggtctctgtaactgctactgctgatgatgaatcattgttcatcaggatgatatatgattcacatgaagaacagaagtgagcacaacagaagaagctcctctccatttcagaagtgagcacatcttgtgaacaaaaagctcatggaaaggagggcactgattataatgtgaacacgtggcagatgaaccagcagggaagccattataatgttgtcactaattggagaaatactttaggttacagaggatacaggacagtgactggatgatgatgatggaaactcaatactacattttcagaggtaaaaggaggagatgatcactataattgaggatcatcagatcttttcttccaaccttgtgcttcttctgcacatcattattgaccttttgccacaactgtgagaaaatgcatctcaaactagtgggttttttaggtacatcagaagctgaatttttcctctattggttatgtacaagattagcaaacactctcaggagtttcagttgtgagttgtgacatgcagaagcattcactagttcaaaacaagtggaaatgttcacttgttcaggcctgagttttggtgtcagggacaactacaagtccagaaccatgaaaaagattgcacagaagactgaaatattagggtcaagtacatcaaccaaagtagaaatattatacaggagtacatctaaccaagctgaactacaaagccgacatgcacctattcagtgaatcaggttattgtttattaacatatgacaagatctgcactagtatcttttccatcctaattttataatagtttggtagcagcactaatacagtttgacctgatcttttatgtcagatagaattatgcaggagataagaagatcacctagatatagattattgacaatatcacacagacaatcttgcaggggtcttatcattattggcactagaatttaactcataagtgtgtgtaatgtgaaatctgttactccgcactctatccatgttgatctcctaatctaattcttaatatattatattttctgctggcaagaagccttcaaataaattggacaacagaactgatccatcacaaactgcaatccacaatgaggaactcttaaaaagattcccatattgaatataaaaccaaattaaggatttcacagaaccatatgtagaactgaaaggatggaaaaagtctacaccgctacagcagtacttcataatgtcaaacattgctgaattttgcacgcatgatagtttcaagatttgaccttttgattaaaccatccaaatatcaggaccaaacatgaattatgacacaacacaatcgaactaaaccacagtagatttttttttcttgtttaatttttttgtcgacattctcgacaacaggccacatttcatagcgacctcacagatttttcaactataagttactcccagaattagccgcgcacacatggaggactaacaaaaatgccatgatatacaccaaatgcagcatcaaaacatgggaagaaggaatcatctttacataaagatggttcctttcctttccccccttcctttacagaacggcacacattttataattactactagaccaccacaagtgaggaaaaaaaccaagaacaggagagctacctataaccaccacatttgcgcgatcaaatccaaattctcgacggttcgatcggcattacctatcaccaccacattgcgcgatcaaatgtgaattctccatgtttcaatcggcgttgagcatcggcgaatcgagcccctccatgcggctgcgaacaatgcggtggaacacctccctgacctgcctttcgagaggctcaaggccggccctcatggcggcgcacacggcagccagctcggcggcggcctcccgtacctcggcctcgcgctcaccggagagcgggacgggtgcggcgtcgatcgcctcggcgagccgctgcgtgcatttctccagcgcgtggatttccttgaggaggccgcaggagttgcgcctgtccttgcgcttcccctcctcggtgaggcgctcctggagcgcgagcagcggcggcgcccatgggaacgcggcgcgcggcggcgcggcggggaggtggtgcgcctggagcgcggcggcgcggtccgggcacggcacggcggcgacgagggcccacgcggcgaggtggagcaggcagcccatggagtacaccggcgccacgagtcccccctcgtgcgcgcgcggcgccgccaggccggacccgatggcctgcagctgcctagccgccgaccagttgcgggagacgctccacgagagcgagcggaagtgggaggaggaggaggacgacgacgaggaggatgaggaggaggcgagcgtcgcggagcgggagggcgacgcgcgggcgcggccgaaggagcggttgcggtgggaggagaggaaggaggcgacgccgccgccacccgcggcggccgcggcgtcgtcgatgaggagcaccgagaggtcggagagcgccttccgcgcgcggcggagctggccctcgtggatctcccctggggcgagcagcacggacgccgcgatgccggcgagccgctcccaccgcctgacctggtcgacgccgtcgcgtgcggcgttgcacacgtcgagcgccttcaccgcgcgctcgtagaaatcccccaccatcttctccgccgccgccgacagcgccccgcggcggcgcgccagcgccaccaccacccggaactcctcctggcacagcaggaacgcctcgagcagccgccggatccactcgatggacaggagctcgtcctccccgcccctgagatcggcgaggtgcgccgccacgtgccgctggaacgcctccaggtcggcctcctcgccggacgccatggccggggacgcgccggcggcggcggcggggctgtcgcggcggagcgagaggagggagcggccgaacgaggagaagggcgacgggtgggagtgggtcgaggaggagccctggtagtcggtcgccggcatggtcgccggcgagatcgccggagaggaaaccgaagcggatcttggagagagagcttagcgggttaacgggtgagatggatggagatggtgaggtggtgatgtgtggatggatggatggatgggtgtatatatgtatgggattgtgattagggaggggattagtttaatgatattttggggtttagggggaagtggtcttagctaatcatgattgtttggatttgtttaatctttggtttgtaaatgatttctttctgtgggtgcaaatattcttctggaactgagaatgtttctagtttttgtttagctttctctctcagggggttttggtaggaggggctctaaaagggttgtaattactcctgggtccttacaaagttaaaatgaaatattgtcatcttttgcatagaatgaggtacgagcattttactatagtggaatacttgaagagcccttcttgtttgagccgcgatttctaagttgttgctaattttacgtcgtaattttagaattaattcaatggtttatttgccgaccttttaactttggaactgctaagagtagaagtacaaaattgttatcctatttttttattgttatgatcatgtattattggtttatatatcgcaaccatagaaataccttccaaatcggccggtctcctcttatcattgttaaaaatgtattgccttgaatacgttaacgagcatgcttgtttgagctacgacttataagctgtagctaaattcagaccctaattctagaattagtctaatgggttttctcaaccttgaactttttgactgccaagagtacaatcatatagtttttatcctaaaattatctttcattccttcagtcgtcgcgtattttggttttatatatcgtagccatagaaataccttccaaataggccaggcccctcttgtggatatgaaaaatatcagcaaagattgttgtttgtgtattcatcttcttctcactgtgctactacagtgatcagctgactatactgacaatctgacatgatgcacaataattggccatacttcatgttgatgcatggccaatttgaggcagacacaaaaaccatcaatcctggagggcttttctgcaaaagggcaggatcagcagccagattaattggcgaggtttagcttaaccaaatcgcaaaactaaacaaatccgatcaaactccggtgaccagtcgccatttgcagaggggatcattagatcaattcattatcatcaaatcaaaagagaaaagtaaaccaaaccgagttaagcccctcgagccgagacgaatcaatcagcaaaaagctagtgctacgcggggaggggagtggtacacgcggcccgagagtccctgccatgtgggcccgacacgcgtaacccgcccctcccacgcggggcccgtgcgttcacacctccacccccacgattttacctttctaccccccgcactccagtgctcgcgccggcgaccgacccgggggcagtttgggaataggactaccgcggcgcacgcggggcgtgggcgcggccggtgggcgggtgccacgcggccaccggtgaggcgcggcgcggggcccgacgaggtggggcccaggtggcagtgggaaacggtcaagcggccgcacgggcgcgggtcggaaacggttgggatgaggtgagggtggcggagccggagtgtggtgcggcgcgtgcgggtggttgtacggacggaccggacctggccgttgttggtgccggtgaaacggggtgaggtgtacaaaagcctatcagggactggagtcgtgtgcgtgacatggtgagctggcacgtagtagaggctgctggttatggttggagttttgtgatatgctcttttatattgcaggattttatttttaaaaaaaatcagtaaactcagtcatttcaattttagagagatgaattagaggagttgagaagaaatagtttcacattataataggtgtggaataaatctctttcaaatcttctcaatcctctcctggactaagggaaatttttcatactctgaagttctgtcctagctaaattctcagtggtgtttatgtacagtgagatgttattgtattgtttaaatggaatctgattgtttgcttgttgacttataagctgaaattcaaattttcaatcttagtttctgttgtctcactttttttttacggcttatcagctgaagccaaccaataaaaccataaatatgtaaacaatttctcttaccatggaaatatagttgttcaattttaagtcctaaatttaagatgggtgctcgtatttactgctaattatatttttagtggtaggtgatttatatccatcgatagtgagatgtttgtaatgacgcaatcaatttaagacgcactggtttagtccctcggaaagtggatgtggtcatagtgtcatgttgtgtgtgctcgactgttcgtttatacaaataagtgtgcatatatttgtacggatttctgtacaatatttttgttggaattaatacgtgggctactaaggctcatatggagattaatttttttgaaaaatcaataaaggtcccctcttggaaccttcgtccttcgacattctgtatcgggagaagacgataattagctttttggaaacggctcgcgtgactgcttgctggtctttcacgacggctcgtcttcctctacactctagggacatccagcaccgccgttgttcctgcagtgcgcgctgctcctcatcaatctaatccacaacaaaccagagctttcgttatgtgttcaccatgtatcatctattcgatgtgctcagggtttactgtttagtatatatgtctagatcgtatatcgtggttatgttagtatacatagtcaataacgtgatttatttatgaaataaattaaatctacgtgtgcttatattaccgttaatgttttgcatcggaatgttctgaagttcttggccgctttgtaacccgtactaatcgaagcaacagtgggcgaagtggtcgcaatcatgcatcaatcttcggggatccacactacttgtgcctaacgtttggtaggccgtcaaattacaaaaaaatcggcgatgctttttggccactcgatcttgtacgacttttgtcattctccaagccacactatcagcaaatgtttcaccgatggtggcattcgatattagccggtgtggatttttttttctttctttctttcttaaaaaaaaacagcatatataagtacttctattatgaaaatgtcaccgggaacatctattgtctaataataattgggatcgagcaattcatatactcccagatatgtctccttttttcaagacaggattcaataatcaacgtattaagctatggaactttattttagatcttgttcggttaatacatctcttaaagtattgaagctgtggaattaatttggagaattcctttatcacagattaactacacaaatcatgagaagagagttgacttaaaaataagaggtgatgcaagaaataaaaaaacactaggtacgataaatcaaaaaaagcaaaggtggggcattgaaaatgctactacaatgacgtggagaagtggtggccagaacccaaaacgcataaaaaatggctcgttaacaaacatggtactagtctcgtattaatcgagggtttaccttatcgtttccagatgaactcatctactctccctcgattcaccgatcaaaaaccgagcaaattaaaatcggtctgtgcaccaatacattaaattttaggtgtacaaataccctgcaaatatttatgattggtaaaaaaacatattaaattgttctagaagaagaaaagtcacaaaaccattgcttgcaatttgcaaatactccagtgtaaaggggagtactccaagaaaacaattctgccagtgggcccaggtggcgtggccggacacgtaaaccagcgaatgagaggatagcatagccaagggttggttttccggggaacacacggccggcagccgttgttgttgtgacttgtgagggaaggcaaatccaagcctgccttgctgttgccatcgtatgggaagaggacttgttgcttgtcttgtctcttgcatgctcagtgctgcatgcctagctagccggcatgttctaattggacaaactcactactgtttgttcatccattccgatggattatgacatggacatgtggtcttctatgcagggtctcccaaaccactgtggccggggttaccgcgtcccggcggtaagcacggttaccactgtataaaaccgtgtaaaatttatcaaaaatttaaattgttttttaaacttatttgaatttaaggaggttaccgcggtatttatattaccgtaccccgtgataagcccggtaaccgcagtaaccgcgcagttatcggcggtaaggtaacccctgcttccatggctatgtttcgagtagattttaactttttttcttcaaacttctaactttttcgtcacatcaaatgtttgaacacatgtatggagcatcaaatgtggacgaaaaaaaaaccaattgcacagtccgattgtaaattgcgagacgaatcttttgagcctaattacaccattatttgataatgtgatgctatagtaaacatttgctaatgacggattaattaggcttaataaattcatctcgcagtttacaagaggaatctgtaatttgttttgttattaatctacgtttaatacttcaaatgtgtgtttgtatactttaaaaaaaaattggcacacgaactaaacacagtctatgtacattgtttagtgtcccttctaccggccaattttgacatgcttagagcaaggtcaataacatagcccgctgttggcttcaaaaaaatagccatgacatctatagtaagcagtgtagctaatgtctacaatagaaatactataacacgaatattttattgttttgtgggacccaccatcttctcctacctcacattctctttctccctcctatccccttagttcatgtcttcatgtcttcttctttcttgagctagcttcgattcgctgtcaccgacaacggaagacggcagtggcagacgcaggagatggcagtggaggtggaagacggcggtggccgtgcggcgggcgtcgaagatagcggtggccgggccgcgctgcagaggcggaagacggcggcaaccgtgcaggcgagggatgacgggggccgtgcagcggatgtgggagacagcggcggctgtgcgtcggcacctgtgagtctaagggcagcggtctggtggccgcgggagttggcaacggaggcaggccaacgcaaggcatggccgatgcttctccatctaggtaggccccacaaactcctcaagcggcgcatgcagcccgacaacaaattagtcgttgtctctatctctctctctctcttcccctctctcctccagatcatcacaaaatcctacgtggaactactactgcccattattaattgtatctgctcttattaaacataggttaaattatggagtaaaatgcaccagcggtccttaaacttgtcaggaggttttacttatgtccacgaatttgcaaagcgcacatcgaggtccctaaacttggtttattgtatcatcccggtccaaagccgtgtttgaccgtggtcttgcctacgtggcatgccacgtggacgatgacatgaattttttatatttttttctcccttcttccttctttttttctctttcttccttgtcgaaaagacgaaaatgcctcgcacacgtcatcgtccatgtcatcgttttttcataaaagagaaaaaagaagtaagaagggagaaaaaaaatataaaaaatccatgtcatcgtccacgtggcatgccacgtaggcaagaccacggtcaaacacggctttggaccgagatgatacaataaaccaagtttagggacctcgatgtgcgctttgcaagttcgtggacctaagtgaaacctcttgacaagtttaaggaccgctggtgcattttactcttaaattatgcaatagtttgttaccatatattactttagcattaacatatactatctccgtcctaaaattaaccttaactacacttcttcacgaaaaccttaaacctgttgaacacaggatcataaaatagcctatggatctgtctggttacatgtcacatattgccaaaccaaatactattagactagttgtagtttgttaggttagtgtttggttggttgttgaaattgtggcaagtcacattttactactttatagacccacatatcatagatacaatttatagccaaacattaccatacttgtgatgaacaaattattggccatatgcccaaattttgtatggcaaagccccatacttatgacaaatttagctgtggaaagctaggcacaaccaatagaagccaaactaaccaatagaagccaaacaactagaggtacatttccatatatcccatcatggaagttatgcttttttacataattctacttgttgtgtgtgaaaataattttttttatcgtaatgtacgggcaattaactagtcatgtgttaaaaatagagttttgacaagggggattttaaatttcgtcactcaagtaggaatttaattattcactataaaattaataatgtaaacatagtaatggattcgaagaaaaatatctgatactcttaatacgtgaaaataaaagggaacgtacagatggacctggtctcatgaaccggtcaaaattccagctgaagtgttgaccatgcgataccagtagcggtggtagttgttcgttgaacaagttcagaccataagctaatttcaaccagagaaaaaagttcagacttgaagcctgaccacacacacacttggcacttgtatataggcagagacacatgcactgaacctgagtactaagagtatcagataaaatacctacagtacctggtactgagtactgacacgtcgtcatttcatttgcttgggaatcaagaagaattcaggatacatcaagtttgcattcattagggagcatctgctggttccctttctttcttttttctctcctaaagtggatggatgcttcatggcctcactcacacaaccctatcgtttcgcctaagcttataagtcaaattttgtattttaaaaactaattttgaaatcaattttatgcttttttcaccatagttttattttacaggatttgcttttgaactggtagggacacctgtacaaaagttgtgttcataaattattatttgttttctaataagccataaagataagaatttaagcataagcgaaagaatgaggcggtcagtaatctcagttatcagaatggttcgctctcagtgataggaatatatactatctgaattgatgtttttggtcccaattctttagtatttcttgggctgcaggaaatgtgttcatgcttgccaagttgatcgattacatttgacagttcagtcactgctactagatacctcctgatctaaacaagatatatttcaccttaattcagggtaaagccaccttttttttttataccggtaaaagttgattgtaatagaagcagatgttgtatcctctactgtccctttctggccacctaactctagaaagagaagcactgtatctaaaataggaagtcactttcgaatctttatttggatggagatgcaggcttacatggattgtacaagatcggtttattttagtgcctgccgtgataagatctgcatgatttgggttgcaaaagcctaactattggtcactcttggaagcaaacatagtatgcgctttctgatggtgacactggactacttgagcctaatacaaggtacaattatccacctcacaactgaaatcatgtggacttgaatcaccaaattattagctttctcagttaataaatcactggagaacagtcaaatgaattctgcgaaaattatccgatgcacatacagaatacctgttatagagagagctatgggtcaaaaagaaataaagataacattcaattacaaagcaaaatcagaataaataagctaaatgctaaaataacaatttgccttttgttgcttgggtgtttctgagttaacacatcatcagtaacatacaacagaacggcgtcccaggctaaacttggggatggtcagctccatccaggggcatgccctcagggcgtcaaataagaagcatccatgatgtttctggcctgcctggaagttctattcgcaggccagcttggtgtcgaaactactcagggagatagcaaatgcctggaaggctgagagcgggtagtggtaatccatggtgaacatgtccttggcaaccttcccgaattgcagtatgaccttatcatgctctggtgggggtggtggaacaggctgtgatggagttggggctcccgcagcaggctgcgtggctgcgatgagctggaagttcttgacagaagcaacagttacccggccccggaagtttaagcaccagcactgtagctgctcatgccatcttggagccttgttttggagaatcaaaggtgtctccttgcactcctcatcatcgctcaatacccggcccccaatccttgggccatctccaattgagatgtcagagaactgagcactgctgaaatgcatggaatggtccataacggacgatttcgaaaaggagacactcctaaaggaggattcattgagggaatgggcaaggatgctatccggctggctaggaacagtcccaccagcctcaagagatgaggcagggatggagtgcattaaacagcacatccgcctaggaccccgagttccaaagacgtttagctcatatgagatgtttgctatgctatatgtgctgcagggatgctttgctgttcccttgttggagaatcttcggcttgttttccctgactgtgaatcactagttgcattgtacggagtgtgggtatcatatattacaaactttgtgccaaggaagtttgacctacaattcaaaatggagacatattagcagcagcaataatttttagattaaaatggggtaagttctgaaataaggttgtagtttcttcgggttaatacctcaattttccaatgtttgtgttggtagacctagataaattgttagcattcatagatatcacatattctgtacatgttgcatgccagtttctttttgctgatagaaggaatttgccattgtcaacaagcacagctgcagaaaagggaaatcaaaacatctaaaattagtaaatgctggtactgaaatactaaaagtattccagcaaggaaacaaaacatatatgtgcaccagtgacggagcacgcgcaaaaattaggtgggtcagacacacaagacatactgaagtaaaagaatgacaatgcttgcatattaaaacggtacaactcataagacgattaaaaataacaaacaaacaacggtttccaccatataatattaattcgttgtgcataaaaatattatgagaagttaagaacatatgccgacatcaaagcagctcaaatatgtcttgcatttacacacataaaattagtaaatgtctttccatacatctcatcccgagattccctcctattttgtttcgtcgtcatttcctaatatatctagtcggcaattagctaagctcacttgatgttactagcaggcggacgcaaggcaacagaagaggattgagttcgcacaacagggctcaaagggctagcagtggtcgactttgaggcccgtgccggccgatggcagagcttgtgcagctaggagctcaatgcaagcacgctgagctcatcgcctcattctcacgatgcatgcgtgcacaacagtatagccttgaggccctttgtatctgatgtgcactatgttacctataattggaaaccaacaatgacagatgcacacccacatggacacagcaaacagatagcatgcaattccaatcaagcaaaggacacagcagctcaaattacaattgcacagaaccagtcccacttgtgaatatactcgcaccatatgggtgtcattgaactattgaagtggttcgaatgcaaacaatctcaagagaacaacctacttgtgcataacaacgggaatatattttattagtgtactgttgcttaattgacattatcatggatcaggtcaactttttttccagattgtcaagtcaagtagtaaataccaagtggtataggtcaggtaaaacagtagaacaagtgcatgacagaggtatacaatactaaaaaatagcacttaattatacataacaactattgtgtgctgtatcctattattttggttacaaaaatgagacaacttattacagaattgtagttataaagaacctaacttaactgtatgaaagccaaggaatgctgaatgatctgttcacaagttcgcttgtgcatgattgtggaagatagacaatgacaaataaggaataatatgtttctagcatattcatgtcaaatgataaacatggcaccaattaccatcccaaggcaccatctaccctatgcaagggctataagaaagaacagctcttcatttgctatgcaatacaagcatagttttggcagaatatatgcactcattcagcagctcacaagtatatacaactacatatgaatcttcttatgcagaagcaaatatgggctctggtacataggcgcatacaacataaagcatatgagatgtaacaagtaacataccagagccaagagagaggtacaaatagtaggtctgcgtagacttatccctcctaatgaaacactgcatagttccatctcgtggcccaggctgtacatagaagcggaataacatgaacttattagcatataagcaaacggtaatcctgcaatatgtgggtgttctttctatttttgtgtttcgaaattccaacaatatgttgaaggacaagcacctaacatggacgaactgatattgcttgtaaaggatataaaactaaaaacaacacaatttgcatgatcacctgcctcagagaaatagggaaggtgatcttcccacacaactctggattcttgacgatctctttacacatctccctccatgttctgcagacacccgcacaagcaaccacatgcttcctagaaggccatgtagcctcactttcttccaacctctcaatgatatcacgaagcaattccggaggcaagctagcccagcagctgctctggattacaggcaccgggtcatgcaactcatggacagcaccatgagacttccccctgcgatgccccagaatcctgacctcaaatcccctcctcgataggctcccaaatccatccctcacatcgcgcacgatgctgcgaaacgacatctactctctgaaaaaattgagatctctcctcagctaccaaaagggatctatacttttcgccaatgataacatcccagagtaattccagaccaactcaaattctcctcattattgttgaccccgcaaaaagaacctgcagcacaaatgaattgaattggtcaagattaatcttcgattattctttcttgaaaaagatgggagactagacgacggtgccgcgcacgatggcgacgttgcccctgccctgcgggaatgcaggtcacaatgcccccaattatctctctccacaccgattgcagcagcagtagcagggcggaagctacgagggggcacgcgaaaatgctggattcggcaagcctacctaccaacctactccccggtctcccgcgccgaagatgcccaatcgataaacacgaaacaaaattctctgctactgcaaaccttgtcgtgctcgcgcgaagagggtagacgcatcgtggaagagagcgcccactgctccgccggatcgagcccgccccccgtcgccgcccgcgtcgagccccgcgcgcgcgctgcccgcaccggatcgagcgagcgagcccttccgcgcgtagggtttggtcggggcaaccaattgggcggaagggggagaggggaagaggaggaggtggtggtggttgccggcggcggagatggccggagacggcgggatcggcggaggtggggatgcgatgcgaggcgtgtggtgtgagaggagacgaggcgagagtgtttgggatttctttttatttattttaacgtgtcgtggtccctacttcatacggtgcggtggtgtgtatattcattcccaccaatataaatgtgaaaaattctagaatgacttatatcgtgatacagatgaagtatttgatttgtttaaactttatgttaagatataatcatttctctattattccctccgtcataaaataacataacttcccccacccatttatcgccgcaaagactttattttgaaacaatcaaatatattagaatttaataaagttagatacatacatcgagatgtgataaagcgaagattattgtaggcattgttttagatcccatcccaaaactttacatcatgtcacatcaaatgtttgaacacatacatgaagtattaaatataggctaaaaaataactaattgctcatattgcgactaatttacgagacaaatcttttaatcctaattgctgcatgatttgataatgtgatgctacaataaacatttgctaatgatggattaattagacttaataaattcgtcttgcggtttactgacagattctgaaattagtttttttagtagtgcccgaacaccccatgcgataccctatataatacgcgatatgagacaccaaaactttatacacctggatctaaacacccccttagtcttttaaacattgtatttgtaggtgtaacaccgtcacctcttatatcaactaaggtaattatttatctggatactgccaataataaaggataatctagttttttatcttcgtgaaaaacttcaaagatattatcccaaaatacctttggatacttcggagtattttaattttaagagtattcacaattaaaacttgactgttgattttctttcaaaatatgcttttagtagttataaaatcagagtctgaaagcatttttagtattgaatgttacaattgttatacggtaaatatatttgcagtattgacctactgttgatttaaacctataaatttcaaagtattactatctaataaaaacgacataagaaaacgacatgaataatatgataatcatttttgctccaatacaacaggacatatatgttgattaaattatcggagtcatcatttggcttatatttatgcatatttgtattacttattagcaaccaaataataatttatagatgaaaagtttatatacgtatttttagcaatttaaaaagtaaatactgccaaataaactacaatgataaaaccataaaataaacttcaaatttgaattttaaattttcaaaattggtttataaacatacatagcgaaacaatgggattatctgtgtagtgctgctgatgcattagttgtcagcttctgctattgcatcagcattgcagacgttctgcatccatagcaaaaagatggtggtgtatgtaaaaaaaatcgtttgcaaattgcgagttacggaagcgctgtgttactccatccgtcccataatataacaaattttaactttctacttacactgtttgaccattcgtcttattaaaaaaatttggaattattatttattttatttgtgacttactttattatccaaagcactttaagcacaactttttattttttatatttgtacaaattttttaaataatacgagtagtcaaacagtacccttatattaggggaccccttatattacggggacggagggagtacatttattgcaattatgcggtcgaattttccgtacgctctctctgcccggcagcacgtactgtactgccgatgatgctgcagggtcactgtgtatggtcctccgttctgcatctcggcgatggctctcatcccgggcccaccaaggcctggtcaaaagtcaaaactaacagccatatacgccaatatgacatgattactgtaaaacgaaggtggtaaaatgtgatattacagcaacaacaagcagcagcaaagatgcccggtccatgcagctaccattcaacatacgagttgaccagtcaacattgaccgagggccccacacacagagacccactgctttcttttcacatcgccatctggctagcaaggccaccacattttgacttgacttcagcattcatggtcaggaagagtacccccttgattgagtaaaacaaagttggatagaaaaaaatgatgaaaactttagaatacagatggagcccagtatcacatggaaattttacaagtagagagaatcaggagatataatgatatataaacaacaagaggagaggatcactgagctagctataaagcattgaaattgttgtcacttgtcagtagtcacagataatctgccacctctaccatcttgcataaacaatctgccacctctaccatcttgcataaacacggtcctgaattgaattgatctgcaacctgaaattaacaatccggggaacgaattgagtttcagacaaccattattcagttctagagagaacttggaattattggaagagcatggaagaaacaaaactcaatgcagaaaataacaggatgctaccctgataaccatctgcaatccattttagaaaaaactataacaatgtaatctgttttagaggcaaacgttcagagttaagtcacatattttcgctaaaattagccataaatttaagatttaaaattcaaattttggctgtggttgataagctaaagagcaaacgatggagttggctaagcataggtgaaccagctaagctagactcatcagttatatacttacgagttttagagtaaactctctgtaataaagcataccatcatatttaaaagcagtgttctacatacagacaaactgtaaacattgttcgtgcaattgaacaaatataagctacttcttgtcaagataacaaacaccataccaattacccattaacaacttatccatacaagagtaagaactaatatctgtttaatcaggggaaaaagaaaaatttggatattgttgactttgaatcatgaagattattggatattgaaactcagcttggaagtgccaatctgacagcacacaagatcaccaaatccgagcagcatcactatttgtatcttggtgatgcagttgcttcccttttgttatcttttattcgctgattatgtttacacccaagtacaccatgtatagaaccacagtcattgcagttgatcttaatactagtcacgaaataactcccagttgatagtacatatctaactgatgccttctttgctgtagaacagtaaaatctccgtcaaaaactgatgccgcctctatctatggatgggactaatttttgtactacaggggtttgggactataaagctgaagtaaacactatcaataggaaacagccccaatgcatgatttccatagttccatatacactagtagcacagtactacctaaaaacttgtcatgaaaaaactcccacaagaagctacccaaattataaacattgagcattttttagtaaaagtaactgaaaatctagtccatttgcttaccatattgcgaaatgaagtgctaacagaacaaagatcatggatgattagcattgccctttatcttaatctcaagttctagctccttgtgtcttaggtcaagctcaaaccgcttattctgaagcatcatttgttcattctccaacgccaacttttccaattccaagtccttgttcttcctgaacatctcccacttgagacgttgctttgcgagttgcacagccttggtttcaatctgcaaacgatgtttttgaatctctgctgctttcagagccaagtctttttgcaccaaagccaaatcacatccatctggaaagggtttgttgatatccaacacgtcatagggatcagacctcccactaccatcattcgagcatgaggtgacaaaacctacatcaccatgatctacaacatgccacatccttttatgcattgaggggccccttatattggtatcaactgctcgatgttcttcctcattctcctcataatctgaatcttcactctgatcatcatctagttcagcatctccacttgcatgcctcatgaaatcattatcctctttacatctaagagcaagctgtagtgactgctgaagtgcgggatcttcaggcagacttatacggttattattatggtaggaacacatctcttcatagaacaagtgtttggagttcagtatcttccttgcatcctctttcatcttctcagaaatatccatgtgatcaagaagtgagtgattctccacaacattacaagcagtaccccttccaaggatatctgttagtcttttgtatctcttattaaggtcattgaacttatcctcacactgctgtggcgacacatggcaacctctctcgcccatgacctttgatattgctttccattttcccttcttttgcatcattgaatagttcctcctcccaccgcctaaatcagctccaggatcctcccctgtgtaggatactgcagtaatcaaaagcttcaccattgaatctgtccacttcatccgatgccatggagagcccttcttgtctttgccatcagcagcatcctcattcatatcgtgctcctcttcatcactcccatggttctttgagtggtgtctgtggtgatggtgatgatgggcaatcttcccatgttgtcctaactgaactccatcagagatgttatcaggctctgtaaccctatccataggaatggtaaaattccctggtatctgaggctggttgaagccctgatttcctgagtttggaggatgcatttgcttggagataccatgcaaatctaaactcccataggaaggtccctgtgtcatattaccaggtgggttgctgccttccatttccccaaagcgatcacccaaacacttcaacttcttgttggtaccatataagatggacacaggagtgcacgaggatgcacatgaatataacctgaaatggcagtttggtatgaatttttggaaatccaacacatgtatattgcacatttctatacatctcaatcttcagaatcaatttgctaaaagaaaaagatcttcagaatcacacaatatatcttaactagagtccatatgtaatcagggccacctaataagaaataactaatgcacaaatttgaagagattttaaatcagtgttacacaataaagggtaatttcagcctcctatagttgtcataattgccaaagcaagataatattggagcactaaaaatcagagtgttctgaagaatctaaactgcatcaaccaacaacctaattaatcagcagcacaaatgacaaatcaaaccatattactccactgggtaatgtgagtggaacaattttaaaacattattgcagtggcaagtggcaaccaatcaaccactagccaaaacaaaaaaatgttgcaacctttccatgctactcataactaacgagaagaaaatgcatggggaaaaataaatcaatttgtcacctcacaagaaaaaatagtaaaaacaaagtgtcgtgcgcaaattagctgtccatgtgtaataataatccacgaaccacaccaaaatataaactatcaaattctcacacgcacgatcagtggcagaggactaaaaaaagaagaggtgtggctcatgaattatcatgagaatcaacccaagaataatgggaaaaaaattctcaaattgcaccacattgtaccacacaatattatcttaacaagtctatattaagcatgacaacaacccctcatgacactaaaaattacctcaagtaatgaagtttcagcagtacatgggatagccaaaggaggatagacatataaataatctgcaaaacagatactcctagcaaagatggatcgattaataggctatctttaaggtggataaggcaaatagcaaagattgaatcatcctgttgatctgctgctgctgccggcctgccctgctacttgttggcccgccacctgctactgccgcgctgcccaactgcagccacagcctgcagcccacccagccgcccttgccggctgccgcagctgcgctggcggccctccgccgcctgtcgacgtgccacctcccgctcgcccgtggctgtcgtcactcatcagctccgccaatcgcacgagatggggaatcaatggagatgggggaaccaagcacctcggcagcgcgcgaaaactgcccggctgcagtggattgggagcgggaggtattctctactggtggagaacggaaacacgggattagggtctcaaaatttttggaagctggtttggatatctgttggatccattttttttgctcgaaaaaccccaaaatttgaaattgggagtagtaggggaactcttggtgatgctagtaacacacaaaacaagcccaatgtgggtctccaattcaacggcgagaggccaagaagcgagaacgccttcgcctgtcggccgtcgctcgctcgtctcgttgagtccgtccttctccccagcggcgacgccgcgctctgcgccgccggacggcgcgaggtatggcgagccctaccgagtcctccgcacgattaaaccccggcccccaagcgctccgcctccgaccggggtagcccccgagctcgggatggcgtacgtggccgcgacgagcctacgcggagtgctcgtcgccagcgatccgagcggcgagtacccccccccccccacacacacacacacacgcacacacaaaaaactcattgggtttaacgcccccacgcgatgacagcggaagccgctgcgaccaacaaagcgatgcatcgggagggaaaaggagagctgactcacgacggtatccggcgactgaactgaacgccggcgaggagacaatccgcctccgcctccgcctcagcctccgccgaaatattgggcctcgccgagcacgaggtttctctttctcagaagaaaatgccaaagctgaacggaaaggaaggaaagagtacgaaaggtaccataaaaaaaacaaaccaaaaaaaggaaatcgccgaaacgacacgtcggaggcgcgattcctcgtggcacggtatcggctactgtcgcctaccgctgacacgcggggcccaccgacagggggcccaccgaccagggggcccacatgtcatcttcacggtgatggcgtggggacggtgaggcacggcggcgcggttcccacgttccgttccgtttcgcgttacgggggtgggtggggcccgcatcacagcggggccatgacggcagcaaccgaaccccattctctctggttggggggtttattattggttatgggcttgtggcaggatgcagatgacacctgaagaaaagaaaatataaacacacttggtgattaattgttgcatttgcatggagtttaatagtcaaaaagtgatttcactggatgttatgatgcgaaaggagtcgtctaattgcacttgtaatggcgttgtttttgacaaaaatctatttgttgacttttggttatgtcagggtgtccggttgttcataaattctgatggggaatgtcaaaattgtactgcaagggtgaaaaagattgcagagccaggacactcttccgaatcagacgagtgcaatacaccaactgtgtattgtctgctgatctgacgagctcaatcagtagacagaagtttagttcggagcatttggctaacgtgtttcctaaaccatcattgatttgccgaatttagaaaacaattatcacaccaaaatgaactagtatactgaaccatccagagatgccatgcctatctcttgggcatcatcaagaggcagttcgctgattcctgaaaatattttctgaaactttcagcacaccaacttggagagtagcagtactaaatttactcttggcgatcgcatgatccgaggaatctttgaacaagctacggacaaacaaaacaaacaacgcatgacgtcaaccacgatctgatcagaacatttctttactcccattaatttggtgatcctgctttgtaatcttccattgacagaaaaaaaaaaggctcctctgccaatctgccatcagggcttgtaatcaactgctccctcttgttaccgaccctaatcctatcaagacaaggcccaaaggcacaagacaaaggaagcccaatacccatgtgagtgggccggactgggttgtgtaagggaacatctgagtctataaagatgttacccaggcaaggagagaggatcgttgaaaaatattatgtacagactatcttccccaaatcaattccaatcctctctcctctcccaactcctctgttcttcctggactcttccttccttccttccttcctcgttctcaagttgttcgaccgaattctcaagaggggttcgtgacaaatctggtatcagagcagtcgatcctggagtacttggagaaaccccgctatcactcgcgagcgcaactcaaggcaaacaagatggagcagcagctgagcgagctcatgacgaccatggcgacaatccaaaagcaaaacgacgccatcaaggtgtcgataggggccatcgaagaaatcaagccaatggtggtggagctggtggggtggaaaccggcggtggagaaggcggtgaccgagctgcgggaggagatgggggatctcagggcgcaagttcatcaactcgccaaggggacgacgccggaggtcaaggccgacgagcgaccagcgccttcctcgactcctcccaacattaagcctgacgagttacctgcgctgcttccaactccaccaggcccgaagctgaagcagatgaaggaggaggagcgctcgattccgcaggagcgcggtgaagaatctcatgggctatttagccatcgcgtggacttgaatcaccgggggaaggctgtgtggggaaatccctcttcacagtttctcccggtcaaggtgcgttcaattccttttcccctactaattatgttcatgaatttggagggaattcgcggggtagggtttggggaattcaaaacactacatctagggttgagtgtccagtttttgatgggggaaatcctaaggcatggaaactgaaatgtgaaacttattttgggttgtgtggaactcattcagatcactggattggagtggctattcttcagttcacgggtgctgcattgacttggttgcagtccacccatgctcatgaagttagcggtagttgggaagaatttgcagcgtgggtgtgtgggaaatttggtagggaggagttccagcgtttggtgcgctagtttaataggttgagacaaactgaaggggtgatggcgtatgcagagaattttaatgagttgatgcatgggttgcacgcgcatcatccgtcttggaactctgaattttttgttactcaattcctagaagggttaagggctgagattagggctgctattgtgttacatcgacatgccaatttggatactactgtggagttggcttgtttgcaggaggaagtgttggaaactaatctcaaggaaggccgtaagattgactcacatggcagaaatactttgcgtgctacctccactctggcacgtccatttgggggacagtggatgaaaggggaagaacgactgaaggctgaagtgccagctgaagataaagttgctgctcttcgtgcttaccgttgttccaaaggtttatgtcatacttgtggagagaagaggagtcaggagtatcgttgtggaccgacagtgcaattacatgtggtggaggaattgttgcaattatttccctcagaggatgttgttgaatctgacaccaatgatgctactcctgatgaacctgaaacagaggaattgctggccatttctagggaagcagttctgggcattgagtctcctaagacaatgcggttgcaagggttaattcagcgccatgaagtcttgatgcctgtagattccggcagcactcatagctttatcagtgaacaattggcaaatcgattgtagggaatatgtgcttctgtatcgccgttgacagttaaaattactgatggaggtttactcaagtgcacaagggagtttcctgattgtcaatggtgggttcagggagaatctttcagtactcctctgaaagttttgccgttgggttgttatgaggtaatacttggcatggactggcttgagcggcatagcccaatgcaaattgattggaaactcaaaactttgcagttccagtggcagaatcggcaagtgacattacagggagttatacctgatacaagtgattgtcctccggtgacctgcaatcagcttaagggtttgctgcatcataatgttgtcttgcaggcagtggctctctgtccggtggacacacctgtgaaaccttctcagacaattgtgccagctgatattgaaactttgttgttggaatttgcatcagtttttgatgaaccaactgggttgcctccttctcgtgtgtttgatcacagtattccacttttgccaggggcgtcgccggttaacttgcgcccttaccattacaaccctgcgcaaaagactgaaatcgagaagcaagtgtcagatatactgcagcaaggggtgattcagcgcagtgctagcccgttctcatctcccgtgctcttggtacagaagaaggatggcagttggcgattttgtattgattaccgtcatattaatgcgattactatcaagaatcgttatccgttgccaattattgatgagcttttggatgaattagcgggtacatgttggtttacaagtttggatttacgggccggataccaccaaattcgtatgaagccggaagatgaacataaaacggcattcaaaactcatcatggacattatgagtttaaagtcatggcttatggattgactggggcaccggctactttccaaggggtgatgaacactatatttgaaccattcttgcgaaagggggttctggtttttatcgatgatattcttatttatagccgaactcttgaggatcatattagactacttcgagcagtcttctcttttctcaccgagcagcagttaaaggtgaagaggtctaagtgtgtctttgcctaatcttctttaacttatttgggacatgtgatcagcgctcaaggagtgtccactgatgctcgtaacatatagtctgtgctcaattggccagttccaagtaatgtgaaagaaataaggggatttttgggacttgcgggctattaccgcaaatttgtccgccattttgggttactaagtcggcctttaagcttctcaagaagaacgtggtgttccattggacctcagaaactcaagcggcatttcaggccttgaagaatgcacttacatcagccccggtattggctttgccggatttctccaaagtttttgagattgaaacggatgcttcagcttttggcataggagctatgttgatgcaggatggacatcctcttgcgtttttaagcaaggcattgggaccacgcaatcgaggactgtctacttacgaaaaagaatgtttggccattttattggcagttgatcattggcgctcatatttgcaaggagctgaatttgtgatccgtactttagcggagtttgatacatttgggtgatcagaagttgaccacaccttggcaacagaaggctatgacgaagttattggggttgcagtatcgtttggtctacaaaaagggtactgacaatcgtgcagctgacgctctctctcgccgtgcgcaggatacttcaggggaagttctttccatttcagtctgtgtacccgtatggttggaagaggttcagcgtggctatgctcaggatgatcacgccactcaactgattgccaaacttaccctgcaaccggatgcctgtccacctttttcctttgatgctggcattttgcgttatcagggacgaatctgggtgggagagaatccttctttacagcaccaaatcttgcagaccttacatgctggagtgttccattgcttggtctgggctacggcgttcagttaaatcttttgtcgaaaattgcacagtatgtcaacaagcaaagacagagcgtgtgcgctatccgggttttctccaacctttacccgttcctgagcatgcctggcagatggtatcacttgactttattgagggattaccagtgtcttctaggtttgattgcgtgatggtcgtggtggataagttctccaaatatgctcattttgtggccctggcgcatcccttctcagcttttgatgtggctcaagcttacttgacaaatatttataagttacatggtttgccgcagtctctcatctctgatcgggatcgtatttttactagcacactttggactactctgttcaagctggccgacactcaactccgaatgagtactgcttaccacccgcaatccgacggtcaaacggagcgggttaatcagtgtttggagacctttttgcgttgttttgtacacgcatgtcctaagaaatggtttcattggttggccctggcagaattctgttataacacatcgttccattttgctctcggcacttccccttttgaagctctgtatggccatccacctcgtcactttggagttattgatattgctgaatgtgttgtgcctgatcttcaagatgggcggaaagagcgtgtaacatcccagcccagggcttaataggattaatagaataatcatataaacaagttgcaacttcttttccgaaagccgatctccaaagaactccagggttaagtgtgcttggcctggagcaatttgggatgggtgaccgaccgggaaattcttcccgggtgtgcatgagtgtgcttggcctaaagcaatttgggatgggtgactgaccgggaaattcttcccgggtgtgcatgagtgaggacaaagcgggcccgtcctgggggaaggcgggacgttacaaaatatcagatgtaagcgggcccggcctgagtgggcccgtcctggacaaaatggtatcgtcctgggggaaggcgggactctcacggtttcacgggcgtgtgtgtcgcagttgtgcaggcatggtgcgcatggctggtgtggacccgaagtggtcacacagcatggcacatgcgctggcactggacacacggacgaaggcgggactctcgcggtttcacgggcgcgtggacccggagtggtcacacagcatggcacatgcgctggcactggacacacgaacgaaggcgggactctcgcggtttcacgggcgtgtgtgtcgcagttgtgcaggcatggtgcgcattggctggtgtgggcccggagtggtcacacagcatggcacatgcgctggcactggacacacggacgtggccaagaggggacgttcctggcctggggttgatcgacgggggcgtcaatctctcttaaggggacgttcctggcctggggttgatcgacgggggcgtcaatctctcttaagggggtgagggtgtaacatccccgtcgatctctcttaagggggtgagggtgtaacatcctggcccagggcttaataggattaatagaatactcatataaacaatttgcaacttcttttccggaagacgatctccaaataactccagggttaagcgtgcttggcctggagcaatttaggatgggtgaccgtccgggaaattcttcccgggtgcgcatgagtgaggacaaagtgtggagggcagtctatgacctatgaaagctacgccgatgtaagcgggcccggcctaggggaaggcgggacgttatagagcgcagtatcattacatccttactgcggcaacatttgcatcgagctcgacaacgtatgaagcaccaagctgataagagacgttctgatcgtcaatttgctatcggcgattgggtgttcctcaaagtgcagccgcatgctcagacgtctgttgctgttcgagttaatcacaaattaaggccgggatgttatagaccgcagtatcattacatccttactatggcaacatttgcatcgagctcgacaacggatgaagcaccaagctaataagagacgttctgatcatcaatttgctgtcgacgattgggtgttcctcaaagtgcagccgcatgctcagacgtctgttgctgttcgagttaatcacaaattggctttccgtttctttggtccttttcaggttgctgcacgagttggtaaagtggcatatcgattggtgttgccagcctcgtgtgcaattcatccggtggttcatgtgtctcagttgcggaaggcatctcaacctcaagtacctgatgctccagcactccctcctgtggtcgcggaggttgatccagttccagcacaagtgttggcgcggcggcttgtccgtcgaggagcggccgctgtgcctcaagtcaaggtgtgttggactgggtgttcttcctcggaagcaacttgggaagacttggagcgattgaaggagcgtttctcggatgctccagcttggggacaagctggttctcaagaagaggggaatgttaccgaccctaatcctatcaagacaaggcccaaaggcacaagacaaaggaagcccaatacccgtgtgagtgggccggactgggttgtgtaagggaacatctgagtctataaagatgttacccgagcaaggagagagaatcgttgaaaaatattatgtacaaactatcttccccaaatcaattccaatcctctctcctctcccaactcctctattcttcctggactcttccttccttcctcgttctcaagctgttcgattgaattctcaagaggggttcgtgacacctctgtccaatctgaacatcgtttgctacattttaggatggagggagtatattcataatcaagagaaggtggagttgtgggtgtatgactttagacactaaggtg

SEQ ID NO: 6473 - DNA, 14416 bp, Oryza sativa
tcatatctctgaggaaagctcaggtgaattgcatattgttttccagtattcttctaatatgccagtgacctttttaggtcttactagtaccatccgcgttcacaaaagtaactggggaggcgcactgggaaattcttctccgagctcgtgccattgagacacaatgctatgtatgcaaatcctaactcttataagtctttcacttttgcagacacatcaggctgtttcatatggttgggagtgtgatcaataatataaaatccaccatatatgcattacatatttgttattgttaaattttcaagatttgcaataggttattgcagcagctcaagctggaaaacacaatgagaaaagagagagctatggtgattctataattattgacccatggggaacagttatagctcgacttccaggtatatctcttcattttgttactgtcttctatcagaaatcttctgttgatattttgaaggttttcttgaattttatcagcaccttgtaccttgacaaccaccaagattttattgatcttctgttgaactcctcaacaatatttgctagcactgaagtttgaacttgtcctggaaaatattgtagtctgccattaccatactgcatttatcgtgtttgtatttgttcaaatacaatattctgaaattatgtggaacgagtgtgtcacagtatgcccgttaaatatcgttctgaggaattaatcatcaaactttggctacagaccggctgtccactgggtttgctgtcgcagatgtagacttgtcaaaagttgaggctgtgcgaactaaaatgccaatctctgaggtaatactctcatggagatgctgtttgcttctgtccaagaaacaccatttagttgtgttcttcaataacagtttatcatcttattttgtagcaccggaagtttgacagcgtctggaaaacctcatcactgtaatagtatagaggtcttgcacgcctcctttctctttcttttttctttagagaacagtcgacctattattttgtgtatcaaatatcaattgcaaggcacacatgatgatccaatggtttgatcggcggtaaacttcaattgcgaagccatggttgctgtgaggtttcttggtttgaagaattcctggttcagtggaacttcaagatcccaaatccccaattaggctaggaatgatttgtcagaccaaatagtccataaataatagtgttggcttgaacgcgacgccaccaacctaggacatttcaaataagtgattgccattgaatctaatgtaaatttgttatggtacatttgttgataaatcaaagcttggattttttttttggttactgcagaattgtttataaatatagtccacacatacacttgaccacatcaggaaactcttctaatgtatacatgacttataagggcacccgcaatggttatctataggctctctacaagagatccatgtcagcatatttttctacttggaagagattaaatgaagaaagagagagagcaaagttatctactaacctggaaatagtctatagaaaaaaacgaggcaatggattagagagctatagatacccatgtaggtatatcattgaagtggtttactattaatctagtctattactgagatgtacatgttttatagataacaccttactttaccattgcaggtgctctaaatgatgaaacaaaaaaaaatgacagattggctgtgaatagtttctgaagtatctttaagttttaaaaaaatgcacatgaactatctccaaccaaatatgctcttttatccttgtgtggtggagttcagtcttgattttttgtgaaataatatatatcacttattgttaaaatttttagaaattctattagtatttttgttgcagctaaggaggagaacaaatgagtaagaatatctccttgaggtattatattctagtaattcagaccatgcccacagagtaagcatagctctctcacgtgttattgtaaatagtatactctaatcatccaccgtactccaaaactttaataagcaaaatttttaaactttgatcattcataacttctggtatgcttagctttttatttagaaaaaagaatggtacgcatggaattgcttaggcaaaatactatcataatatagcataaatttattatattttataattttgttataatataaaattgatgatcaaattttcaaaagttgaccgaatcttcttctaaacatcaaacgtttataaatagagggagaataaaaaaattttaaaagtgaaaactgaaaaagaaatgtttgcatttaactcagctgcaacttctctaacaacggggattgcctgctactgctagtgctaatgtttgctgccggcctgcaccagcagtactgcagaggatctgcactcctctaatgctatccctaatgtaaatgctgagagagagagagggagagagaatataggaggatattatttgtttttctttcatgttaacatggtgttgagtgatgttggagtgtaggtgtggttgcataaattaatttgttaaggttcaaattcaggtaaccaaactaggtagtttttttttcttttgaggtttatggatttttccctaatgtctctttgttgtgttaaaagtggcgtattcgtagatatatatagcgcgctgtgcatcctacatttgtattaaaaaaatgatattatttagtcctaatatggattttggtgtaggtccattatttagcaaatgctttaagcattttaattgcatgcaactaattgagacttcctttgaaatggggtgtttcaaagaaattgagctgattcgttttaaaattcctataaaattcttgcgtttaagcaccaatcctttgagggatatgatctttttcgtcaagaaccaattctttgctaagaggaaatattttgaagaatattttcaagaaaaagataatctctctaatattttttgaataagccttttgtcagagtgctagctttactgccaatcaacaacgtgatggctggcgtatcagtagccatgtcatatgtgtaaagtgtttggatttaaagattttatggaatgccaaattttgtttaaaaggtaaaaatttctccttcgccaatatacgaagggcctcattgtttggctgatgcttatgcttataagctaaaatttaaattttagaacttgattttgaatttatttttttttcgtttttcatcgtagtttattttacaacatctgtttttatttagtcgctaaagagaagtgcataaaacatttaccgacaaatattttttattggttaataaccgatccgaataagcatacgaataagggaaacaatattcgaaattagtacgaaagagaaaacaaattacaaacggattttattacaaacccgtttctacctctttttttttccctcttattacagagaggttagattagagttaggctcgccattaaacaacactcatctccccctcccccttgaaaccctagctccgcttcgccgtcgtcctcctcctcctccccggcggcggcggcggcggccatggcgtccgcggcggcgccgaagcggtgctactacgaggtcctgggcgtcccccgcgactgctccccggccgacatcaagctcgccttccgccgcctcgcgctctccctccaccccgacaagcagccccccggctccgacgtcgccgccgccaccgccgccttccaggagctccagcacgcgcactccgtcctctccgacccccacgagcgctcctactacgactcccaccgctcccagatcctcttctccgaccaccacccctcctccggccccggccgcggcggcggcgtcgcctccgcctccgcgtcccccgtccccgacctcttcgccttcttctcctcctccgccttctccggcttctccgactccggccgcggcttctacaaggtctacggcgacgtcttcgaccgggtcttcgcgcaggagctcgcctacgcccgccgcatgggcatgcccgccgacgccgtccccacgccgccggtgatcgggaacctcgattccccccacgcgcaggtcgccgcgttctacagctactggctcgggttcggcaccgcgatggacttcgggtgggcggccgagtgggacgccgcgcggggggagagccgccgggtgaggcggctcatggaggaggacaacaagaaggcgacgcgcaaggcgcggcgggagtacaacgacgccgtgagagggctcgccgcgttctgcaagaagagggacaagcgggtggtggacatggcgctgaagaagaaggtggaggaggagaagaggaaggcggaggaggcggcgaggaagaaggaggaggagaggaggaggaaggagcgagcgatggcgtaccaggagcccgagtgggcgagggtggacgaggatgaggcggcggtgtttgaggacgacgaggaggaggagacgagggcgaagaggaaggaggagctgtactgcgtggcgtgtaataagaagttcaagtccgacaagcagtggaagaaccatgagcagtcaaagaagcatagagataaggtgtccgagctgaggatggtgtttgaagaagaggaagaagctttgaaggatgctgaagaagaggagccagaagaagttgatgtggggtttgattttcagcctgcacaggaatcagaggagagtgaattttcagatgctgctgaagagttggctgacgagttgagcgagggattggaggtgcgtgatgaagaagagaagggtgataagcacttgggtaatggggaacaaaaggttggttcatatgatgaaaccagtgtgttagaggaaatgctatcgaggtctaggcgcaagaataggaagagtggttttgtcgctcctcaggaggaagcttcaccagctggtgccatggatgatgatgacgatgaggatacaagctatgagattaataatgtcaaaaagaaaggacgccggagacgggcagcaaagaagggaggtacttatgctgataatgggcaaggtaggaagagtgagaatcagcctgaggaatccaggcataataatgatgaaaatggtgctgatgataagatggaaggtccatcttctaatgaagacagtgctgcagcaagtaaagaagatcagcagaaaggaaaaaccggtaatactaaaaagaacaagaaaggcacagaaaagaacacaactatatcttctgaacaaaagggtacatcgaagggaaagaagcaaaaggtacattcacattattttctcctgttaacttcttcatatttctttttcatgtatagttggcaggaaacttgttatgaatttgtgactaaaacccatgtattctgtttctctgtttaagtcaaagagcaaaaacttttagcctcatcagtactatgtgaatcacatatgcagatacctagccgtgtaggtgcttcaagaaccacctaactaagccacttattagaaatgcttacgtaaaagctgtgctactttatagaggaaataaccaatgttttgaattttgtggaatacatgattagagttgcttcctttgtgagaaaagaaacttgtcctgaaaatcttatgatttttgcgggtatcaacactcacatgttggattgctgttgttttatgattttttttccttatgcaaaaccctaaatctgtctttgtgcagcacagtagcagtgatcttgctcttgcttttcacattttggaaagaaacctagaggatgattttgcataggttgaaatgatatttgatagcactgattaacatagtggataatgaatattatgcttttgtgaaatacttgttggagacagcctttcttggttttgtgaaatacttgctggagacagcctttcttggttttgtgaaatacttgctggagacagcattttgtgaaatatttgatagcactgattttgtgaaatacttgttggagacaagcctttttttggtttcatgtcaattagtatattatgccttttcctgtgatgtctgttaacagtttaacttgttgatctataattggcgtatcagtttagctttctgtgtatttgttctaaatttgtgggtgtgtacacagttgcaaacagagttaaagaatcttggaagcccccctggtttcactgttatcacgattttcttatcttgttttgattaaaaagtagattagtgccacctagagcaaagagcccttccgtttgttctgtatcatgtagatgtctagtgcaaaatactttgttggagaacatacaacttgaagctgcaaatgtggaaaagttttatacgtactaattcactgtctactgttagtgcaacccgatgagcttaaaaccaaaattcggccatgccttgagtacccatgacatgttttggatatattttgtgtggataatattgtgctatgcattgtctatagattcataaaattctatatatatttctgtaagtagttataacactttgaagctaccttcttgtaccaggaggtttcaaaggcacccagtaatgactgtgaaacgtgtggatcaacgtttgactcaaggtatgtacttgaagttcagctttccttttcctctccttccctttcatttgcactttcccatcatatgttgctatcttacaatgaaattggaaacgcagttatggtttgtctcaaatacttcttgttgcaggaacaagttgttttctcacttggaagaaacaggtcatgcaatgctgaagacacgacagaaaaatcgctgaagaggacaagaaagtagttttcttttaccgtttgtcccagttgatgctgatagattagcacatcgacaaaaaggccatatatctggtttatagcccaattttgatatgtgtagtagagccgttttctttcttcctggatttgtttcattggtttgtggtacagaatgacaagaactaattattattattcaatcgaaatacacaccatcttgtaatttttctcccttttggtgcattgtcttgttcaagaatgaaccattttgtacgcgtttgagcctactgttgctggtgctcagcttctttggaatttcaccaataacagggacattattaaaacaactcgtatgtcatgtaccatttcaaattttaagcactgaacatcagcatcgaaaccaaaacagttactatctttcttatcattcaggtgaactccaaatttccctatgctatctgcaaatgggtcttttagaattcagagaaagggataacattacatttatataatctgacacaaacttaaaatcacaaatccacaaactatcttagtttgttccttttttccccttatgtacagctccatccaaatggaaatttcatgaatggagtttcattccatgttggcatgatctgcttcctggagacctggactgaagtccccccctgcattgctgcctgaacttctttgttttctgacagcaagagtggtttgcgcttgcaaacaccaaattaaggcaagagatgaaaggatttgaatcaatcacttggtgctcctgtgacctgatgaagccatgagcaccgcgaccgcgacgatgaacatgaacagcatgaacccgagcaggatatacgtctttcgcgacgatttccggtactccccaaacaggagtattccccagaatgtgctcacaagtggcaatgcctgatgaaacagcaatgctgaagcagttagaatcatagtccagaaaagttgtacttctctgaagatagtgtgaactgctaaacctgaagaatttgcctggaagatctagtatgatgttcagtatctgaatttatctaaagatctagaataataagttgcagttatctgaagattgtctgaattgctaaacttgaagagaatttgtctgaaagatctagaatctcgccacagccatcgcgaacacgatgaatttctcttctgatgtgaagaaatgataagatttggagattggactaacctggacagcatcagcagcagcatagccagcagcctgaccacccatgaactgaaacccattgccaaagccacataggaagccagccaggagagcccactgcctgccttcccagtcattcaggtaagccttgaaggatgatttcggcacaccggccattggacggtagaggaacaggatgttcaggccgatgccgatgacgaagcacgagatcgagaagtagaagaaggcggtgtacaccaccaggtgtggtacaccttgtttcagggtgtgccattggtcattggtggcgaggttgaatgccggggagaagagtgagaagcagactcctgagaagaacactatcccaagccctatgaaggtgcttgatccgaacacctgcgcaacggagaggttcatcagatcaatctagttcattggtacaagttttcatccataattttggtattgattcaacaagcatgataaaggatgattagaatggcagtgaccgaattaccttgatcgaacgccgttcttcgagctcaatcaagtattccgcagttcctgcttcagctttggcaacatatttggttgcagaagctccattctccaagtccttgggagcatctgaaattggcagagttaagaactaggatctgatctgcaagaaatcaacattactagtacttacaacattaaagtcagttttttttttaaagaaaaggttatggcatacctttttctatgacttctttgtttggttccacacttccattttccctggaaattacaggttattaagatcataggggtcagtaaattaaaagacgcagaatctttaaatagattggaacctaaggcataatatattttctaacagaggtatccagataggctaaccagtgtgtaatgtgttttatgtatcttgatgtgaaatatcttgatgtgttgaaaaatgtgaaatatcttacccaagtttatagatatttgtggagccatttagtttttcttcattatcagctgcattggaggcatgtacagcagagccaagaatgactgcaacaaggaagcaggccactccagggaaaagaatctctgctctgttgatgcggttgtccaggaaataattcagtgttgtgcctgaagatccaacatgtgagttttctgatctactgaataattaggacaataataatggatacagcaattagtttgctgtagctactgaataaagtaaactggagatattgatctgaatatatgttcttttcaggagtaggaccaactataatgtattcatactattactaacctaattattcagtttcttcgactaacataaatatagataggttgtgatgagctgtacttcacatgtatcaccaagaatcaataattttccctcaattttctttacttaaaaaaaaatcaaacaataatatatgttgcagtgttgtaaaagagaagttttacctacctattacaacaaccatacttgagctgatgacctcagtcactgagagacctacatatgcccatgcatactgagtagagaggttccctatactgagcacaacaccccctgccattgcaaacagcactgaaggccaattatccttcattgcaaacaaaaaaaaatcactgtcagcaaaatttcagactaactaacaatcagaaatgtattaattcagggatatactatttcagatgcttaagagaaggtggctaacctgactgagctgggtgaagaaattgggcatgttgggcttgctatcgccgagctgaccgaaggtgagcgcgatgaggaccgcagcgaggaggttcgtgatcgagtagtcgaggtaggtgtgctgcgggagccggcctcggcgctcgaggagggtgaggaccgcaggccatgtccccaggaagaagagggaggccagcatgagggcaatggcaccccctttgtcctctatgatgtacatcttgaggcctccttgtctgatggacaacagggaattcacaagggggccttcaaaaacctgacaaaaaataaaataaaacacattttttcatcatgtaagagggttgagctgctactcatttggattgaatcatcaagaagtttcaagatcttgcagttgttatccacaaaatcttgtaaaatcagaaagtgttttgcatttaatactgtcctcaaatctccatctcttcattcttgcttgttacagcaagcaataatatcattacaagaaacacaagaaaaaaaaggaaggaaaagaaatcaggaaatcaaattcattccaacagccatagggaagatcccaaattgtggataagctatccttatcacttatcagcatgaaagactcccagttcttggaaccctaaatccccaattcttcaaagatcagattctgctgaggatgagaagagatccaaactcccaattaaacacataaacacacaaggaaggggaagaagaacatcaagcaagtagagcagagtaccttttggcatgaaaccaaagaagtggcacaaccaaggacatggtccatggatactacttatagtgccaagcactggttaccaaaacaaaagctaatggtatctttcaaacgcaaaaagtccaacttgatctgcacaagtttgactcatgcagcaatttgcgaattcgcggcgtcttctcatgcgcagatcacccaatggaattggagctttatggaggaggaggagggagaaatggagagaaaagaggtggagaaaaagacaactatacactcgtcatttgctgaaaataatggaatggggtgatagtgacatctagggatactctcctccaccaatcaataaccttgaaatgaaatgatttttagctgaaatatcacttattgcagactccacaagtttatgaacatatggcaattgacaccattatgtctaatgaattacatatcaaggcttttttttttcttggatacagatatctaactaggtattatctgcaatttgggcactgaatttgtccaagaatgcaaagagtgaaaaataatggaagtagagaactgtactctttagctagatataatcatataaacaactatccatttctttcagtgacgtcttatctaagaaaaaggcgcattaaaagagaatttttttttgatgattccaacaagaaaatgatgcgtctactgaatctttcctttcctcctttaagcaacaaactaaacaaaaatatttctcaatagaacaagagattcataaactgacatggatccaagaactcaaaaccaacaaaaaagagagacccatgccgatgattttcaaccaagaacatcatcttctccccaaaatatcattttttttaaaaaaaagaggaagcaaacaaccaatcaacatcgacttccactcacgaatacaaagaacacaaaacgaaacagataacaaagcagacatgccggacataaaccattcatcaccacaagctaattaatgacaaatcaaagatcaaaagacaggaacacattacctaaagtcagaaggagagaaagggatgaactgctcctcctccagagaactcaagaactgaactctcaagtctcaacagcctttgtcactgcatagaattcttcaggttaaatagataggcagctggggtttgttggactctctctactactactcactcctccagctgacacgcaagaagggaaggaattaaccatcaagagattcttgttcttctctcaagagggccaacaaaaaaaagggaagaagattcttgtggcacctaaaaatgaatattttttttgggaaaaaaagaaatgtaaaaatagaaataaaaattcaatccattgactccggatctggagagatcctcaagattccccaggcaattcggcagtatttgttgctatcttccctcgctttgaccgccttgtgtggttgtcgttgtttcgcgtgccaggagcgatttgtttggagaagagtaggtgatttaatctctttttaatttaataaaaaattggaaataggtgaattatatatgcagctgtttgacaatttgacatattattatttctgctgtaacgtacagatcagtccagcctaggcgggaacacgtctggatgaataattcataattgttttattacacggtgggaaggtttctcctaacacacgccaaaagaaaaaaaaagtactagactaatagtaataactaggcattaaaaaaaaactcatgttaaaacacattcaaattttagataatgaaataaaatcacggcctttgtttacagagctatatccaattattaaaaaatgttccaaacataatcacacctcaaaagaagacattaagacataagggacaatccaaactgatagaggcgcacactgacacaaacactaataaaaagataaagcacaaacttattgaattttatttgtgaacctcccttcaagattggtgaaaagttacataactccagtttgtaacatgcaacttttataaacttaatgtcttcgtcacatttttgtagaagagcccataatcggagccaatatgttgtcttgaaaatcatatgcaaaaaacacattcatatatatatatatatatatatatattcaatattaatatttgtaggcatcatgatctgaacctataattttttagtacacatagaatttctcttaacaaacgttgtaagagacgcacgagaccgtgactaatttctagcgataaataactagcttcattaaggccctgtttacttcctacacaaaaattttacaccctgtcacatcgaacttttgaacacctgcataaaatattaaatatagactaaaaatataactaattgcatagattgcgactaatttatgagacgaatattttaaacctaattgctcaatgatttgacaatgtggtgctacagtaaatatttgctaataacggattaataaggcttaataaattcgtctcgcagtttactgacagattctataattagtttttttattagtgcccgaacaccccatgagacaccctatataatatccaatgtgacacaccaaaactttacacccctggatctaaacaccccctaaattcctattaaaaccatgcacatatgtactggcactaatatagatcttgtttggtataactctaaatccaagattttataagctggatattcctaactctacataaccacagatctggatctgctattacgttataacatttagataaattattttattttcattttagataaagatataacattttactagaaattttaaggctgtgagatctggatcagggcctaagatctcaactctacgtgtgaagatttttttttttgtttttgagaaaattggcatgattggctttgttttcggtgtcagcctggctgttgggtgcgacgactttggaagctattaacatgtgctttcttacattaggtgtcgtggttgtacaattagaatataaccttgatttatttgtttattgaaaaaaacatattcgtgcattatatacatatatattttcttgacatgcatttcattttcatctttatcccttgataaattttattgctgcactaccaaatgtacaatagtaaaatacaacctagaagcataaaattcactttcttttcgacgacatatatggacctttaaagagtaattttacaaaaggctaccttaattctgtgatgaaagtttcaggggccctcaattagttagcttatcctagctaatcttgcatgtggcaggatactatgcacgacaattttctatgtccatgttcgaaatcttttgatgacaggttaagtagaacttgctaatggatggattaataaatatataaatatttctaccaaataaagcatggcagctagcctagagcgcaagtgtcaaagcaagtgaatagttttgttagaaaaacgtggctcgtgacttcgtgaggaggttccatatgcatgatagatatcataaattagtaccctccagttttttaatagatgacgacactcacttttaaacacaattgatcatttgttttattcaaaaattttatgcaaatgtataagatataaatcaagcttaaaataatttaagtgataaaacaactcataacaaaatatattatatttacgtaaatttttttaataagatacatagtcaaacgtgtgataaaaggttaacagtatcatctattaaaaaacgaacccagcaacaaatttagattatcaaagtgacaggcattgagtgaagatcacggtaggtacgaatatgaataatcaagtggccctgaagatttgccaaagtcctacgctgcatttcgtattgcagtgaattagtaacaatattttttgtgacggtttttaatatttcattatttggtaaatagtttctatttagatttaattatgcaaactataatataa

SEQ ID NO: 6474 - DNA, 12117 bp, Oryza sativa
acacaatgtcagtatctgttgtagtgagtcgtgcaatagaaggttatttttgggaactaatgccgatggacagcactgctgcttggagacggtatgtggaaatggcttttgaacggtcatggcccctcgttatatttgtgtcggtacaagagaaagatacaaatgtttcaatgcaaaccgaagatgtggaggttcctagcaatgcaggggatgttgttggaccatcgatgcaaaatgagaaaaatcaaccaagggaggagcaggccatgggcatggcggatgagggggagagagtcggtataattgttgatgaaatggagagggaagattcggataatgagcaagcggaggacgacgcatcatccgatgaggaaggtgatgtaatggctactgattgggcaaatgaggacttctctggtcttgttatatcagagggtgatcatgtaccctgggagtataaggagaacgaggtaattgagggtgcaaggtatgctcataaggatgagatgaaggaggcggtgaagcattgggcagtttcattgcagagagagtttagggtggtcaagtcaacaaattatgtgtatgaagtgaggtgcatgaaggaagattgtccgtggcgtgtccatgcatataagggtaaatggaatgattattggaaagttagcattgtgaccgagcacaagtgctacttacaaggggtggagaagtatcaccgaaacatcacttcagcttttgtggcaagtgagatgtacagcagtgttgttggtaacattggctttgaaccaaaatcaattattaggcacatcgagaacaaattcaagtacaccataagctatgcaaaggcctggagagccaaacaaaagatcattgagacgaggtatggcacatttgaagcttcttatgataatttgcctcgtttgttagccaccattgcccagaggaataataatacttactatgacctacatacatttacatcggttgaagatcgaacaaagagtgtgctgcaaagagcctttttctcattgggtgcttgcatcaatgcttttgtgcattgtcgacctgttctatgcatagatggaacttttatgacaggtaaataccgaggtcagatattgacagcaattgggtgtgatgggaacaaccaggttctacctatggcttttgcatttgtagagagtgagaacactgaaagctggtactggttcctagagagagtgcacattgcagtgaccgagactacttcgtggcggtacgtccaatttgtattacttccaacaattatgtcatttatcttgcataatataggacaactactgaattttttatttccatcttgcataggctgatgcggcgcgggatatcagtgccgatatcaccgcagtccaggtgaggttgaacagaggtttgcacttgactgacgttgagcagagggcgaccttcgaccggatgcaggagaagatgcgtgcggtcatgcgcgtcttctcctgtcgcagcgccgtggacgtcgtacctccagctggtccggtacacccacggcctcgcgcgcctaccgtcggagcaggacctcgtttgtcttcgagcgcccctagcttcggagcagtgcgacctacagcaccggtttcgcacggtacagttcagcccagatattagttcatttttgtttcagcttttgcacgaatgtgtcactatgttttaactgcacgtttcctcatcgcaggacctcgtctgcattcgagcgcgttcgcaggcacgaccggcgcttccgcgagctccgcaggggcgttcgccacctcttcgggcgcgttcgccagctcttcctcccacggagcgtcgatccctcgcccacacggtactttactttttattaatactgttaaatacctgtacgaaactgatggtccttgtccagcaggatttgcagccgggatcttcggtactggggcctcttcgtctcacgccggtaggactggtcctactagccagttctacgacgacgacttgcacggtgcagaccaccaggacgtactaggctcctctcagcttggaggagctccagaggcgcacactcaggagcagccagaggtcacacctgtacaggcaggacgggttggccgtgccgtacccccggaccgactcacgtactcccaggggcacattagggcgcagggtaggagggacaggggtaagaggcctcgtcagtagtgttctacctcttcagtccttatgtgaccgtttcttttggcttacaaacttgtaaagcagtactacttttgctattactactgcagtactacttgtgtttgtctcgtctacatagttcttttcatttatatggtgctagaacaacttatgctcacgacaacacactttcggcgcttcacggtagtgccatatccagtagcgcgcacagtccacaacagcacacatgaaaagcggcagctcgagttatcactatcaactttcggcgctgcctgttgacataaagtgaatcacgcccacgcgtgatcgtcttgtcacatctaatgaataatgtatctcattgagttcacatatattgcagtgaaaacgacgctatataattgacaatctgaaggcaacctcttcatatcttctttcccactaccacaccacacacgaaaatggaagcctattaattgctaatacgtaatctagaattgagattatgtacaacattcttcactacaattttacattttggcagcaaaccaaatatgatcaaatgcaattttaccttaccaaatatttggtagtgccaaaacttgcttatattttggcattaacaaaatatttgtacggtaacattccaaatatgccctaaaaataataaaattgtattttaccagtcttggagattttaatcttgtatagttttcaatataaaaagatttgataactattgatatttatataaaaaaaatatagagcacagtacaaaatcgccctagcggagggcggcaagggggccgcctgcaaaattccatgccccctcgccacccatttgcaggcggccccccgcacagtgcaaaatcgccctagcggagggcggcaagggggccgcctgcaaatttcgttgacggccgtcgcccgagagcgaacggccgtctgccacgtcattttcgccgccctctgggagggcgatttttaaaaatcgccctcccagagggcggtaggcgactatttccgtcaattttcaaaatggaaaattatttttgtaaaacttttaataaaaaaaattataaataaaaaaaattcctaattgagagctatgactgacttatatccaacaacattagtcaacaaaagcaaacactcttgtttggggctttatgtccactttctaaccaccttgagaaaaatggatctgaatcatatacatcaaagccatatgctctctctcagtttcacattttttttgtgtatttactagggatatttggatatatcataatatttttctatgtagtcaattgagttgccacatttcttccctaattccttatatctcaagctggcaaggttgatgctcgctgattgattgagatgatgcacaattatacgttgacacgtgtccctctttctctcccccaagaggctaagagtgtggctggacaagtatttagaaaaacaaaatactaaaaatctagagaactcttcccacacaattaactctagtatcttcgagtctggtctcatttcaaatgatttaggagtaaataagacaatattgtagtcaaactaatcgaggaaaaaagtttcaaaaacaacatttatatgggtcgcattcacctgattaaatcaaagaaggagctaacaatcgaaagaagaattgagccaagcaataagatcgaacatgagcaatggtggtggtagtgactgcaatactggatcgaacaagtgatggtgctcgcactaaatggctcttccatgaacaatgcagtgctaccgaagacttgttgatcaattggactttgccattgcagtgaacgacatgcttgtcgggctcacaccacgtaccgccaccctctcgctggtcagacgtgccccgttttcagctatgccggaacttccatgccaccacatttacatggctgacgctggagttcagatagccgtcttcgaatccatcgatcttgcatcttggcacccccggaatcaatgccccaagagtagccatctgatcgagttggtaggagcacaactgccaccagatcagatgtgtcctctgtctctacatccctctttccacatggatctgacatctgccaacacggccaacatcagatcgggcaacctaaggtaccaagtaccataagcctcctggcgagatgggaggggaaggagagggcatcatcgtagccgtcgctggtgaggacagagaaggaaaaaggtgccatcggcgagatgcagaagaaaaagtctgagagagggagaaagaggcgacacggcagactgattgaggcaccaagcgtccgacgagacaacttgaaagtttcactcgattagggcaaacaagcccgcttgaatgtatctcttttagaaatgttacaaaaattatgttactttttaaaaaatatatcttataaaataaatatcttttaaagagcgtacatgtttaaagcagtagatgtaccaactgtcacgtctattttctagttatgcaaaaagggctaagggcaaccacaatatgcatgaaaacccaccttaagaaataaagtagtatttttttacctttatacatagggagatgatttatgaagagaatagtgttatgggtaaccttaagcttaagggtagaccataagaattttaaaaaatatatcatagctttgcaacatgcatgtacacttttaatcttgagtaaatatgtgtttttttccttagtgagtcccaccttaagatcaaaaagagaccatatacttcctccgtctcataaaaaaaacagtacatgatgacatttcatctgtcatcccgggtactaggttggttttttatgggacgaaggtattacattgtattatgtagtatggacaaacacaaggacgtcccgtcttatgactacattgattttaaacattgaggatgctctaatgcctttgtttgatttatattatttggcagattataatcatggatcatctacttagttatagggataaattaaatatttcagaagtaaacttaacaataaaagattaaaaattgatacaaacaatacaataaaagtaattcttttttgcaaaaaatatattcttcaaagcatgaaacaaataatcccttttaattgtccgatgaagtgaaaagaaagcttccgtaagtaagttattgtaccgttccaaacttccgtatggaccgtatggtgccctgcacaagaaaggtgttgaaaaaaatactaaacaaaaaaaaagacagaaattctgaacatagaataagaacatcaaaaagttcctaaacaaaccagaaatatcaacatgaatacattagtgataaaagatcaagtacacaaaagtccctaataatattttttttcaaaaaaagtagagacattatttttactttctaccttaaaaaaaaaagaaaaagaaaaggggcgcgtgcctggccgcgaagatggtcactggtcagcatgggacactgatctccttcccttttctttggggaaagtgaaatcatccctcgaggaaatcccctcgtttcgtacatgtcacctaaataatcataaaaaaatataaaaaaaattggcaacatagattaatatgaaacatatcactctacaaacatgcaagtttaaattcaatttctccaagttgtaacaaaaataacaaatatagttacgaatatgcgataactattttcagtttaatttgttatttttgctgcaatttatagaagttgaatttggtcttgtatgtttgtggagtgatatatttcgtattaatctatgttgtcaattttttttaaattttttaataactatttagatgacatgcaaacaacgaggggatatcccctcgagggatgaaagtccacatccttttctttgctagcttcagtggagccacatgccagcttagccattaaccacacttcactcactccacttctccaagaaacccacacgaacgacgatggcagcaagatcgtcgctgccatccttctgcctccaccagatcaggtcagacagccgccgcggcgcgccgccgtcgatacgcgcctcctccaccggcgctgccaatgatggtggccgcaacgacgacgtcgacggcaaggaggaggaggagaagagcgaggtggggaggaaggtgatggtggtggccgacggcggcagcgacgaggcgcggacggcgctgcagtgggcgctctcgcactccgtccgcccctgcgacaccgtcgtcctcctcgacgtcgtcaagagcggcggcgacggcggcggcaagaacggtgagcattgtagctatggcttaattaatgatcttccttcgtttcatactgtaaatcgtttaactttttctaatcatttttatgtttaataaaatttattgaaaaaattagtagtatctattttattaaatgggagtattaaatatatctaaatatattatcataatatgtttttttagaaatgttactaatatttttctataaatttggttaaacttaaaaaattaattaacttataatatggaacggagacagtagcacatttctaattagatatattcttgttttttaatatgtgttgagaagcttaaggtgcacgtatgcaaagtaattaaatgatattgatagttctatatatcttgcatggttggtgatgaactttgctgattgattaattgattaattgattaggggatgatccaagcagagggtgccaacatctggagacaatgaggagtatttgccaggctaaaagaccagaggtatacaactactaaaaaattgtggtttttctactcttgtagctgcaaaaggaacttaattagaaattgtttttttatcaattaacaataaaatgagggtgatttttactgttttgtattacgtcgtttagatccctctttcttctcccaaatgcaatttgagctgtcataatatttttttggttcctgtaaacagtgaattttccctgcttcaaacagagcactttaaggaactctagaaggcatgccagttttcataaggttttcactgaaaaagttggttctgttatttcatatatcctaatggagcatgggggccatatattatgactatcctcataaaggggttatcatgatggagctatggttcccattatcttaaaaaatgatggagctatggctttagcatatcatatataatacacagagcttgcccattttgatctcattatattctggttttatatgaacaaaaatttgcaatatccagaatatccattcaatctacttacgatcgaaccatatatgtaaattccaatacaacattgatataatccacaaagcattatggaatactctgacttgcaacatcatgattaagattgatcctgcaagctagaacttctacacagttacttattattgttcagtgatagctatgaaacagatgcttctattgataaatagcaccttctgtttggtggtacatattttctttcaagcaacagatcaatctgcattggaacttatactcccattttttacagtctctaaaccaaaccgaaaatatatataaacacaaagcaccctaaccctgtaaaacccatatgttggtagtaacaaatgagagaaatttatcagaaagctggagatgattcttgcaatccatcaattaatatctgcaagcctgtccctttaattaccttctggcatttgaagtgacatcatgtatttcagatcaacctgctaactaatcagtaaatcctctttgccgacaacccagatgatcagtaaataccctgtggcagatcttacccttttgtgatctggaaatatagacagctagtactacatataaaccagttcattggtaaattaattgaatgaatgctttccctgagacaatgcattctatgtcaaacagtgttaataatatagagggtcccattcactgtcaaatcatgaaaatgattggtgaacagcctccacagagatgcatgtgctgagcatcatctcaaggggtgcatatgcagttgcatcccagacaggatcatggattcatggcccttgattatgtttctcatactgcaccttttcaatcctagtttgacattcatgccttttgcacctgccatagcatacgagaattaattaagaagttaatcaatggcatccagaattccatgatctagaaacttctgatctgaagctaagctaggtgcagcaaccgggttttatgagttatagatttactaaaagaattataacatcagaaaattacctctccatattcaaacaattgcagttttgattgtttcaatcttgactacttactatggacaaattaaaaggttttacacttatatttgagatgcagtactagtacacttcaataatatgacatttttttaaagtatttgtagctcctttttttttcacgaaagaccggtgctcagtgtttgaagatcagtggtatatatatatatatatatatatatatatatatcaaatgacagtcaggggcaaagccaggatttatggctagggggtgtaggcagggcgaacaagtcataagtcagggtaagcaataccgacgataaaaaagcttgaatttagctttttagttgtatcattggatgtttgacaatttgagacttgaaacatcatgctcgataacgagacgcaatgggaggacagagagacgtgtgaagccgaagcaatgatgacgaggagttgatttgcgtcgtctctccatctcttccttattaattaattttctataccatgtttattaataatggactaattaacatgctaatgcgctagttagtacaacagggatgggtgtcggataggggggtgttggcccccttcggcaccccctgtagctacgcccctgaattgacagttatatttttaaaacaaaacgggtacatgagtatatgtcacatggcacaagtaatgagatattgattttttttaacaaaaaatgcatggtagtttaggagaaatgaagcatgattgtggaggcaagcctagggcttaacaagttgcccaagttacctggacttgtctccgcccctaattggaacttacagtttttataatatttcacaagctagaattttgtggaaatattgaattgagaaaactcttgcattaataaaaaaaaataacatgtccttactcgcgtcttgattcgatctatatataggtacgcgtcgagctttccttggtggaagggaaggagagggggccggcgattgtggaggcggcgaggaagcaaggcgtgtcgctcctcgtcatgggccagaagaagaggtcgatcacatggcggctgctggtgatgtggatgaccggcggtaaaggcggcggcggaaggggcaccgccgagtactgcgtgcagaacgcggcgtgcatggcgctcgccgtccggcggaagagccggcgagggggagggtatctcatcaccacgaggcgccagagagatttctggctcctggcttgatcgaggtgtcccaagagcttacagtattgcatgtgtgtgacctaactatggcgtgttgtaggtgtctgttaccggagaggttaagttaattatagtggaataggcattcatgatatgagaaataatgcacaagatgagtgatggtgtttggcgttggattggtcgtttctctttcgctcaatttcaactctcttacaattcacacaaaaagattgagaatatatatagcttggtgaccattggaattttgtgctctcggattgtgcaaacacgttaattgattgagaaacatttatattttggacgtgactacacagctaccactccacctataagagactttatccacctatacttcaaataaaattttcttttaaactactcatccgatctacgatccgattacatcactgtgttcgtaacaattaaatctttataacaagatctcacatgattatattttgatgaaaaattataaattacttttataataaatctaaattacttttagatttcactaaattacttcttcgacatataaaagtaaattcaataaagcttaaaagtaatttacatatattatagaagtaacttataacaaaaagaaagtaactttaatgaatttacttctaatgttatgacaaagttacttccgttttgttttaagatacttttataatacatgtaaataccttttagactttattgaatttacttttatatgtttaagaagtaacttagtcaaatctaaaagtaacttatatatatgataaaagtaacttacgtatataataaaagtaatttacaaatataaatattttttcatcgtaatataatcatgcatgtaagatcttattgtgaagatttaattgtaacgaacacaatggtgcaatcggattgtagatcggataaataatttgagagaaaactttataagaaggaagaaaaagacatgcatgtctaagaggaaaaacaagcatgcacgtcagaacttgtagcagtacttcttctcacaattcgttcgtcgctggttaacactaaaccgagaagccttttgccttatattttgtctgcttgactgaacaggctgctgtccagtctccatccaccctgtctttctttcctttttaaaaaaaatgaaaaaaaactcaatcaaaggtaactattttctcacttattatgatcagaatccttgcaaaattcagttatttctcctttgggccattctcccggcccatttcttcgtcatttatttttcaataaatctattttgcttccctcaactcttgctcttgattgaatcgcctcccttaacagctataccaggtataacatcttcatcttcaaaaaccggagcaaatcaagtccctcgtctgttttaatcacggttttgtcctcctacgtaaagctcatggaaccacgtgtcagtgaaaaaaaaatagaaaaatacgcatgtcaggcctttctttttcctcacccctttctcacatctctcttccccattctctcgccaagcggcggtagcggccggagagctcctccctgtgcgccctgcggccggtgactcctcccgttctgtctcgccgccgccgccgcatcgatcgatatgtagccagccggtctgttcctccacgttggcgacggcgcttgttgctttccgccgacgtacggtgttggcatcgttagataatcctgaagctttgttcagcaaattcagttactctgtatcctgtagcgtgtctagctattttcgttcttcagctgttctgttttttcagttagcttattagctggttttttaggatctgagccggcacttccctgcgtggttgcgtgttcgtgcgcgccgtggagtcgtgtgtagcgagagggacgtgttggatggcacacgttgcaaaccgatcatggcgcgctcgttgaggttcatggcgagaagcgcggccgcgtctgttcttatatatttctcagtcgcaaattcagaaaagctgcagcgagttaacgcccgcagcaccagatcctctgctcccactgtgttttcgcgttgagtatttgcaaattccactgtgatcctgtgagctagataacataacggtacgtcgttgctgctcacattgatcgatgtagccggcatacggtacggtacgtctttgctgctatatatccatgttgaagtaggagtatatatctagagaatggagtagagagatctcactgggaaaagaggtcttctatattaattcgtccccgatcgagaggacctgaccgtgtcgccgtcgttgatgacgcctgtaggagaggagagctctcctcacagtttccctcgtggcagccgatcgacagagcagagcacgctcagctaagctatccaaacagccgagggactttgatttgatctggttttcgaagatggaggaggcattatacctaatcaggggcaagagttga

SEQ ID NO: 6475 - DNA, 14947 bp, Oryza sativa
tttgtactgtgcggggggccgcctgcaaatgggcggcgaggggacatggaattttgcaggcggcccccttgccgccctgggggagggcgatttttccccccccccctataaagcccagcccctcctctgtgaaatttcattatattcactaaaaatccaaaaaaaaacgaaagagagaggggagggcagcagaagggaagcggcgaagccctgctggttcgctcacttcatcacaggtatgctcccatacatcttttgcatttgtactaatatgttatgtttgagtatatatgttgcgttttagttttagttccatatattttagcacatctgtagcacacagcacatatgtgtagatccagagcatagaatataatagtatgaattgagacatagacagtagtgttaattgtaagatgtagtttagtttgatctggagaatgtaacgtacttttagaaatttagagaacaatattgtagagaatgtaacttagggcgtagtacagaaatgcgaggttaacgcagttattgttttcatcaggcacaatgtcaagtaaggtcacatttcagatagttcacggtgaaggaaatattagatttggtccagatggtgttgatctgtcagattttgtaatgacatctaagggcatcgatagccctgcggagagaacatttcagtcaatttatagttggttgttgagaggatttagaatagaccaagaagtctacacaatgtcagtatcagttgtagtgagtcgtgcaacagaaggttatttttgggaactaatgccgatggacagcactgctgcttggagacggtatgtgcaaatggcttttgaacggtcatggcccctcgttatatttgtgtcggtacaagagaaagatatatatgtttcaatgcaaaccgaagatgtagagggtcctatcaatgcaggggatgttgttggaccatcgatgcaaaatgaggaaaatcaaccaaaggaggagcaggccatgggcatggcggatgagggggagagagtcagtataattgttgatgaaatggagagggaagattcggataatgaggaagcggacgacgacgcatcatccgatgaggaaggtgatgtaatggccactgattgggcaaatgaggacttctctggacttgttatatcagagggtgatcatgtaccctgggagtataaggagaacgaggtaattgagggtgcaaggtatgctcataaggatgagatgaaggaggcggtgaagcattgggcagtttccttgcagagagagtttagggtggtcaagtcaacaaattatgtgtatgaagtgaggtgcatgaaggaagattgtccgtggcgtgtccatgcatataagggtaaatggaatgattattggaaagttagcattgtgaccgagcacaagtgctacttacaaggggtggagaagtatcaccgaaacatcacttcagcttttgtggcaagtgagatgtacagcagtgttgttggtaacattggctttgaaccaaaatcaattattaggcacatcgagaacaaattcaagtacaccataagctagcaaaggcctggagagccaaagaaaaaattattgagatgaggtacggcacatttgaagcttcttatgataatttgcctcgtttgttagccaccattgcccagaggaataataatacgtactatgacctacatacatttacatcggttgatgatcgaacaaagagtgtgctgcaaagagcctttttctcattgggtgcttgcatcaatgcttttgtgcattgtcgacctgttctatgcatagatggaacttttatgacaggtaaataccgaggtcagatattgacagcaattgggtgtgatgggaacaaccaggttctacctatggcttttgcatttgtagagagtgagaacactgaaagctggtactggttcctagagagagtgcacattgcagtggtgcgtatgaggcccaacgtttgccttatacatgatcgtcatgcgggtatgttgcgggctattgactacttgcagaacggttgggatgagaagggacttccagctaagtggcctgatgttcggagtcggtggtgcatgcgtcacatgggtgcaaatttctacaagcaattcaagaacaagcatcttatggagctctttaagaggctctgtgcacagaaccaagagaagaaatttaatgagttgtgggacaagttggatgagttgacaacgaagcaaacagatgagcaatctcgcagaccacaagttgaaggtgacgagcctcccatacctcttggtgcattacatgatgacccaccaacaatgagaaggaggtcagggtcgtccatcagaaatttcactcagtggattgagaatgagcctaaggagaagtggtctctattgttcgacaccgatggatctcggtatggcataatgacaccaatttggcagaggtgtacaactgggtaatgcgaggagttcgggtacttccattgattgctattggtgaattcatccttcacggcacgcaagcgtactttagggatcgatacaagaaaattggtccgtccatggccgataacaacatagtgtttggcaacgtagtgacaaagtacatggaagataaaatcaaaaaggcacggagacatagagttgttgctcaaggcacacaagtgcatcggtatgaaataatgtgtgttgataggagcaggcgtggtatctatcgcaagcaagccgtgcaggaatgtgtcttgaaggcggatggtagatgtacctgcagttgtatgaagccgaagcttcatcaccttctttgctcacacgtccttgctgctgccggtgattgtggcatatctccaatgtgtacgtctcaaattatttcaggaaagaagcaatctttcatacatggagtgaggagatatatgggttcgggatctcaggatcttacacaacgctgagtgcccaagttttttatattccagatccatctaagttaagggtgaaaaagggtcgacgccaaactagacgcatcagaaatgatatggatgagtcagaagcaggtgggaggactttacgctgcagcaagtgtgatctgcgcggccatacttacaagaaatgtccgaagaatgcagaagttccaagcggcgcagatgctagtccatctggacaggcaagtgatggtaggcgaccacctggtgaaggaacaacaagcaggcgcgcaaggccaaggcgtcgtctcgcagcaggcgattccatggtgtaacaatgctatcgatttaggaaataaaatgctgttgtgatgtgatgagtgttcggactaaatacttctatcgtgtaatttcaattgaatgttgttgtaatgagtacctccgactattgttgtactagtagtattgcgaactattcggtgttgtatcataatgttatcgtgatgagtgttcggactaagtactcatatcgtgtaactgcagttattgttgtaatcagaaatattccgtatggtgacacttttgtttatttgtactcttgtttaatatgtgttagtaattcgcttattaacatttattacttatgttgaactaattatttatatgtttctgatcaatctatttgatgcaggtatggcgtacgacacaccggcgctgttgaaccgtgggattgacaggaacgaccggcgcttccacgagctccgcaggggcgttcgccacctcttcgggcgcgttcgccagctcttcctctcacggagcgtcgatccctcgcccacacggtactttactttttattactactgttaaatacttgtacgaaactgatggtccttgtccagcaggatttgcagccgggatcttcggtactggggcctcttcgtctcacgccggtaggactggtcctactagccagttctacgacgacgacttgcacggtgcacaccaccacgacgtcctaggctcctctcagcttggaggagctccagaggcgcacactcaggagcagccagagatcacacctgtacaggcaggacgggttggccgtgccgtacccccggaccgactcacgtactcccaggggcacattagggcgcagggtaggagggacaggggtaagaggcctcgtcagtagtgttctacctcttcagtccttatgtgaccgtttcttttggcttacaaacttgtaaagcagtactacttttgctattactactgcagtactacttgtgtttgtctcgtctacgtagttcttttcattcataaggtgcttgaacaacttatgctcacaacaacacactttcggcgcttcacggtagtgccagatccagtagcgcgcacagtccacaacagcacacatgaaaagcggcagctcgagttatcactatcaactttcggcgctgcctgttgacataaagtgaatcacgcccacgcgtgatcgtcttgtcacatctaatgaataatgtatctcattgagttcacatatattgcagtgaaaacgacgctatataattgacaatctgaaggcaacctcttcatatcttctttcccactagcacaccacacacgaaaatggaatcctattcattggtaatacgtaatctagatttgagattatgtagaacattcttcactacaattttacattttggcagcaaaccaaatatgatcaaatgcaattttaccttaccaaatatttggtagtgccaaaacttgcttatattttggcactaacaaaatatttgtacggtaacaatccaaatatgccctaaaaaataataaaattgtattttactagtctccagatttgataactattgatatttatacaaaaaataaagagcacagtacaaaatcgccctcccccagggcggcaagggggccgcctgcaaaattccatgccccctcgccgcccatttgcaggcggcccccccacagtagaaaatcgccctagcggagggcggcaagggggccgcctgcaaaattccatgccccccctcgccgcccatttgcaggcggccccccgcacagtataaaatcgccctagcggagggcggcaagggggccgcctgcaaatttcgttgacggccgtcgcccgagagcgaacggccggctgccacgtcattttcgccgccctctgggaaaaatcgccctcccagagggcggtaggcgactaattccgtcaattttcaaaatggaaaattatttttgtaaaacttttaataaaaaaaattataaataaaaaaaattctacgtctggccaccttcccttccggcctaggcccaccagccgcttagcaccttcccttctccccaaatgaaggttgatcgagcacaattcttggatgcccagcatcttaaaattttctcgcaatcctattttactgttagcagcagagacagccgctaccatcttcactgctaagggagtgtttgagacaagtattggcaagggccctcgcgtcgccctcccccgggcggctcgggaggcgacgcgcgcgccgccgctttcctcctccccccgccccctcctccacctcgccgccgcccgagcggctgccggaaagccgcgcagccgcaaggacggcggcggcggggtctcgcctcgccctccccacgctcggcggctgggggagcagtccggggcggcagtggtggcggccagatccacgccgtttccggccggatctgaagggggggtggtcggcggcggggactgacggtgacggtggcgactgaaggcggcggaccacggcaactgagcgacgttggcggcggaccgcggcgactggcgacgtcgacggcggaccgcggcgcgtccaggccgccacggcagggacctccgccgcaccgtcatggtcgtctcgctccagcctagcgctgagtggcgcgctccgtcccccggacccgcgccaccccagccggatctggatgggcggcggctgctggcggcggccggtgatggtggcggctggtgacggtggcgtggagacgaccggtggaccacggcggctgacggccgtggtggtgatggctggcgacggtggcaccgtgcagcagacggcgcgtgacgccagcggcagcatatgaaggcggggaaggagttgggcggtagggaaggagaccgggagcgggcgtggcgtgggcggcggttgcgtgtggcggcgttgcacggctcgggagggctccggcgagctcggcggctgcgcagagtcgagacgggcttcggcagggttgctcgctggtggtgagcctcctgctcgcgatatgtggatgtggatgcgctgacgtgtttggtcacgtcgaggtatgattgctcgtgagacgtcacggactattccatggtcgtcgacgtggggtgcttgtgtgagtgatgtgaagacgctggcgaaagccttgccgtgcctttggccggttcgacgacgacgacgctcttgggcgccattaaccttcttggaggcgtcgtcatggcgttctttcatattccccacaaatctccgggtgaaaaccttgttccgatttcggacgagcggcggcgacgttacgcgtcgtgtcctccttgggggtgtcgcttcggagaagttcctatgcatcaacgaccatggatggtctttttcggttctaaagctttcataccttgacgtttggcgaggccttcgcctccttgggtccgcttcgttcttgtggtgggcgacatgctcttcggttgcttctgctgatgaagtcgaagctgctcgctgatggggtgcggcgatgcttggcaacgatgacaagttgcagtctcttccaaggagttggtgctggccgtgtgaaggaagtgtctctttggtggtttggctgatgtccattgttggatgtcggagctgcttttcgctctggcgactttcgcggattcagtgtcgctgcggttgtgaagtcggcgctgctgggtcgctttggcggctagctcggcaacgataacacctcttctgtgatgttggagctgtttgggccgcttttgtgttttagcttggcaatgatgttctacatttggactccgccgttgttgatagttgtgtagctagatctcttgctttcttctgtgtggtgggttttagccggtttcccgtaattaaccgtgcagttgtatggttttcgggcccagttttccttataaactgggtcaattctcttcttctaaatataaaagtggaacaaagttccgccttaggtttcaaaaaaagggagtgtttgagaggggagaaaaaaaagattaagaagatgatatacaaaacgagataagccaattagcgcattattaattgagtgttaactatttcaaattttaaaaatggattgatataattttttaaaacaactttcctatataatttttttttcaaaaaacgcactgtttctctcccaatcacccaccaacgatagactatctagaaacaacattggccgctcggtctccgacgctgccatcgtcattgcgaattgtcgtcgacgtatgaaaaaaaaaatcgatttatcatctggaaacaacattagccgcgtcgctcgctctaccatcgctgattgtggaatttattaaaacactgctctgaacttaaaacaacgggttttttttttgtttcagtcacgcgctctagcttgtataaattactccattaattatatagaatctcatcaaacatctaatttgaacttcataaactcatatgaacatgtacatgcacagcacataaaaacagacacacacatacaagatacgtgtaatcataatcggaagatgatttttacgactcaaatatgtatatgcaccttacgtcctaagccatttgatgttttgttgagattcatgttatactaaagaagaacactactaacattattatgtcttattaaaatctactccctcaatcccataatataaggtatggtaaaaattacacggtctccaaaactaatctttaatttataatttctcatatgctataaggtttgtaacaacaaaattataatcatatgaaagtaaatttaaatgtcaatctaacgatataatttttatcaaataaaatttatttcatattacgttaaatgttggtcaaatattttaaagattaaatcttgaaatacgtgcacaccttatattatgggatggtgagagtatattatgccatgtacaacgcgtgaccctagcttgtggtctcaaacctccacgtcggacgcgcgcacccatggcagtggggaccgtagcactgcaggctgatcccgcgcttgcagaagaaccgcccaaagcgccgcgccagggcttgggaagggcgaagcccggtccgaggccacgcgttggcagagccggagacccgtgcgtcgcctcgaccggtccccagatccgccgccaccactgctccccggcgccgacggtcgcgaagaagggaggaggagaggaaccaccgccgttgtggcccccgccgccagatccggcgagcccgccaccgacaagctcgccacgccgtcggcgagctcgtccgcgtcgtcgtggggggaggaggacggcggcgtcgagccatccgccgccaccgctgctcaacgccgccgccagatccgccgacactgctactcaatgccaccgctagatccaccgccgccgccactccccgccgccgctaccgctgctccccaccgccgccagagctcgagcgccgctgatggggagctcgcggcggagaggggaagggagaagccgtctcgcgccgcagaggggaggggagaagctggcgagctcgcgccggagaggggagggatctcgccggcggggtggagtaggcgtcagtggaggtggagaaggggatcggaggagcaacgtcggtggcgtatgagaagggggacaggagagagaagggggagagtaaaaaagaaataggttggaagaggctgacaatgggttcttatgatatttaggggtgcatatgtacttattttggttgctatgggattcaaaatataaaattttaggcctcatttctttcagcttgggattattataatctagattattgagtcagattactataatctagattgttataatctgtagtagaataagcggttagttgtctctttcctaaattattagagcctagattattgggtttgcaagtctaaagagggagtggggtggcatggtgggtaattttttacccaataatctagaaaaagctcacctaaatgagcttatcatattataataagttgggctccagattataataagctacttcaataagttgtctgaatctttcagcttactcccaataatctggattataataatcccaaactgaaagaaacagggccttaataggtttgataatatcatacaacacaagggctgacatataaatagataggggctgaaatgcaaaatatgttttggagtggttaccactgtgggttgtgtgacctttatgtggttctattctacgtggcaacttgagaccactgttgcttgtggcttgcattgtacatacccttacatgggcgaatcttgaagcaaatttgatgacataaaagtgcatgggaatttgcacttgcgttgtgactttcctgcataatcatcgatgtatggatacattatcttcatcctaaaataataaaataatatagtagtatatataagaaaaaaatttgttaatatacttatttttttaataatttacatttatatacatacatcggacggattcgtaaaaatatacatgtcccgcacgatagaaacgcgggactgcgatgatcccgcagctccaaaacgcaggatcatcggtcccgcagaatggtcgtggggccacgacggtccgcaggttcaaaatgcgggagcgaggcagcctgtgattttcaacgtggtttagcactgtgtagcactgtttcgatactgtttgaaactatttggcaccgttcacacgcgcggtaccgcaggttcaccgtgcggaaccggcccctaaacaggccgctaccgtgcaaacagtacccgaaacagtgttgaaccagaaacagtgttgaacagtgccgactcagtaaaataaatcgctggccgactcgctcccgcgttttgaccgtcgcgatcccgcggaccgacgtccggcgttttacaactgcgggactatcatggtcccacgtttctatccaacggaacgggtatatttttatgagtccgtcttatacaggtatataaacataaattattgaaaaaataaatattttcgtaattttcattcgtatatatgacgctagttagtatactctcttagttctttaatatataatgccatctattttttaaatacgtttgatcatacgtgttattttcaaaaatatgtaattatcatttgttttgttataatttgatttatcacatgttacatgacttgtaactttattgatcggtaaaaaataaaaattgaataagtcaaattatcaaatgtatgtcaaaatatcaatgacatcgtgtattaaaaaatgcatattaaaaaaggaggtagtacatgaaaagaaactgaggtagcaatatttaattaagcataattaatccagagaggctgcaggggtgagattattcgtcatcttcctcctctttaaacatggcttgtaattttattgatttgtaaaaataaaaattgaataagtcatatgatcgaatgtatatcaaaatataaaaaaaatcttatattaaaaaaaggaatgagtacatgaaaagaaactaaggaagtaataattaattaagcagaattaatctagagatgataaagtaatacttcctccgtttcgtattataagactttctagcattgcgcacatttatatgtgtctagattcattaacagtagaatgtgaacaatgaaagtattataatatgaaacggcgggagcaattaattaagtagaattaatccagaggcgccgcaggtttacctacgcgagcagattaatcgtcatatccctcctcctcttcttcctcctcctcctcctcttcgtcctcgccgccgccgcctttgcctttgcctttcttcttgcgcccaccgccgccgccgccgcggccgttcttctccagcccgatgaccttctcgacgagcctgatgacgaacgtcttcacccgcttcctccggctgccgctcgcgcgcggcgacgacgccgccaccggcgcctggttgtaggacgatgcccgctggtgctgcgtgtaggccaccggcggcgggtggtggtggtgggggcggcggcatccttggcggtggacggtgaagttgcagagcgggcagcggtagccgaggacgccggcgaggtcgcggaggcagacgttgcaggtgcagaagccggcggggacggcggcgaagctgatggcgacggtggcgcggccgcagaagccgcagctgggagggttggaacaatggccgccgccgctgctctgatgatccattggttaattactagacctaatattgattcgatcctaattctccattgttttagtggctgattttatgtaggcttaaaagaagttggttttttacagtcattttcgaggaaattaaacccaacagctagtttgggattgggtggatagctacggtcccttagatataggatcagtttagtttcacatattttaatatgtttatgtctaaaatctaccactttgactcaatattgtttttactggtacacttggctcaacataatcctaggggacacaggaaatgggagagcgctacgcgttggacgtacggcgcgagacaaaaaataccacatgaacgtgccatgttatccacgcatgtaagaacaataataatgatcattatatataatcataataacaaataaaaagaaagaaaagacaaaaccatatatatttaaaaaaaatcaggctggcattctatcatgactttctgggttattattatttttgtttgttcttattactgtaatatggtatatgtaagggtagaaggatttatttttgtccttatatatgaggattacgtggcatgctcatacggtgttttgttcaagggttacattgagtcaatagatttctaggagataaattgaaacgtaagggattgattctgttttcaagatttccccacacaccccccccccttttttagaaaaaaaaaggttttaaagcttttctggtttgctagctcctgtaatgctgtttaattaagtccctgtattcgttagctataaatagatgagagaatccaggagctaagctgaccatttcttcaactcccggcttatttttatgtatacgtactggatggtacctcagacgttactgcggaacattatggaatagcataggattataattttttttttaaaaaaagaagccaatgaactgaaatgtacatgttgatggggatgtaatatgccacataagcaatctaacagagtcacctatgagagcaggtacaataaaagctgaattagcagtgggtagaattgtccacttcagcaaaatctaggtggaagaaagagaagagaggagagagagagcaaagcggacgctcatgcagccgccaggtgatagcacgagaaaaaaggcagtggcacctacatgcagccgatgcaacagcaatgcttaaaggtcatggtgaaaataagataggtcccaccataccctatgtccatagccacaatgttgaaggcaagaatatatgttaagatggttcacacatctatgtaaacaaattctactttaaagtaggtcccaccataccataatctattctcatcctcatcctctttagtgtgcatgtatgctttatctcatcattttattttttaaggttgagccataaaaaacttatggctatttttagtatttaatgtcttatggctagtgcccataatatatatggttagttaaaaggcctatggctcattcttatggcacattgtggaagcctttatatgtgggattgcatgtccttctgattggttgggagaaaaaaaggttgacgggtgagagaaaaggcaagttaatgtggtggggacccaaattaaaaaaattgaatggtatatttttgtaatttgtgtatagcaatctacctaatagtctgttgttatacacctatctttgatgtagataattttatagacaacaaccggctctcttattaaacttgctctaagtagacagggcatctatattttcagagaataaacggcatggcaggaagtaaaaagagaaaattgtacagtttattttaatcacagactaaacaaaaattttgtagacaatacataggtaaagccataataacttgaattgttcttggataaacagataccaatccatactatatgacttcactagtgagcttcatgagaccaaatggtgatgtctatgcagttgctgaactcaagtttacgtaccagtgagatcatgtaagatgaagcccttcaatatttccaccaatgtaagtctgaagagcaagagactggcttccgtttattccttccatccaattgtctggtgatgagctgagacaattcaagttttagtgttttaccatagaaaaacaacagtgcacatagtagtttgtgacgatggaagtttcaagttacaaattatgtcaagtatcaaagacataagaaatttgcttataaaatctctagctatatgagtatataaaataaaataatgatggacagcattgcaattcatacatacatagggatgacgcccccatgttagatatatctccctcccttgagcccaacggctcaagggggccttgactcgcgccctgatcgggggcgcccagcccaatggctgatgggcccccatcatactgtgccatataaagaggggtggaggacgggacgcacatgacacaaggttcgtcgccgccgccactccaccccaaaaaccctaaggccttgttcggttcgggtgtaaaaggccgggataccagccttttccccggccccttcggggaagcccaccacgaggggatagaatccctgagttgtcaaaaaatgcattcggcttagcccgggaaggtggatttcccggcccaataccccacaaaccctagggatattggtccaccaccctgacccgtggaaactcaccacaccgctgcctcttctcgactggagcggcgcccgcgccgccgctgctcgtccagacgcgcgccgcggtgggccacgcccgcgccgccgctgctcatcccatcgcgtgccggcggtgggccgcgcatctactcgcgccggcgcctgccgtcactttggcctcctcctctcgccggaaacgacgccgcctctcgtcagatctgccggagttcaacaacggtgtggccttctccgttcggtctccaccatccaggacctcgtccccaacaagaacctccaggacctcgtcgtcatcttctaccagcttgtctaggtatgccaaattccatccttctcctgaattgattggtttggtggttgggaaggtgaaatcttgggctagatctgatcgattatgttgcggatagttaatcttgggctaggtaatcttgtgctaattttacttgtgaaatctctaggcataatctgtgcagctctgtataagttgtggctctgtgtattaattcctgatgctcgtgtggataaagcttgagcatctctgttgatccatgatatactcttaatttttgccctaacaaacttgatacggtttgtgtattaattagaattcttcatgatcctgtgaagcacccaaacttgctttgtcaattcctggaattaaaatgggtaatttactatgggagatgatagtaacaaattctagatgtctgacataatgttcattcgaaggaaaatattttcttcctttccttttatgttgatcaagatatattgaaaggagagtaatcaggttttgtccctttatttccgaacagatatttttgtggttcattgctatggatttctg

SEQ ID NO: 6476 - DNA, 7369 bp, Oryza sativa
acagtcgtgttgctgctgctgttcgtaaccgcttgccgctagctgctgtctggccgctgtgctatgccgggccattgctgctataccgggtcgcagctgtgcgtcgcttaaacctagccgtcgctttaacccgttgctcggtagttgagttgtctaggtgtaggtgcatccctaaattcctgtcggcctatcgtttgccgtaccggggctttaccgtgaattgtgtctagctcaccggtttagttgcagccgttgctgagtcgttcgctcgttcgttcgaacgaggtgttccccgtgcttcgttcgttcgtccgtgttgactcctcctttagttcagagctaccggttccgttcgccggtttcggttgatcatttgggtgatcccgtgtcacgtagagttgactcgttgagtcggtatctcgtgaggctcgcttgccagatcaatctaagccatccgatcttggtcgactctttgagtcggttgatctcagccgcccaaaatcaatataaatcctttccactctttccaatggcatattaattctttttatcatatgtcatctaccaaatataatctaatctttttccgaaggttgttttaatctttcatctccgttataaatcatttgtaaatggtttaattaatgtggaatagtctttttctttaataggtttaattgtaattaaatcttgtaaaaatcataattaattcatacgaaatcggaatgagaccgttcaagtctctaaatttatctaaaatcaagatctacatgtttgtttacttttatgtactgtttatttggtttttattagtctttttcctcgttttgcgtgttagcttgtcgtttccgtcgtttcgaaggattcgtgaggcgttggaagtattcaagaagactaactgaagaccgaatattgcaaggcaagtcacacagatcccaaacacaattcctttgagcatgttgatcctatatttaaatttcctatttatttcaactgtgcatttattttcgaatgtcaccgggtggtgagcctttcccatttaattatggccaaagatgactttattttcctatgggttataatttgattagctagaaccttatatattggtttggttcagctagatgcttataatagatgcttagccatgcttagaaacaatagctcactaatgggataaatcatgcttcactatcacttatggatatttaatggaagctcacgatggttgatcgtgattggttaattaattaatttgccaactaaaacttgataatggtgggttgtgagcatatggttttgatggtcgtgctcatgataattaaggaccgattcacgagtttcggttgtgaaacattaaccatgccaaccacaagccagcgtgggcaacggctttaccttttgtatagcatggttcattgcggagcaccagactgagaagtggcagagataagcccacgagggtcgctggggagtccatgccttgtttataagggggtgattatgatccaggaacggtgcgctgtggtggattgtgttgtgcgaggggtactgtcacagctcctttctgaggtactgtggtggtattgaggcgcatggtgacatgttgtggggctgtgtcttgtgggtacagtggtacacctctggccagagtaaaactattcgaatagccgtgcccgcggttatgggcgggtctaacaatgtctttcgtgattagtctcacacttctcaccataataaatgatgctataattggtaataatttgattagctcctggtttggaatggtatattcctggtttggagatagatctgtacagccgggtatggttgttcaggatggttgggcctgagcagcatgggtatgctgtttagtgttgattaaaattgatgattaattactctactgttttataattctcaaatgtttgctaaatgctgcttttgcaaatgagccctatattatgccattctttggtatccttgtgcacttgcatatttgctgtgtggcttgttgagtatgtcatatgctcaccttgcaataatcaatcaaacctcagttgaagacaagttgtggaggagaaaacgtttggcttataccccagttgagctgcctgtgggagtggagccggagcttcgctagaccgtaattccgctgctgtttttcttttcttttgtaagtatttacgttattattatgatgaatctatatattaaattgtcagtttgtgtacctcggctgattactggacgaggatttaatgcacaaataagttcggaaattactagtgaatttctgggcgtgacagctttacggaataaattgttgtctaccgtcattattgctttccttcgagagtcccctttccccgtagtctccgtccatggtgtgattcaggtaccccgattgggcgaaggtcttcgataaattctacgcagaattcaatgacctcctctgttccataccccttggcgatgcttgcctctggacgagcacggttaagaacatacttcttcagaacgcccatgtacctctcgaaaggaaacatgttgtataggtacacaggaccgagaataccgatctctttgacaaggtgacaaagcagatgcgtcattatattgaaaaatgaaggtggaaatatgaactcaaagctgacaagacattgcaccacatcattctgcagggcttctaatctatccggatcgatgaccttctgcgaaattgcgttcatgaaagcacatagctttgttattgttgcccggacattgtctgggaggataccccttattacaactggtagcagctgtgtcatcaacacgtgacagtcatgagactttaggtttgtgaacttcttctccttcgtgcttattattcgctttatattcatggagtatccagacggtaccttgatgctctccaagcattcaaacatactttccttctctgccttgctaagagtgtaattggctagactcaagtaatggcttcctttctcctttggttctgggtcaaggtcgccgcgttgttccatatgcttcagattattacgtacttccagtgtatctttcgacttttcatatacacctaggaagccaagaagatttacgcaaaggttcttagtgaggtgcatcatgtcgattgcatggcagacgtccaagaattcccaatagggtaactctcaaaatatagagttctttttccacatcgccgcgtgaacatcttcgctttctataggctggctgccaggcccctttccaaacactactttaagatctttagccatagcaaacattgttttcctgctgcgatgtttaggcttcgtacggtggtccgccttatgttcaaagtgcttgcctttcttctgtaccgggtggtttgctgcatggaatcgacgatgacccatgtaaacaaccttcatccatacagtgagtgcaagccttgtaccccttgttggactgcccggataggttgctaagtgcaggccaattgttgatggttacgaacagcagcgctcgtaggttaaactcctcctgtttgtcctcatcccacacggggacaccttccttcttccacaacagtttaagatcttcgaccagtggtcttaggtacacatcgatgtcgttaccaggttgcttggggccttgaataataatcggcatcattatgtacttcctctttatgcatagccaaggggggaggttgtagatacacatcgtaacgggccaagtgctatggccgctgctcatctctctaaaaggattcatgccatccatacttaaaccaaaccgtgtgtttcgtgcgtcctttccaaagtctttaaattttctatcgatgtttcgccactgcgaaccatcggcggggtgtctcagcatcccgtcctgttgacgctcttcagcgtgccaccgcatcattctagcatttcccttgttcctgaacaaacgccttagctgtggtattatagggaaataccacatcaccatagcaggaattctcttcttcgttagctgcccgtcaacttctcctggatcatctcgtctaatcttgtatcgtagtgctttgcaaacagggcatgcttctaggttctcgtactcctcaccgcgatataggatacaatcattcagacatgcgtgaatcttttgaacttccagtcctagagggcagactatcttcttagcctcgtacgttgtctcgggcaatttgtttccctccggaagaatgttcttgacgagtttcaataaatcgtcaaatgccttgtcactaacactattttttgccttccactgcaagaactccagagtggtatccaactttttgtgcccctactcgcaacctgggtacaacgacgttgtgtggtcctctaacatcttgtccaatttatgggcccccttttcactttcgcattcctccttggcgtcctgcaacatctgaccaagatcatccgcaacgtcgttaccatgagcatctctttcctcctcgcccgtttgatttccttcaaatccagcgtatagagcaaagtccggaatattgtcgtcttccacttcatattcttccatttcaacaccttgctctccgtgtgatgtccaacaattatagcttggcatgaaccccgactcaaacaagtggaaatgaatagtcctggatgcagaatactccttctgattcttacacttattgcatggacaacaaataaaacccttttgcctgttagcttcggccactctcaaaaaataatgcacgccgtcaataaactctgtggaccgccggtcagcgtacatccattgtcgatccatctacatgaaatgaaaaaaaattgtacacaaataattattcgtacaataatgacagtcatataataattataaaataattacaaactctttcaacagtcatacaataatgacatatcattattcatacaaaaattatgaaatattacaccaaataattattatttactatttctaaagttttaaactaatattaatgtgttgtacttcttttaattttcattttagtttgttttctattatttaagattaactttcactatattttccttctcaactattttataaaaccttctttagcaaataaactaaatttctatatattctttcttccccacacaaattttctctatcatcaacttacaacaaaattttggagacaaaaaagtgtgcaaaacatagctccaaatgtaatatgacaaaaaaacattggaggatgaagttactaaccttttaggcacctccgatttgtatataatcaccataataaatttactagaaattttggcatgacctcccctcttttttgaagaaattttgaagcttgctcgggctggagaaggaagaagacatatatataggggttggactttagtcccggttggtgttatgaaccgggactaaagatccaggggggcctgacaagccctgacagcatttgaaccgggactaaagattaccaaccgggactaaagatcaaatatgcccgttaccctttttaaccgggactaaagatcatctttagtcccggtttttgttgcaaccgggactattgtgcaattaggccaaccgacgaaagatggtttctccaccagtgatcatattttatataaaacttctttttattaattatgatgacgatatacggaaatataaacatggtttatagtatagtagtttaagttaggctcacccaggcttcacggaaatcctcgctctgccactagcctcacattgggtgcttgagtaataattgaagaaagaatcttgctatacgtacgaccaagccgtacgatttgtgtccgaccgagtcatgcaaccaatcactgaacttatttactactatgtgggctcagacaaacagcatatatgcttatacttacactagtcagatggatgggtcggacgtataggtcggacgtatagcaatttcgttgaagaaatcaatagactcataaacgattgttttctgtttaaatttttgcagaaatcaatagactcataattgcagaaatcaatatgttcgtggtagtcgtggaagcaactttcaagtactaaggaagacgaaagttgttcctgtagcagtgtagctacacccatttcaatcaatgtgcagacttcaaaaggaactggaagaagaaaatattatagactcataaacgattgttttctgtttaaattttcgcctttcctctgtttttaacagaccgcaaaaagttagtaattggagatactgccctgtacatcatgatgctcaaatgagatcaatatagcatgaccagggaaggtttttttttttttttggccagaaaggttaaaacacttcgctattttcagttgctacacattagtattacaaggaaaaaaaaggatggccataactacaccactgatgtctgcatgattgtgatgtgacacaaaatataatcaaatcacacttcttggttttgctgaaatctatctatggaattgcaaattctgcctacaaattaaaatgttcatgcgagcacatacagtacagggaaaaaaacatccatcatgcatatgccctgaattttgcagacgtataaggaatcctccattggttgttgtatgcagaacattttagccaccatctccatttcagcgtttctcaacctttagatctccagcttctgactgtcatgcggcaagatgaaaaagctaaaatctgagcattatatttggcttccaccatgcatcatgctcaatgcatacataaataacaatttcgaagctacacacaaggagatgtctttgatttcgtgtacatttcgaatttgtgttacaaattactcagtccatcccttcgtatcgatcaatggctgctgcaggatttgggctctataaaatcaagtagttgacttagattttgtgtgatgaaaacattggtagttggcgatatttcaagtgtgaaagattggtttcttgtgataattggttttgtgaagtgatgttgctattgacccctggcggtcagaccggctggatgccacctacatgtgttttatgatcccgacggtctaaccgctggcaaggcggcagtctgactggcgggagtgtggcggtctaaccacaggtgtataggtggtctgtgtaggatcgaacatgagtaaccaagcctaccagagggggtgaatggtagggaaaatcaaaaacccaaaaacttttagcggaaataaaagttaccctcaaatcgaagaagatcttgacgttgtccaatcgccgctggtcacaccgctcctaagccgccggtctgaccgccgtagcctgcccggtcagactgctgagttgtctttggttagaccgttgtactcccaccggttagtctgccgccttactg

SEQ ID NO: 6477 - DNA, 2119 bp, Oryza sativa
agctaccactccatctataagaggcaccatccacctatacttgaaatacaattttctcttaaactattcatctgatctaagatccgattacaccgttgtgttcgtaacaattaaatctttacaacaagatctcacatgattatattttgataaaaaatcacaaattacttttatgatatgtctaaattacttttaggtttcactaagttacttcttagacatataaaagtaaattcagtaaagcctaaaagtaatttacatatattatagaagtaacttagaacgaatcgaaggtaactttgacatgccatttgaagtaaatctgtcgtagagataaaaacatgactcaatctagaaattaaattaatcagcacaaattatggaattaacttaaaaaataataaaagtaatcacctcagagcattatgaatgtataggaagtattttaatccaatctaaaagcaacttatatatatatatatatatatatatatatatatatatatatatataagataattttttcaatgaaaaaaggcattaattaaagttactttcctttttattataagttacttctataatatatgttacttacttttaggctttactgaatttacttttatatgtctaagaagtaacttagtgaaatctaaaagtaatttgtgatttttcatcaaaatatactcatgtgagatcttgttgtaaagatttaattattacaaacacaacggtgcaatcgaattgtaaatcggatgagtaatttaagagaaaattttatttgaagcatagatgataggaatatttcccctacttgctcaatgaattaatatcaaccaaaactcctgaagtactagcacgtgggtgtctctggatatgactaattggagaggcgcctccaattagatttaccaatatacaaaattttaattcacggtcttatgagatagagggagtagaagtaaatagaagaatgtctttacttagatggaacaataatattaacaatttccattctacaatcaaccatgaaaaccattttcattccacaatcaacatgagtacggtaactatccgtggccattggctagccccctgaatcaccattgatcatagatccattctcactcagttacccttttcttttcctcactaattaattaaccttatcggctcaaccaaattgatattggaaagaaacacatatgtgggggaaagactatttagaaagaacttatgtaataaccatctgatagccctcaaaatttggcgctttatcacactactacaaaaaagcccataaagatcggcactataggtgctggaacagttaaaacatgcacctatagtgattttaccgcgtccattggttgaaaacacataaaaccggcacctttaagcaactataggtgtgtcggttctaaagaaaaaccgacacgtagagtataggtgccggttttttataaaaaaccgacatctatccaaaccgagccgagccgacacctagccaaactggcgacgcattagccttgtcgatccccctatatgagtgagctggccttatcccctctcctatctctctcgtctgtctctctcttgcctccctctctcccggctctctcacatctcagcgcgcggtggcggctggaggggaggcgatgggcaactggtggcggtggcgccctctcctccaccggatccagcgggaggggaggcgcagcaggcggcggcgggcggcgacgggtggcggcgggcaatgggcggcagcggcggtctcccctcctccggatccagcgggaggggaggcgcagcaggcggcggcgggcggcgacgggtggcgacgggcaatgggcggcagcggcggtctcccctccgccggaggcgcggcaggcggcggtgcatcgtggcgcgcgacgagcgacggcctcccctccgccggatctggcgggaggggagatgggcgatgggcggcggcggcggtctcccctccaccggatccggcgggaggggaggcagcgggcggcggtagcgccctcccctttactcctctccccagttgtagatttttttgttgatgtttgtgtgaatttgttgatgaatttgttgttgaatatgtggg

SEQ ID NO: 6478 - DNA, 22804 bp, Oryza sativa
gcatcaatgccttgaaaaggttttattttgcaaatggttgacttgagaaaaacgccgttcatcaggaaaactagctagtttgtaagtcctggaaacgaatcctatattttcatagttgagaagcaattgtttgaacattgttatgagtttgttgctacactgttctgaagtaatactacctctatatcaaaatataagcatttttagctatgaatctggacacatagttgccaagattcatagctaaaaaagcttatattttgggacggagggagtacaataataacagtactcaagatttgaatcgaacgctgaaagaaaatgcactctactcatgctttgtactccctttgtcccattgtaagtgtagtgggttttcgtgttcaacgtttgaccgtccgtcttatttgaaaaatttatgataaagttttaaaaattaagtcatgcatgaagtatcattcatgttttatcatctaacaacataaaaacactaatcataaaatcatttcaaataagacgaacggtcaaacgttggacatagaaactcacaactacacttaaaatgagacggatagagtagtttattacggagggtctaatttcgtatgtccttaatttcctcctaactaaatgaaaatcatgatgaatcaaagttaccttgaaagtcacatttcttccgattgtaccatcaactaccatctcactcttatctatacaccatttaatgagatgcaccttattctttctaatcaaatcttcgatatcctaaacaatctagaattacaattattttgacacaaatgtagtaaatcgttagatacgtatataaaattttacctacatattattctttttgttaataagccggcatataattaactctacgccaactgatgaggccgaagatgtggtagatacctatcgaaccctataatcttaataataggagcaccctcacatggcctaggaaaaaccataggacaaaactgcaccacatcctgattagttatgatttgtgaatattatgacatgggtatatttccattaaaataatgaaaaaccggttaatcctgcaaaattgagggaaaaataatatcttgaaaaataaattcatgatttggaggaggccaaactagaatccatgatattacaatatctcgtaacagtgctggagtggtgtttgtgagttcagggagagggagattctctgattttttttctatcttttctaagaatagctaaactagttctaggaaaagaatttgtaataaaatttgtagtactaataggagatgccccctaacgtttcattttgtccaagtatgtcctttgacctgatacaattcttcgacacataaagtgctacgtgggcatgtgtactatttgtggtaggttctaacttgtaaaatgactttatggcctgtggatgcccaagcaaataaaaaaactcagtgacaccatgttaacttggttcttttggtaaaatatctatacttcttctttaaagatcctaaagacggtggtaagtgggtccccagacatatcccttccccaacctcaagccataaaacaagggaattttctaatggtgacaaataatgacttgaagattttataatgaaaataattttaaccacggcatggttcttttttttttaattgccattgcaacgcacaggcgtccaactagtagtaataacatgaatagtgtaagaattgaggtggcttgtctacttgaattcctatggattaataaaatgtaggaatttttgaaaggggaaattcggttcatagcatgggtgggacttcaaattcgaaaaaatcccatgaaaactttcgcacctatgctatctgcatacttaaaaaaaaagagatagatagataaaaaaaatggttcccatgagggccagcctaatgaaagaaatcgttcaaaattcccatgaactaaacagttccatataaattttgtagactaaacagttccatataaattttgtaggatctcaaatgtccattactttgtttcaaagcagcaccaaggaaaattttccatggatcttacaaaaaaaagtccagttcattttccttttgttcgaaggagtgaacatgcatagatgtgatctaaacttgtgaactccatttccacaacatcatgtgtttttttttatcaggaccatattactacattagcgactttgatcatgcatcactgtaattccggacagtgcggtttgagaaagaacaaaaaaagaactctcactgactgagtgcctaactggtaacttgtctagcgttctgcaagacctgatgaaagggtttgccttgtcatcataggtaactaaataccggctaatcccaaagaacagacttatgtctatactccttccgtcctataatataagggattttgatggtaacttgtctagcgttctacaagacctaatgaaatggtttgccttgtcattacaggtaactaaatgccggctaatcggctaatcccaatggacagacttatgtctatactccctccgtcccctaatcccctaatataagggattttgagtttttatgtctatactcccttgagtttttatgtctatactccctccatcccctaatataagggattttgagtttttggttaaactgtttaaccactcgtcttatttaaaaatttgtgcaaatataaaaaacaaaaagttgtgcttaaaatactttagataataaagcaagtaaaaaaaaataaataataattctaaaattttttgaataagacgagtggtcaaacaattcaaacaaacactcaaaatcctttatattaagacggagggaatcctttatattaagacggagggagtaccgtttttaattggagtctattgacaagatagataacacatagcataacacagagaagcagttataaaacgctttgcttcatgtcacatgatatatagagcaaagtcaagatcgaaaacggactaaaatcatggatagtctgggcttgtttcatgccgggtaacggagaagttaccagatgtaaaaaacaaacaaaaataagtcatggatagcgcatccttacgcatgcatagagacatttgagggcaaaataaacagcacgtcaacagttactgtccaacgcaagaagcccagaagcacagcaagcaaaacaaagcagcagcagaagcagcgcatcagcagtttaccttgagtgatttcaaacagagctaatggaataaaaacagacatttaaaacacctccattgtcatctcaacataacataactagaagtagtaccttgagtgatgtttacgttattacaccacatctatgaaaaagaacagaagaaaaagaaaacccagtcattgtgtattgttctggaatttgatgcttgagcaggtgatgaccattcaggtgagccggttcatcactaagagactgcaaactgaggctcgaaggacgtagattaattagccctgcttgttggcatagttgtcaggctcgtcatccttgaagaggtcatccatgagctcatcgttcttgcggcttccaaagctgtcaccaccggcaccggagaaatcaccaccgccagtggaacctccagcatcaccaaagcttccagctgggtttccaccaaaactaccatcaccacctaagttgattccagagaaggcatctgcagatccttctgcaactccataaccacctccaccaccacccctgttgccataccctccattgttgccaccataaccaccgccgcctccttggtagccgccgccgccaccaccaccaccactgtagccaccaccgccatagccaccaccaccactgtagccaccaccaccatagccgccaccgccgccgccatagccaccgcctccatagccaccacccccactacggaagccaccagttctctcattggcagtgttaaccctgatgttacgcccatcgagatcctgaaaccagccaggaagaaaataagctgctggataagattgaacaaaaatgactttggtttaatggaactgttgcatattttttttaactagaaaaccagaggtaaataatcaaagcatcaacaccataatgcatagtaaaataacaaataagaagctcaatcagaacctttgaaatggaacatctccaatttctgtaacaaggaatctagagtaggaatattcatttaagcgatcgtgttgcatacaagctgatcaggcagcatgaaatttgacattctacaaaccatatcttttgcaaaagtatggaaacatggcagtgttgaaaatccacttaaattggtttgcagtggtaaaatccattagagtaatagaaattaagggctccaaaactttagaagcattctaagtgaatttaaccagcataaatcattacaccttaagtttgacagaatacctattaagtctggataaacatatagatgatggggtaaaaaattaaattaaacctaatctgaccctcaccatacagggaccaactcttagaatcctggaacataaacatgatgcccgctaaaattaattccctataagattacctttccatccaaggctgtgattgcagctgaagcctcttcacttgatgcgtaagttatgaagccaaaacctctagacctcccagtttcacggtcattgatgatcttagctggacagaacaaaagtagaccccgttaacaaaacaaaggaccaacaggagtgcagttacaaaaataaggataagataccttcaataacttgaccataattggcaaaagtatctctgaggctctgctcatctgtgccgtacgaaaggcctacaccaataatttgtagccatcagaaaagaacagtacagagagaataattgttttctgaacaaatgatcaaacagataaaatatagtatttgcaaacctccaacaaaaagctttgaggatgacatgcatctgattgattgatagagagctggacttgagctcgtggctctcttgagcagattaccaatcttattagccaacgccattgttccaaactacatgcagtggtgaaacaaaggaagacataaatatagccatctaaataacacaatacagctggagcaagtccttgtagtgtcacaggaagaaacaataacagcaagaagaaacacaaaaacagagtggttgattagaatccgagctcgatgggattgtgcagacaccaatttacagaagaaagcaatgccatacatctaacaactaaatcagacatctcatatagcaattaacttcaatatcattccatctcatatctcaagaacgatggaatggttttaaaaattgcaccacttgcaagtggaaatctcaataggaacatcccaagctggactatctcaacgttactaaaataataacatcagttacatgctgaaatccacatttaaaaaggaaaaagcctaagatattcactattggaggccaaaaaaaaggaagatttaagatagttgactttatggcacatagtgcccagttttacggtttcaaagattcacagaattcatccttgttcaaatcttatatctaataatagaatatctgaaagaatatcaactaacacaaggtttgatattcaatactatttcatggacactttgtaacatgataaatcaagcaaacatgctacaggccatcagaatactaagggttttctgcaacttcaaccataaaacatgtgatttttttttaacaaaacttactcaaagatcaaacctcgcaacatatgagaatctgcaggccctcaaataccgacccaaaaacttccattcatcaccaaccccatggtgacatctactcaccctcctccaccattcaagccccctccatccctccagccaaaaaaaccataaaccccacgagccgagcaacaacagcgcaacactaatagatcgtctatcttacgaaccacggagatctccacgaaccctaacgcaccccgcacaccgccaaccaactaaacaaacgcatccacccacccagccaccaaaaagccccccaaaagaatgggggacagattcgcaccaaatcgctggatcacaccgacgcgcgaagaaccccgcaccaccaccaccccacgcgggatatatattaattaatcaaatcaatcgaagaaaatttcaacgaaattagatggggaattcgcgagctagggtttaagcgtctcacctgacgagggtttacgatggagaaggcggcggcgaggggggaaggaaaaagatgcgcccgtggagccgtatatagggctcgaggagcgatctcagccgtccgatcggaacggggcggcggtggtctccgccgttggatctgggcgttgacttgtcaacgacagatatttcttggggactgggaaaagcgtgggccccgcatgtcagtggaagtgagccctagtttataatttagaatagttcgagggggttaattgcaaaaagtgagggtttgtgagatcggcggcgagagatggcggcgccgagggagaagtccgccgcggcgacctcgtcggcggcggcggcggatgcggcgggggcggggggtggaggggatcggtggggcgcggcggtggggaacctgacggagctgggggcgaacgtggcggcgctgcagaggctgctcgcgaagaaggcggtgttcgtcgacgaggacatcttctccaaggcctccctcgccgccgaccaggcccgcaccatcaaggtgattttgctctgctttgctttgctcgttgctggtgctcctgattcgcccccaatcccttcgccggtatcctcggcgatgctgttttgtcagtaagtggaatgtaggatttgcaattgttgttcgtatcccagatgcgtcgtgaatttgatgtggattctactcaacccagctgaattggtgtcgactccactcaaaatgtgactgggttgattagatcattcatcaatcatcatgtagttatcatcagaatgatgtgtagtgtgaactctccaagaactctcccagtgtaaaagaagaatggtttgatctgatcagatcttgagtgattgcactaggtgaaccgctgagatccttgtttgagtaaaataagaacaatttgattcacatcctcattgatatgacatagtcatttgggatggcatatccgagaaaccagttttatacatgagattaagattattcgttatatctcagtagttaggagcattatttgtgctaatgtgtactctccctaacttagcatttgtgatcaaggtacttggcatatattgttctaatctaggtttagatcactggaaagctatcaagagaaccctgtactatctacaagggactaatactacatgcttagtcaaaatcaactatcaagttttcaaagatagaatctagtatcaaccaattaattttcagcatacaagtagttaagtactaagttaatgattgttgacccccttactaagtcttgtctccaaatctccttcgagaacttattgccagtatgatactaatgaaaagctcatataactcagggataattataatgataagatgtcgaattttgattctggaaatattgaaagtttgtttctcccttacgaagtgcacataatgattaatggaaaaacaacctatgaaactatattgaggaccatgagaaaggagtatgatcacgttctttctgaactcccaaatgccgtaaataataacccatatgagatatagtggtataccatagacaatgaagttcagttatgattattttgtcaccctaactacattatctttgtgtggtgctcttgccaaagtatggactaagattagttattcaatcaagtgggagaatgttagaccatttagtgtgatccatgagtgaattgtgtaattaacccattggttgaagggcaaatgggtaattaagcaattagcctgtcacaaatggttaattcgctgatatgctttgatcgtggggctaaatagaatttatagaaaagggtcaggtccctagtcagattttacactataaattgaggagcatcttgttaccacaaatctaagtgcttcttgtgtgtcagcaagtgactgcctcacaacctcattcccgaactaattaggaagtgcaatttggttggctcaaaggctgatccactccagaggaggtttcgtaggacagatcccctcgattcattgtcactcgttcatggatcatcccgatgaacatcctcaggagtggattgggcttcaagacagcaaattatacttccggattggtttgggaataaactttttggagctcacttactgtgacatgagaagtagttaagttcgcagtagtgggacgcccccttaatttatagcgcataacctgacttgggacctaagcctttctgatagcctaattacttaagactcatgttatcttttaggctaatggaccaattgcatatctaatccattgatcaaactaaatgatctaacacacttgtgcagattggtggatctcgtgagtgattggaacctatattttggggtcacaagttctcacgaaaatcagaacactaaaactgatgacctgtagctaatctagtggacaccatgtagatattaggatcattctgatttttgttcttttgtattccgtcctgtgttggcaacattaaatatggtattgacatcatagtactcacatttctgtgttcatataacatgttggttagatgtcacaaattattaacctttcataacctctccatatctgaaaaaaggttgatatgggatctgctcaatctaccttttcaaaatttgatcttgaaaatatgtcaaagtatatttattggctacatgagaaaatattaaaatttggctcttgcaaaatacttttataatagataagttcaatcattttgctagtataaattatgatagtataccataggcccagtcatacattggagactgcaagaagtaaaaaccgacttatatttaagctggagggatgtatttcatctctctccagaaatacttaataattttgcaagtcaatggctgcaaatgtgaagcagtaaattggcattcatggctttacgccagtacattattattacaaaaaattcaccgagacttatttatgttgtagaagtgtgctgtcattgctgtccatatttactttgctaaaatacaattgttaaattgtatgtatgttgataataagccaccatgtaagattcatggttcttaacatttttatcattacaaatataaaaatatgttgtagtcaatggctgcaaatctgaagcagtaaattggcatttatggctttacgctagtatattattattacaaaaatataaaattcgctaaaacttatatttatgttgtagaagagtgctgacatcactctgatgtatgttggcttttaactaaacattgtcccaaaagaagctatgtaagattcatttgcacttcttgttgcatgttagattcttgaccagagggtgcagtcgctggaacgtgaactagatgctgccatttctgctgctgcccgagctcgtacagagaaacgccaagctgaagctgctcaacgagctgcggagttacgtgcgcaggaagtgaccaaggaattggagaacactgcaagtatgttatgtttcgttgtaaaccattggcatttggtaactgagcgtgtcaaaagctgaatgtcttatctggtttcattttatcatcttgcagaagtgttcaagctacacatggaagagttgcgggcaaagcaagaggagattgcaaagaaagaaagtgatatcaaggtgttagaagcaataattcgaaccctgagtaacaaagatgatgggggatccagcgaataatttccattcagtagcattgttttttttttcaatggaatttacatgttcaagtatatcatccatgtattaatataagcccttaggtaacagattattgtaaatgttcgcaacaggacatccaaacagattgaagatgaacattacaactgatatgcttgactgttcatctgccactgcccagccctactacacctaacttgctgctggagggtctaactgactattggaaacaaagtattggttcttattactatgcaacagctagcaatcatcaaggagaagatgcagcatttgattcctagtaaagttggtggtttattcatctcttttttcgagattggatcctttatagtttattcacatcaaagtttgtggtattcttatgcttgtaatttagtttgtttccactgggatcctgtattatgcttaagaggaatacccagcgatattatgcttgagaagaactgacagacgattgcaatttgtatacaagctttgtacaacaaattgatactgtcatttgtgctcccgtatggccatataccagtaaaaaaaaagaatttacaatgaaatttctcagcgcaagaacaccaactccatcaatttaagttgtgctttggatactaattctgaagcactgatgatttgacttatgatgcttgttggtatcacaaccatctcaaaacatacaaggacgtgttggtgacaaggtattatatggacacattctctcttcctagtacaatcatcgaatgaaccttcttcctttttttcccctacatatattaatctatttttagtcatcccctcatactcaaccatgtattatagttggtagaacattacactacatcttaggcagaagatcaccatcataagctgtcatgctgatgatctctaatccaccgcgattgcaatctaccatccccgttcgttttcccaccaaaactcgcacaaacaaatttaccacaactccaggaacctcagcgcaaaacttcctctccactagtatgccaaaactcattagaccgttttcattattgaatgaattattgtcgcaaatattgtaaaaactaaatatcttaaaaaataaacctaacaaataacttaagaaacttagtcttaagtatattgaagtgtaagaaaaattttcaaaaaaatgtactatatttttccaatacataaagaaaataatctgatgcaataatactataattaagttgaaaacatggctataaattttcgcacaatcaggcgtcagcgaaaacactctgttcactataaaaaccgacttacttccttctatagtaggttcaattttaacctttttatttatctcaaaataggttcatttttataatcattgtatcaaaatttgttgtgaaagtaggagataaatatatttagaagtagataaagtgaagaataattatattgaggtttgataaagtaggggtattctagtcatcttaatgttgtattagtatccgtggggtatataaaaataggacatcatgctctggtgttgggctcaaccaactacaaaggtccgaataatgaataatgaataatgcatgtcgtaaacttgagtcaatagtcatgtaactctttgccaagttcagatggagattcacaaataggatctgaaaattgtgttttctttatcctgtgttggttttcattagtgtgtgcttgcttaaggtttggttagagtgtagttctatgaaagcttttgaacgattttttaaataatgggttatagctctttgcgcaaagaccggaatgatattccattatctaaattgtaaaaattaacttgttgtgcgacggaggaagcattagaatttcgcacaaacacagggacctcaccgcaaaaacgcaccttcctaaataatggcggccgccgaccgaatcgcagcagcgagcagcgatcccactcctcctcctcctccccttgttcgtcgtctccgcggaatcgatcgcgccgcgcgcccacgcccttcctccctcccggatccggcgcgtaaggtgcgtgcccttcccgaatccgcgtccccaccccgcgggccgtttcgagccccccgattcggtggagatttcgcggaaatccttgtgaatcttggggattctggtgatgcgatgatgatgatgatgatgttagaggtctaggacggtttgcgggattgagcgaatgcgcggtggattggattggattagggtgttaagaggcttttggccaaattttgtgcccgcctcactgtgatgcaaatcttagctccgtggtttgatggtttttgggtttgatccgtttgatgctttgattttactattttaatgttgtggaatgcagattaggtgcagaaattcgctgtgttcttttttttttcatttctgatgagttgtgtgcagggaagatgctagttatagcaaacggacggaatgatttggattatcggtgcaaatcattgcgcatgtttggatcacgcacggaatctttgttgtgacactatcttgcgctcgctttgttccaaacgcagcgctattattggagaattttatagtgtgatgtttcctaataccatctgtgaccgtgactataatcaaatggttgttgaggtggatacgtcggcaggctgtacctaactaagttgatctgcataattggaatgttcttgatattatcaacacaactacatcgagatacataaaaaagaggaaaatgccatacaagttctgtatagatattcattaatctgtttagataattagttcattttgtaagaaaaaagaaactgagcgtaaggaagtggttgctaaatttacggtttccatttttacacgttaggtatgccatgtattatgacctatgcaatttcccatttatgtttgagatagtgtattgatagtcaaatgctctaaagcctctaacatgtcgtggtgcttgaccacttacacgccacattgttgttatgctgtccaataagatgttcatgcattccaacctgtgagcctaggaaacggacaaattagatgacgacaactgaatttcttcttttctttagggtttgtacaggcaaacaaacttagcaccaattatattcaccttttgtcttaaatgtctgctattttctaaagttttgcagttggccttatgtatgtttgagatttaattagttctttgagaataacactcgttttgtatctgaaactaattttgcagagtaattgacctttgaagttctataagatgggtcgtggtgttagcagcgggggtggtcagagttccctgggctacctgtttggtggtggtgaagctccgaagtcagctgagaagcctgctccagttcaaaagcctgccccttcgtcctctgcagagaagctgaaagagatcccagccggtattcaaagtagtaaggcgaacaattacatgagggctgaaggtcaaaactgtggaaatttccttacggttagtgtccactttccattataaaaacttcaattagggttactatccacttatggttagcatcaataattgaatgctagtggaaatacgaaccttactgcaataatgtcttttgggggggcattttgataagtagtagttgatcaggaattctaggggagttccttaagtagaaactcattatttcaggttggcacttttgccttaactcagtaattttacaaatttctgcatgtgaatattaccatctcatgctgtcttgaagaaatatccattttgtactcatttaactctcagactgtacattgtctggtctgaaacgtgctaagatgccttacgtaacacacaagctcacttcgtaagcattttgcaattgatcttacttgcattgcgtccgatttgaggctttatgctgacatttctttcccttttgtttgcacaggaccgtccgtcaaccaaggtgcaggctgctccaggcggtggttcatcacttgactatctcttcagtggcaacaaggatggcaagtgacggtcactctgctgtccggtttaccatgagctctggatgaaaggtttctgctcaacaaaagcatgttttcccatgagtaactaactatccaatgtatctgctcatggtatgtcacagaaactgttgttatgtatgcatgtgtctgtgcttattctgtgttgatgtatgcgtgtgcttatcagcagctacttgtgcaatgaactgatggtatgttcatcctgttgcatgttagttcatggaaccgggtctttatgctaacattaatgtgcttgcttctttaatgtataataactgtgttctagttgtgtcatacccctcggattggacatggttgtggtttgatgctcattgttgaagcaagaaatgtctctgttctgggtggcatatttgtgatatgttttccacatgacccatgttctgtgtgtttgctgctttaatgtgtaataactgtgttctagttgtgtcgtacactcgtacccattagattggacatggttgttgtttgatgctcattgttgaagcaagaaatgtctgtgttattggaggcatatttgtgatatatttttctacatgcatgacccatgttctttgtggcgttttagttctgttctgtatttgctgaaacggtgaagatcaagtagttatctgaaatctagagctggtgagttacttggctttagtttacccactacaccagtcaaaacaaatttgttatccattgcaaattaagtgtagtttttattttgcgaagaaaattaagtgttacattatgatatttcgaaagctatatttccggaccttaagatcaggattcatatctaacgatggccttgacttgcagtacttcagtgccagccacattttgacaaattccaatgcaatgttggcctaaaaattatcttggaacaaacaggatggtgaatttttctaaaaatatttcacaaactttcaatgcatgattgcataaaagataaaggtatttctggatgataagatggtgaaaaatgaagttattttgaaacaaatctaaagtagttaaaggattaatctttctcaccaccacaatttgccacgtcatcagaataatcagagccgttacatgcagcatacatataaagtagtgaaaggattaatctttctcaccaccacaatttgccacgtcatcagaataataagagccgttagatgcagcatgcattcaatagataacagcggatctagagaggatgggccggtaaaagatgactcatcaggtcggattcaggactcagactcaggagtcttcggaaaggattagagaaagaaagcaaggattagagaaagaaagaagacctatagtcaaatggaaaaggaaggtcacgtattctctccatccatcaaagttatacctatttcacctttgagttttttcaaataagttgttcctatttgtaggctttatgcattcaaaacttaaatgaagagataaattaaatgtttaattagaacccaaggagtcacctaaacacttgttggttgcatgcttgcactcactccttgattttgtaacaaccaggatgattcgatttctccttctcttggtgacaaaagtaataggtagcataacttttatggatggagggagtactaagcaagcttcctggtattagctagatagaccatagctattgggattacgcatgatgtaattagattagcaaggaagttagtcaattttaagtgtttttaaggcattagagacaaagttgacattggttattttatgattgagagtaaaatatttgaaaatatgaaaaatattattgcaaggcaataacatgattaacaaaaatagaataataggatatataaacaaaggtaaaagataggaggatcaaaattattgaataaaagaagaaaaaagtatgtattcaagcaaattatgattcaagtggaaaaacatgattaaatttttaatcttaatgcccatggtaaattacctacggtaagagttgtaattgatatgcgaatttctaaattatgaaagattcacacaattaccactctagaccgattgcttttcttaataccactttcaatcatttaccaaataaaaaatggttttaagatattgaacatgtcaacaaatgtatattaatattatttcttgatcatttacaagcacaaaaaataggcaaaatttgccacaggatatccaaaaatcatgtaattagctagaagacacccaaaaaaggcgacactgccaatggacactataaaatttgtgcaattagctataggacacccgaggcaatattttattattttcagtgaaaaagaggagagagaaatttcaaaaggacggaaatgccctcagcctcagtacctgaaatccccatccaacttcaactgcggcggcggcttcggctggttgcggcgttgggaagcgacggcggtggtgatggctcggccggtcatggtgcaccaggagctcgccgcgctgcaggagctcgccgtgcacgccgcgaactctggtgaaggcgccacgccgccgccgtggtgcgtctcgaagctgagccccacggcgccgtcgccgccgccgcaggccgcggtctgcaggtcctgttctccaccgacccgtcgccatggatccacctcaaacctgcacacacatcaacaagaaaccaatcaacggcaacaaatcgatcgaatgcaatgcacaaatcacaatggcgatggagccgctcgccaccaccacccgctgctgcagccgctctgcaacgctgccgccgccgccacggcgcagagctcggccaagtccgcgccaccgacgccgcagccgcaccagcagttgcccgccgccgccgcgcacctatccgccacgacgcacctgtccgtcgcgccgtgcgtatggtggccgtcgcgcctcgccgtcgctggcggtgagaccctggcggagcgccgccgctttttctgctgcgcgccgagccgtcccggctcgggccgtcgctccattcctccgctccgccacgtgcgtgaggaagaagaggataggagagagatgtggaccccacttatgattagcaaatagtaatcataatgcattcatagcattgtggtacatttcttgcaattgattatgaataaccaatactatgaaaatcatctttcgtggcggccattttgggttttctctggcggaaattgcagccgccacagagcaaaggccagagaaaatatcaatattcgctagcggttatcggccgctagcgataatcaatttttgctgccggttgtgttataccggccgccagcaaaaatcgattttcgctggcggctgtgttataccgaccgtcaacgataatcaattttcactggcggctgtgttataccggccgccagcgataattaattttgagataaaaaaaaccatatgcagttgtcctccagccgccagcaaaagccccatgctgctaagcatcccaaatctacatccccaaatctcaaatccataacaattcaaatccacatcaaatccaaccatccaaccttaaaagaatactacatcaatttctcacttcattcttaacaaacaaacatcaatacatgcatatatgaaacatcaatacaaacataaattggagaaattcattaaaatcgtcgtcgtccgcctgccatcgccgccgcggcggccgccccctccctccggctagatctgggagagggagagggaagggaggaggaggccctccggtcgtcgtcaccagtcgccgtggtcgtcatcgtcgtcgtggcccggcccattgtcgtcgtcgtggtggtggtcgctgtgctcattgttgtcatcgtggcccggcccatcgttgtcgtcatcgtcgtggtacgacggcggcggatccggcctccccgcccgcgcccgagagccatcgcccgccgcgctcgagcgccgccaccccgccacgcccgagagccgccgtcccgcctcacccgagcgctgccgccaggtccgcctgtcgtcgctgccgccaggtccgcctgtcgtcgctgccgcggcggccgccgccccctccctccggctagaactgggagaaggagagggacgggatgggaggggaggggagagaggtgagtggagatgagaaagagataatgaggagagatgaatgcagtgggtgggtgggtgaaattgcttttaaatgcgtgggtgggtgatgctgtgaaggaatcgatctgtgagctgtgcttttcgctggtggatccgttttttcgctggcggatctctttagtacccgccagcgaaaacactgatttatgctagcgaacatttaagaggtccgcctcgaaaaatatagtattttttatggcggacctattaatatggccgccagcgaaaattagttttcgctggcggcccgtgaccccccaccccctcaattttctacgctggcggtttttgcttgtagtcgccatgaaaaatattttccaaacgctatgaaaaatcgtttctctagtagtgaaccttaaacatgtgattcttttgtaaaatttatatacaataagtacaaaattatctataaacaaactcttagctttggggttcgcatcaaggtgagtatagtaaaaatgaatttactataacaaatgcactggtaggttatactaaatgttgtaaaatttatttagcatatgtatgcaaaattgacgataaatatagagggtgtcatggtccttcttcttagtggcatatgccatagtccacctatagaaattgaaaaaaagtcatgatggtcacgcaacgcgtgacgaatgtggctagtaaaatgatgaaaaatgaagctagtttggaatgggggagtgtactaaaatataatataacttgagtttaaattttatcccaaatataataacatagtacttttaaaatgtgacttttacaatttaacaactcgatcatactacctctattaacattttggctttattatattctcaactagtgagggttcatatctcacccatccttaaaaaaaaataaagtagtactaccccatctcaaaataactagtttctccgtcctaaaatgtactcccccattgcataaaaaaccaatctagtactggttgtgacacatccaagctagtataatgaatctggatatacctctgtccagattcattgtactagaatatgtcacatctagtcctaaattcgtttttttgggacggagagaataagtattttttagattgacataggtattaagaaagtaggtagagatgattggagaaggggtataattggtggagaagagaaaatatgtgaagagaatggtcgtgattggttgacagtgaagggtaggtggagaaatggtttcattttgggacaagttattgtgctaaaaatagctattctagaaagataaaatttgaataagatgaattttttttaattgagagagtaattggggtaagacgaagagaaatttgaatgagataggattgaagtgacaagtactagtactctagaattgcatgcactgatttgaaaataaatttagattctgaaattgtgcttactcctttcgtaaaaaaaaactaacctatgattagatgtagcatatccttacaacaaatttgtacatgaacttatccaaattcattgtattaggatatatcacatccaatagtagatttgtttttttttttgacagagggagtatttgagatggaggcagtacatgactaatgacatctctctgttgctttttttttttcaaacaataaaaatttctacaagtgatgttgaatcctgttgtactccctcttttccataaaatcaatctaaaatggatggaatgtaagtatgtgaatgaatctaatataattttgtaccacgttgcgtggtggctgaaaggataacaccagacatggggacagacatacatactactactagtactccctccgtaaaagaaaagaacaaatctaagattggatgtgatattttctagaacaatgaataatagaagcttgtccagatttattatactaggaaatgtctcatcaaatactagattggtttttttttacggaggaaatatttaattattatagattaccatgttcaatcttttcatcaacaacaaaaatgtcaatggagtaatcgacggcaatccccggcagctataggccttgtttagttcccaaattttttttccctaaaaacattatatcgaatctttggacacatgatagcattaaatatagataaaaaactaattgcaaaagtttatatggaaatcgcgagacaaatcttttgagcctaattagtccataattagccataagtgctatacattaaccccatatgtgctaatgatggattaattaggcttaataaattcgtctcgcggtttccaggcgagttatgaaattagttttttccttcgtgtccaaaaacccccttccgacattcggtcaaacgtccgatgtgacacccagaaattttcttttcgcgatttaaacacatatataatagtagagtcaaaatatgccaagttggaatgaaaactttgcatgtcactttattaattattccactctcttgaggatctgaaacatacatagtatttattattataggggtgttcccatgttcaataatcttttcatcaacgagtacaatgtcaatatggatcagtaatcgacggcaagaccggggcaggcagctaggccggggaagaaaggaatctgcgctgcagtagcactctctgacctgtgggccccctacccccctcatctctctccaacgtacccacacagcgtcccacctcgccgccggagccaatgagagatcgacgacgatcgacgtctaccagtccacgaacgagtacaattcgccataaataaatagggcgccacacccctcagctcgatcccctagctctcgatcggctgcaagaagctatagctagcctagctcatctcgccggagaagaagctaaggcagcaggcagagagagagagagagagagagagagagagatgatggggagggggaaggtgcaggtgcggcggatcgagaacgaggtgagccggcaggtgaccttctccaagcggcggccggggctgctcaagaaggcccacgagatcgccgtcctctgcgacgtcgacgtcgccgccatcgtcttctccgccaagggcaacctcttccactacgcctcctcccacaccacgtacgtcactatcactactcctgctgcattttccatacaatacgtacaaaataacaaaagcagtagatatatatagttagctcaattaatatgatggattatttcagaaacatttaacttctctctctctctctctctctctcttccctggcatgcatcgtccatgtatcaaattaaaagatgatcaagaatgcaatgtgaaaaatatataacaacccgtgtacacctgtgagtttacaaatacaagcatttcaagcgttcataatttatccatccataaatataagtgttacaggatatactacttattctatcgtctatcacccttctttcaaacttcctccggatgcatgcatatcgatccctcattcaacaagggatattttagtcgctaaacaaattataaatacctatattaattcatcgatagagggggagttagcaagtactccctctgtcccacaatgctggtcgtccaaggaatgtagagaaaataattgctctggatgaaacttaccaggatgccccaaaacattagttgcagtagtcattttaacacaagtacaccagccacataatggtgccatacacctaatttgaatgctttggcacctagaaatttgacaggagcactagatggtgctagggatgaaaacggagcggatacggacggataatgctcataccatattcgttttcatattttttaccggatacgaaaacgaatacggatagctcgaatacggaaacaaatacggattatctcgaatacgaataagaatcgaatatgatcggacacgaatacggaaacaaatttttctcggaacacgaaaaccaactcaacttctaatggaaacaaatatcaacatatataattagctcattttatataaaatgaggtataatttataaatattttttaaaatttaaataatattaatagtatggactagtgttaagagataaactactattaaaatctataaacgtatattgaaggtcatagagttagaaagaaatggggtatgtctcatgggtcctgcggatatccgaatagcactgttcaccggatatccgaattattatccgtatccgacagaaaccttggtaccatatttgtattcgtatccgggagaaaatatccgtattcgtatccgtatccgaactatccgagaattatctgatccgaaaggtatccgtatccatttttgtccggagcggacggaaactatccgctccgttttcatccctagatggtgccacttttctgcgccattattactgccgatgggcgagtacaacgtcaaccattctaggatatttgttagccagtaaaacgatctcctttgtgggagggaggaagtagacattgtacacttcatagggcctgtttggagaactatctcagggatatttttttgctaaagattatcccaccaaaatagccctcttgctgtttggatccaagggctatttagctattattgtaccatcccaatcatttgtctccactaaaagtatacaacagccggatcttctatagctaatccaatacaggcacatacaagcatacacaattccttacaagcacaaactcataatttgtctcaaatgtataagcaagtccgtaaaataattgcacgccaaccgcggcccccacgtccgcggtcgcggccacagttggttgccatggcgcgttgccgacggcgacccattgcccctgatgagg

SEQ ID NO: 6479 - DNA, 4307 bp, Oryza sativa
tcatctataaataatactccctccatttcatattataagtcgcttcgactttttttcctagtcaaacttcttttaagtttgaccaagtttataaaaaaatttagaagcatcgacagcaccaaattggtttcatgaaatctagcattgtatatattttgataacatgtttgttttgtgttgaaaacgttgctatgtttttttataaactcagtcaaacttaaaagaagtttagactaggaaaaaaagtcgaagcgtcatataatatgaaacggatggaatatatttgttttcccctacaataacaacgcatggttgcgtccgcacaatcccattgtagtaacaaaagcatcaccattcaatcacaaatgctctacaaattcacctgcccgttccctgaaacagaagccaatcaatacagttgttacaaaggcagcaaagcttagctcccactcggatccatccattctacaccgatgaaccatcacattgcttaacgtttatccacaaaacaagagcatatggcatatcaattgcagcttcttcttttttttttttttttgcgaggatttccccaccaaaaccccactaacaacagcagcagagcagagcaagcaggctcgccgcagttgaggaaatatacacggcgaccagttgaagaggtgcgcttgccttggcgaggcgggagcaggtggcgtagttggcgtcgaggtcccccacggaggtcatctgcaccacgcccaccctcgccgccgccgatgcccccgcggccgcagatggtgacgacgaggaggccatcccgcggcagcgggcgagcgacacgcgtgacctcgccgcggcggcggggaggagcgatgcggcggcggcgagggaggccaaggccatatgcgaggagaggattgagatcccctcactaccttaattcacatggctttgagtcactgacatgtgggcccactctgctatggacccagatgtcagtgactctgaagcgcgacgagtggggtagacagtagacttgcccgggtgcgcgtagcgcgggcgggaggacacgtggacggatcctggccgtcggaccggcacggccgttgcctctatccaccgttcgattccgcgagcccacgcatccatccggtcactcgccaactagtatccccattcgccgccgccgccgccgccttcgccgccggcgatacggtggtcagcgccgccgcggccgctcgtatctaaaggtgagaccacttgctgttcctttcctcgcagattcgctgcaagactaggatcggggttgggcggatgatttgggtggtagtggtgcctcaagaatgtcgcagaagttttatctgtctgattagagctctgagattacggatgcatctggatccggtttagggaggaactctagattattggttgatctgatagttgggaacaacttcgttggtgaggtgatgatggatgaacatgttgtgcgctgcttttcttatctagccgttttctctgaattttgtgtatcccttaaaaagggtgtagagcagctgaatgcatgtacaatctcatgcattttgttccttgacacaacattattttgttctcggtaatttagtaatgcgtgcttccgtcgcagtaatttgctcattgcatatttgcacttgatttgctgcttgcaggtatatggccaaaatggttagtcagtgtatctctccgcggcagtcctttcgcgttcctcgtttttcatcagctcggcctacgctaagttcacgtttagcaattggctacgccaacccgtcgttttgcggtgttaaacgctcaaatcgtccgagttttatagcagcagcactggatgtaccaaaaagtatgtcctcccctaattcagagagctccctgcctttgaaaggtatcgctggaaacctttagttttgtgtggtcatgctatggtgcctatgcaggcctgagtctcctaacaccgtgcatgcttcttctcttttcaccagaggttatctgggcatggtgcaatgctgacgcggtgtgcttcgatgttgacagcacggtctgcttggacgagggtatcgatgagctcgcggacttctgtggggcaggccaagcggttgctgaatggacggctaagtaaagatgctgacttttaaagctttgccaattaatccatggaaatttccattcaagcgttcaatttttattttattttttgaaaaaaaaaaaacatttccagggcgatgactgggtcagttccgtttgaaaaggcattagctgctcggctatcgttgttcaagccatctttggggcaagttgaggactgcatggagaagcggccaccaaggtaagctcctaagtattaatgattcttaggtgtttcagcctttgggggggctgtagttactactagccagaactagatggtttgctttcttttgttttgtataactttcagtgaaaatacacagatcttctgcatttctcaaaaaataaaatcgctactatgtttccatttttgggatggccatgccataagagaatactaagttgtttttaatccttttctccacacgttttcatgttttattttttttcaaattggatacagaataacagaactacttgataacttcttgtttattctaaataaacaggaatttatatagctcgttgttcaaatattagctgtttctcgtaagaaactgaccctgactttttttataaatttgctacaaactatgatctatctagatatttgtgcgtcaagcagacacaacgttcatgttccttggatgtattgcgttgattgtatctagccttcacatcctactatattttatgcaaatgacattttatcgacagaatatctcctggaattgctgagcttgttaagatgctgaaagctaaaaatgttgatgtgtacctggtttctggaggcttccgacagatgatcaaggtataatgattccattgttggatgctttcccagtgacattccaggaaagtcaccgtacgtgctatactttgattttactccgccaacattctgttgttttcagctccaatctttactttaacttttgaataggtccactgctttagtattatgtgatgttttttgccccctcttgaggaaccgatttcaaaaaaattggaagaacaaaggaaggttgtggcaagaaatatttgatccatatttcttttgatgcatttacactcctggtttatgacaagctttagctattttcaagttgctatttcttcacccagagtcagtctttgacttaccctttgctctttccatcagcctgttgcaatgcagctcggcattcctcctgaaaatatttttgcaaaccagttactgtttggaacttctggagagtatgttggttttgacccttcagagcctacttcacgaagtggaggcaaagctgtagcagttcaaaacataagacaggttctgattttaactctccactctgccatgttgctgcttattaagcacattgcttatgtacctttgtgtgtgcagaagtgtggttacaggacactctttatggttggagatggtgcaactgatcttgaggtactattattgtgtccatagaacaatgatagccctacagtaggcatagcattaccattttcattatatgttaggagtacactgctgccacaaaaaaaaatgggataaatgttagcaagaaaatgcaaaaccacatatactgacacatgtattacactactaccttaggaatacaaagtattttgatacctaaggaagaccatcccaattccaaatcaataagagactgaatggccaatttgaattttaaagttcacataaatcgtgacaaatttgttgatgttcatagtatgtattaacgtgtatatgtaggagaaacattctcatgttaacaaactatttatgctttcatttcatttagcaaaggaaacataaaaggggtcgaactatttttcttcctcagttactttgactaatgagatgcatggttttttccttcatattttgatatgagcttttgcaatgaactttttccttcatattctgattttagcatggtgatgctgtatcgctgtattggctccatgagtagattagttcataattttgtattggttaactgttggtatatcataaaggaacttctgtgtggatggaacttcagaaacatcttaaactatgtttttcatgtgtgcaggctcggcaacctaatggagcagacttgtttatctgctatgctggtgtgcagatgagggaagcggttgcatcaaaagccgattgggggctgcag

SEQ ID NO: 6480 - DNA, 24569 bp, Oryza sativa
tgctctttgtatacacaatgctaggcttcatgaaacccatttggtgcgtcgatgcttctaaatttttttataaacttggtcaaacttaaaagaagtttgactaggaaaaaaagtcgaagcgacttataatatgaaatggagggagtattatttatagatgatcgatcttttcagaatggaaatgtgtgatgtgtgttgtgcccaatgttgattgatgttcataaccctgtactccagagcatcttgaaagctcatcctcaccgagtcgctgtataattcatgtctaaatcactatttttttctgtctgtaggtagttctgaaatctgaattgtacttccattttttttttgttcttctgttttgttgggtaatgccaaggggactaacatagagtcattttcttcaggaagcagcatcctctggtgtcaaatttctttgctttcctgaggtattctcattcataggctccaaggatggcgagtctattaagattgctgaaccattagatggcccaataatgcagagatattgctcacttgcaaagttagtaagaacaaacttgctgaatttccattttgccattacatataagtgcctcttcataggaaccccttttctcaatttactttatttattagagttcacattatatgacatattaaatttaagtatttagtattttgtgttctcaatcttgacttctgtgccttacaattgtacaaatgaatcttctgatcatttgttcagtatgaacatttggtcaatctgttaacttagaaattgttttggcttatagaaagaatgaaaatctatctaatgctctgtaatttccagtttaaggaccagtgtgcacttgtcgtgcttattttgaaagctaccgcaaataagtaaatttcataactcccagtgccctgtttggtaaattagactgtagcttaacaactcctgtcatgtaatagtttaatccttctaatttcctctagcatgaacctttgatatgcgattctctgatatattttgttatgtggaggcagaacacaataataccactttcacaacacaatctagaaaaaagaactagccaaatatcaaaacatgcatatatgatatatgatgactaatccattccaccacaaggccaaatggagactagctgtgtcttgagtcttgaaacatatttctcttgtattttttaaggattttatttggttatcggatagcactttgagtccttgacttaacataatttcatcctgcagggaatcaagtatgtggttgtctcttggagggtttcaagaaaagggtcctgatgattcacaccagtacaatactcatgtactaattgatgattctggagaaattaggagctcatatcggaaaatacatctgtaggtgcttattctttctcagctcttaggagaaacatgccttcaagaattttctaaacagtttacttgcgatgcctattttaggcattcttagaattttaacagtagttttttcaagttgacatagtaagggcatgatatttgatgctatgcagttaagtactagaagtttcatatgattgttggttctaacaagagaacatttatcttacaatagccatggataaaatagatttatgagaaatcgtcacaatatcccagaagtatatttctgcattactttactgtctaaatggtgaaatttttggtcgtacgcaagacaactgttgcatctttcttcgtttcttcttgcttgttatggtacactgcaacatctcattgttcagatattcaccttcacatttttacgctgaaggtttgatgtagatgtaccaggcaatatggtgtacaaggaaagtcgttttacgacagcaggtactgatatatttcctgatattttagttttgtcatattgggatatgtaaatttttagagttagttctaaaatatcacttaaccaattgtacttttatatttcaaatccccctgcggaatgttgtgtttgtcacataaattattctagaattaatttattatacctaaattatcaacagtttcttgatgtactttttaatatgctcaattaagtgtcatagtcaatgtaccactaccacaatatcagttcaatattcagtcttagaacaaatttttatgagatgtttttggtctgcaccatcctgcactatcttattagtttctgttcttctagaagttactctgttatagaactcatttttttcacattgaactattgaagcctatttaagccaactatctgatttctagtgcacatgactctcgacaagatagttttatgagcgcaagatgggacactaacttatgcttctacataaactttagtatgcattgcatatccttgggtcaggcattatcaactgaagctttttttcttctgaagccaaatataaactgacttgattgaaaagtgattgaaactaatactgcaatagtgatatcatggagtgagacatacgtcgggttgcagttgataacgctatatgtgatggtgtatttatttatttatcaggtgatactgtcgttgcagtggatagtccttttggacgacttgggcttactgtttgctatgatttgagatttccagagctttaccaatgtttgcgctttaagcatcaagctcaggtagtgatttatggcattatactgacataagtttttcctgattgccttatcctaagcatacctgtcatatctctgaggaaagctcaggtgaattgcatattgttttccagtattcttctaatatgccagtgacctttttaggtcttactagtaccatccgcgttcacaaaagtaactggggaggcgcactgggaaattcttctccgagctcgtgccattgagacacaatgctatgtatgcaaatcctaactcttataagtctttcacttttgcagacacatcaggctgtttcatatggttgggagtgtgatcaataatataaaatccaccatatatgcattacatatttgttattgttaaattttcaagatttgcaataggttattgcagcagctcaagctggaaaacacaatgagaaaagagagagctatggtgattctataattattgacccatggggaacagttatagctcgacttccaggtatatctcttcattttgttactgtcttctatcagaaatcttctgttgatattttgaaggttttcttgaattttatcagcaccttgtaccttgacaaccaccaagattttattgatcttctgttgaactcctcaacaatatttgctagcactgaagtttgaacttgtcctggaaaatattgtagtctgccattaccatactgcatttatcgtgtttgtatttgttcaaatacaatattctgaaattatgtggaacgagtgtgtcacagtatgcccgttaaatatcgttctgaggaattaatcatcaaactttggctacagaccggctgtccactgggtttgctgtcgcagatgtagacttgtcaaaagttgaggctgtgcgaactaaaatgccaatctctgaggtaatactctcatggagatgctgtttgcttctgtccaagaaacaccatttagttgtgttcttcaataacagtttatcatcttattttgtagcaccggaagtttgacagcgtctggaaaacctcatcactgtaatagtatagaggtcttgcacgcctcctttctctttcttttttctttagagaacagtcgacctattattttgtgtatcaaatatcaattgcaaggcacacatgatgatccaatggtttgatcggcggtaaacttcaattgcgaagccatggttgctgtgaggtttcttggtttgaagaattcctggttcagtggaacttcaagatcccaaatccccaattaggctaggaatgatttgtcagaccaaatagtccataaataatagtgttggcttgaacgcgacgccaccaacctaggacatttcaaataagtgattgccattgaatctaatgtaaatttgttatggtacatttgttgataaatcaaagcttggattttttttttggttactgcagaattgtttataaatatagtccacacatacacttgaccacatcaggaaactcttctaatgtatacatgacttataagggcacccgcaatggttatctataggctctctacaagagatccatgtcagcatatttttctacttggaagagattaaatgaagaaagagagagagcaaagttatctactaacctggaaatagtctatagaaaaaaacgaggcaatggattagagagctatagatacccatgtaggtatatcattgaagtggtttactattaatctagtctattactgagatgtacatgttttatagataacaccttactttaccattgcaggtgctctaaatgatgaaacaaaaaaaaatgacagattggctgtgaatagtttctgaagtatctttaagttttaaaaaaatgcacatgaactatctccaaccaaatatgctcttttatccttgtgtggtggagttcagtcttgattttttgtgaaataatatatatcacttattgttaaaatttttagaaattctattagtatttttgttgcagctaaggaggagaacaaatgagtaagaatatctccttgaggtattatattctagtaattcagaccatgcccacagagtaagcatagctctctcacgtgttattgtaaatagtatactctaatcatccaccgtactccaaaactttaataagcaaaatttttaaactttgatcattcataacttctggtatgcttagctttttatttagaaaaaagaatggtacgcatggaattgcttaggcaaaatactatcataatatagcataaatttattatattttataattttgttataatataaaattgatgatcaaattttcaaaagttgaccgaatcttcttctaaacatcaaacgtttataaatagagggagaataaaaaaattttaaaagtgaaaactgaaaaagaaatgtttgcatttaactcagctgcaacttctctaacaacggggattgcctgctactgctagtgctaatgtttgctgccggcctgcaccagcagtactgcagaggatctgcactcctctaatgctatccctaatgtaaatgctgagagagagagagggagagagaatataggaggatattatttgtttttctttcatgttaacatggtgttgagtgatgttggagtgtaggtgtggttgcataaattaatttgttaaggttcaaattcaggtaaccaaactaggtagtttttttttcttttgaggtttatggatttttccctaatgtctctttgttgtgttaaaagtggcgtattcgtagatatatatagcgcgctgtgcatcctacatttgtattaaaaaaatgatattatttagtcctaatatggattttggtgtaggtccattatttagcaaatgctttaagcattttaattgcatgcaactaattgagacttcctttgaaatggggtgtttcaaagaaattgagctgattcgttttaaaattcctataaaattcttgcgtttaagcaccaatcctttgagggatatgatctttttcgtcaagaaccaattctttgctaagaggaaatattttgaagaatattttcaagaaaaagataatctctctaatattttttgaataagccttttgtcagagtgctagctttactgccaatcaacaacgtgatggctggcgtatcagtagccatgtcatatgtgtaaagtgtttggatttaaagattttatggaatgccaaattttgtttaaaaggtaaaaatttctccttcgccaatatacgaagggcctcattgtttggctgatgcttatgcttataagctaaaatttaaattttagaacttgattttgaatttatttttttttcgtttttcatcgtagtttattttacaacatctgtttttatttagtcgctaaagagaagtgcataaaacatttaccgacaaatattttttattggttaataaccgatccgaataagcatacgaataagggaaacaatattcgaaattagtacgaaagagaaaacaaattacaaacggattttattacaaacccgtttctacctctttttttttccctcttattacagagaggttagattagagttaggctcgccattaaacaacactcatctccccctcccccttgaaaccctagctccgcttcgccgtcgtcctcctcctcctccccggcggcggcggcggcggccatggcgtccgcggcggcgccgaagcggtgctactacgaggtcctgggcgtcccccgcgactgctccccggccgacatcaagctcgccttccgccgcctcgcgctctccctccaccccgacaagcagccccccggctccgacgtcgccgccgccaccgccgccttccaggagctccagcacgcgcactccgtcctctccgacccccacgagcgctcctactacgactcccaccgctcccagatcctcttctccgaccaccacccctcctccggccccggccgcggcggcggcgtcgcctccgcctccgcgtcccccgtccccgacctcttcgccttcttctcctcctccgccttctccggcttctccgactccggccgcggcttctacaaggtctacggcgacgtcttcgaccgggtcttcgcgcaggagctcgcctacgcccgccgcatgggcatgcccgccgacgccgtccccacgccgccggtgatcgggaacctcgattccccccacgcgcaggtcgccgcgttctacagctactggctcgggttcggcaccgcgatggacttcgggtgggcggccgagtgggacgccgcgcggggggagagccgccgggtgaggcggctcatggaggaggacaacaagaaggcgacgcgcaaggcgcggcgggagtacaacgacgccgtgagagggctcgccgcgttctgcaagaagagggacaagcgggtggtggacatggcgctgaagaagaaggtggaggaggagaagaggaaggcggaggaggcggcgaggaagaaggaggaggagaggaggaggaaggagcgagcgatggcgtaccaggagcccgagtgggcgagggtggacgaggatgaggcggcggtgtttgaggacgacgaggaggaggagacgagggcgaagaggaaggaggagctgtactgcgtggcgtgtaataagaagttcaagtccgacaagcagtggaagaaccatgagcagtcaaagaagcatagagataaggtgtccgagctgaggatggtgtttgaagaagaggaagaagctttgaaggatgctgaagaagaggagccagaagaagttgatgtggggtttgattttcagcgtgcacaggaatcagaggagagtgaattttcagatgctgctgaagagttggctgacgagttgagcgagggattggaggtgcgtgatgaagaagagaagggtgataagcacttgggtaatggggaacaaaaggttggttcatatgatgaaaccagtgtgttagaggaaatgctatcgaggtctaggcgcaagaataggaagagtggttttgtcgctcctcaggaggaagcttcaccagctggtgccatggatgatgatgacgatgaggatacaagctatgagattaataatgtcaaaaagaaaggacgccggagacgggcagcaaagaagggaggtacttatgctgataatgggcaaggtaggaagagtgagaatcagcctgaggaatccaggcataataatgatgaaaatggtgctgatgataagatggaaggtccatcttctaatgaagacagtgctgcagcaagtaaagaagatcagcagaaaggaaaaaccggtaatactaaaaagaacaagaaaggcacagaaaagaacacaactatatcttctgaacaaaagggtacatcgaagggaaagaagcaaaaggtacattcacattattttctcctgttaacttcttcatatttctttttcatgtatagttggcaggaaacttgttatgaatttgtgactaaaacccatgtattctgtttctctgtttaagtcaaagagcaaaaacttttagcctcatcagtactatgtgaatcacatatgcagatacctagccgtgtaggtgcttcaagaaccacctaactaagccacttattagaaatgcttacgtaaaagctgtgctactttatagaggaaataaccaatgttttgaattttgtggaatacatgattagagttgcttcctttgtgagaaaagaaacttgtcctgaaaatcttatgatttttgcgggtatcaacactcacatgttggattgctgttgttttatgattttttttccttatgcaaaaccctaaatctgtctttgtgcagcacagtagcagtgatcttgctcttgcttttcacattttggaaagaaacctagaggatgattttgcataggttgaaatgatatttgatagcactgattaacatagtggataatgaatattatgcttttgtgaaatacttgttggagacagcctttcttggttttgtgaaatacttgctggagacagcctttcttggttttgtgaaatacttgctggagacagcattttgtgaaatatttgatagcactgattttgtgaaatacttgttggagacaagcctttttttggtttcatgtcaattagtatattatgccttttcctgtgatgtctgttaacagtttaacttgttgatctataattggcgtatcagtttagctttctgtgtatttgttctaaatttgtgggtgtgtacacagttgcaaacagagttaaagaatcttggaagcccccctggtttcactgttatcacgattttcttatcttgttttgattaaaaagtagattagtgccacctagagcaaagagcccttccgtttgttctgtatcatgtagatgtctagtgcaaaatactttgttggagaacatacaacttgaagctgcaaatgtggaaaagttttatacgtactaattcactgtctactgttagtgcaacccgatgagcttaaaaccaaaattcggccatgccttgagtacccatgacatgttttggatatattttgtgtggataatattgtgctatgcattgtctatagattcataaaattctatatatatttctgtaagtagttataacactttgaagctaccttcttgtaccaggaggtttcaaaggcacccagtaatgactgtgaaacgtgtggatcaacgtttgactcaaggtatgtacttgaagttcagctttccttttcctctccttccctttcatttgcactttcccatcatatgttgctatcttacaatgaaattggaaacgcagttatggtttgtctcaaatacttcttgttgcaggaacaagttgttttctcacttggaagaaacaggtcatgcaatgctgaagacacgacagaaaaatcgctgaagaggacaagaaagtagttttcttttaccgtttgtcccagttgatgctgatagattagcacatcgacaaaaaggccatatatctggtttatagcccaattttgatatgtgtagtagagccgttttctttcttcctggatttgtttcattggtttgtggtacagaatgacaagaactaattattattattcaatcgaaatacacaccatcttgtaatttttctcccttttggtgcattgtcttgttcaagaatgaaccattttgtacgcgtttgagcctactgttgctggtgctcagcttctttggaatttcaccaataacagggacattattaaaacaactcgtatgtcatgtaccatttcaaattttaagcactgaacatcagcatcgaaaccaaaacagttactatctttcttatcattcaggtgaactccaaatttccctatgctatctgcaaatgggtcttttagaattcagagaaagggataacattacatttatataatctgacacaaacttaaaatcacaaatccacaaactatcttagtttgttccttttttccccttatgtacagctccatccaaatggaaatttcatgaatggagtttcattccatgttggcatgatctgcttcctggagacctggactgaagtccccccctgcattgctgcctgaacttctttgttttctgacagcaagagtggtttgcgcttgcaaacaccaaattaaggcaagagatgaaaggatttgaatcaatcacttggtgctcctgtgacctgatgaagccatgagcaccgcgaccgcgacgatgaacatgaacagcatgaacccgagcaggatatacgtctttcgcgacgatttccggtactccccaaacaggagtattccccagaatgtgctcacaagtggcaatgcctgatgaaacagcaatgctgaagcagttagaatcatagtccagaaaagttgtacttctctgaagatagtgtgaactgctaaacctgaagaatttgcctggaagatctagtatgatgttcagtatctgaatttatctaaagatctagaataataagttgcagttatctgaagattgtctgaattgctaaacttgaagagaatttgtctgaaagatctagaatctcgccacagccatcgcgaacacgatgaatttctcttctgatgtgaagaaatgataagatttggagattggactaacctggacagcatcagcagcagcatagccagcagcctgaccacccatgaactgaaacccattgccaaagccacataggaagccagccaggagagcccactgcctgccttcccagtcattcaggtaagccttgaaggatgatttcggcacaccggccattggacggtagaggaacaggatgttcaggccgatgccgatgacgaagcacgagatcgagaagtagaagaaggcggtgtacaccaccaggtgtggtacaccttgtttcagggtgtgccattggtcattggtggcgaggttgaatgccggggagaagagtgagaagcagactcctgagaagaacactatcccaagccctatgaaggtgcttgatccgaacacctgcgcaacggagaggttcatcagatcaatctagttcattggtacaagttttcatccataattttggtattgattcaacaagcatgataaaggatgattagaatggcagtgaccgaattaccttgatcgaacgccgttcttcgagctcaatcaagtattccgcagttcctgcttcagctttggcaacatatttggttgcagaagctccattctccaagtccttgggagcatctgaaattggcagagttaagaactaggatctgatctgcaagaaatcaacattactagtacttacaacattaaagtcagttttttttttaaagaaaaggttatggcatacctttttctatgacttctttgtttggttccacacttccattttccctggaaattacaggttattaagatcataggggtcagtaaattaaaagacgcagaatctttaaatagattggaacctaaggcataatatattttctaacagaggtatccagataggctaaccagtgtgtaatgtgttttatgtatcttgatgtgaaatatcttgatgtgttgaaaaatgtgaaatatcttacccaagtttatagatatttgtggagccatttagtttttcttcattatcagctgcattggaggcatgtacagcagagccaagaatgactgcaacaaggaagcaggccactccagggaaaagaatctctgctctgttgatgcggttgtccaggaaataattcagtgttgtgcctgaagatccaacatgtgagttttctgatctactgaataattaggacaataataatggatacagcaattagtttgctgtagctactgaataaagtaaactggagatattgatctgaatatatgttcttttcaggagtaggaccaactataatgtattcatactattactaacctaattattcagtttcttcgactaacataaatatagataggttgtgatgagctgtacttcacatgtatcaccaagaatcaataattttccctcaattttctttacttaaaaaaaaatcaaacaataatatatgttgcagtgttgtaaaagagaagttttacctacctattacaacaaccatacttgagctgatgacctcagtcactgagagacctacatatgcccatgcatactgagtagagaggttccctatactgagcacaacaccccctgccattgcaaacagcactgaaggccaattatccttcattgcaaacaaaaaaaaatcactgtcagcaaaatttcagactaactaacaatcagaaatgtattaattcagggatatactatttcagatgcttaagagaaggtggctaacctgactgagctgggtgaagaaattgggcatgttgggcttgctatcgccgagctgaccgaaggtgagcgcgatgaggaccgcagcgaggaggttcgtgatcgagtagtcgaggtaggtgtgctgcgggagccggcctcggcgctcgaggagggtgaggaccgcaggccatgtccccaggaagaagagggaggccagcatgagggcaatggcaccccctttgtcctctatgatgtacatcttgaggcctccttgtctgatggacaacagggaattcacaagggggccttcaaaaacctgacaaaaaataaaataaaacacattttttcatcatgtaagagggttgagctgctactcatttggattgaatcatcaagaagtttcaagatcttgcagttgttatccacaaaatcttgtaaaatcagaaagtgttttgcatttaatactgtcctcaaatctccatctcttcattcttgcttgttacagcaagcaataatatcattacaagaaacacaagaaaaaaaaggaaggaaaagaaatcaggaaatcaaattcattccaacagccatagggaagatcccaaattgtggataagctatccttatcacttatcagcatgaaagactcccagttcttggaaccctaaatccccaattcttcaaagatcagattctgctgaggatgagaagagatccaaactcccaattaaacacataaacacacaaggaaggggaagaagaacatcaagcaagtagagcagagtaccttttggcatgaaaccaaagaagtggcacaaccaaggacatggtccatggatactacttatagtgccaagcactggttaccaaaacaaaagctaatggtatctttcaaacgcaaaaagtccaacttgatctgcacaagtttgactcatgcagcaatttgcgaattcgcggcgtcttctcatgcgcagatcacccaatggaattggagctttatggaggaggaggagggagaaatggagagaaaagaggtggagaaaaagacaactatacactcgtcatttgctgaaaataatggaatggggtgatagtgacatctagggatactctcctccaccaatcaataaccttgaaatgaaatgatttttagctgaaatatcacttattgcagactccacaagtttatgaacatatggcaattgacaccattatgtctaatgaattacatatcaaggcttttttttttcttggatacagatatctaactaggtattatctgcaatttgggcactgaatttgtccaagaatgcaaagagtgaaaaataatggaagtagagaactgtactctttagctagatataatcatataaacaactatccatttctttcagtgacgtcttatctaagaaaaaggcgcattaaaagagaatttttttttgatgattccaacaagaaaatgatgcgtctactgaatctttcctttcctcctttaagcaacaaactaaacaaaaatatttctcaatagaacaagagattcataaactgacatggatccaagaactcaaaaccaacaaaaaagagagacccatgccgatgattttcaaccaagaacatcatcttctccccaaaatatcattttttttaaaaaaaagaggaagcaaacaaccaatcaacatcgacttccactcacgaatacaaagaacacaaaacgaaacagataacaaagcagacatgccggacataaaccattcatcaccacaagctaattaatgacaaatcaaagatcaaaagacaggaacacattacctaaagtcagaaggagagaaagggatgaactgctcctcctccagagaactcaagaactgaactctcaagtctcaacagcctttgtcactgcatagaattcttcaggttaaatagataggcagctggggtttgttggactctctctactactactcactcctccagctgacacgcaagaagggaaggaattaaccatcaagagattcttgttcttctctcaagagggccaacaaaaaaaagggaagaagattcttgtggcacctaaaaatgaatattttttttgggaaaaaaagaaatgtaaaaatagaaataaaaattcaatccattgactccggatctggagagatcctcaagattccccaggcaattcggcagtatttgttgctatcttccctcgctttgaccgccttgtgtggttgtcgttgtttcgcgtgccaggagcgatttgtttggagaagagtaggtgatttaatctctttttaatttaataaaaaattggaaataggtgaattatatatgcagctgtttgacaatttgacatattattatttctgctgtaacgtacagatcagtccagcctaggcgggaacacgtctggatgaataattcataattgttttattacacggtgggaaggtttctcctaacacacgccaaaagaaaaaaaaagtactagactaatagtaataactaggcattaaaaaaaaactcatgttaaaacacattcaaattttagataatgaaataaaatcacggcctttgtttacagagctatatccaattattaaaaaatgttccaaacataatcacacctcaaaagaagacattaagacataagggacaatccaaactgatagaggcgcacactgacacaaacactaataaaaagataaagcacaaacttattgaattttatttgtgaacctcccttcaagattggtgaaaagttacataactccagtttgtaacatgcaacttttataaacttaatgtcttcgtcacatttttgtagaagagcccataatcggagccaatatgttgtcttgaaaatcatatgcaaaaaacacattcatatatatatatatatatatatatatatatatatatatatatatatatatatatatatatatatatatatatatatatattcaatattaatatttgtaggcatcatgatctgaacctataattttttagtacacatagaatttctcttaacaaacgttgtaagagacgcacgagaccgtgactaatttctagcgataaataactagcttcattaaggccctgtttacttcctacacaaaaattttacaccctgtcacatcgaacttttgaacacctgcataaaatattaaatatagactaaaaatataactaattgcatagattgcgactaatttatgagacgaatattttaaacctaattgctcaatgatttgacaatgtggtgctacagtaaatatttgctaataacggattaataaggcttaataaattcgtctcgcagtttactgacagattctataattagtttttttattagtgcccgaacaccccatgagacaccctatataatatccaatgtgacacaccaaaactttacacccctggatctaaacaccccctaaattcctattaaaaccatgcacatatgtactggcactaatatagatcttgtttggtataactctaaatccaagattttataagctggatattcctaactctacataaccacagatctggatctgctattacgttataacatttagataaattattttattttcattttagataaagatataacattttactagaaattttaaggctgtgagatctggatcagggcctaagatctcaactctacgtgtgaagatttttttttttgtttttgagaaaattggcatgattggctttgttttcggtgtcagcctggctgttgggtgcgacgactttggaagctattaacatgtgctttcttacattaggtgtcgtggttgtacaattagaatataaccttgatttatttgtttattgaaaaaaacatattcgtgcattatatacatatatattttcttgacatgcatttcattttcatctttatcccttgataaattttattgctgcactaccaaatgtacaatagtaaaatacaacctagaagcataaaattcactttcttttcgacgacatatatggacctttaaagagtaattttacaaaaggctaccttaattctgtgatgaaagtttcaggggccctcaattagttagcttatcctagctaatcttgcatgtggcaggatactatgcacgacaattttctatgtccatgttcgaaatcttttgatgacaggttaagtagaacttgctaatggatggattaataaatatataaatatttctaccaaataaagcatggcagctagcctagagcgcaagtgtcaaagcaagtgaatagttttgttagaaaaacgtggctcgtgacttcgtgaggaggttccatatgcatgatagatatcataaattagtaccctccagttttttaatagatgacgacactcacttttaaacacaattgatcatttgttttattcaaaaattttatgcaaatgtataagatataaatcaagcttaaaataatttaagtgataaaacaactcataacaaaatatattatatttacgtaaatttttttaataagatacatagtcaaacgtgtgataaaaggttaacagtatcatctattaaaaaacgaacccagcaacaaatttagattatcaaagtgacaggcattgagtgaagattacggtaggtacgaatatgaataatcaagtggccctgaagattcgtagaagtcctacgctgcatttcgtattgcagtgaattagtaacaatattttttgtgacggtttttaatatttcattatttggtaaatagtttctatttagatttaattatgcaaactataatataatcatgctctaaaaatataaaacaattgtgaactgagcataattcagctggtaaggtaaacaaagttagaaaacatatttcagtcaaaaaaaagttagaaaacatatttttatttaattgtaatttgatatgtaaacaaacacacgctactaatttttttacaaggacccctatatattacaattggaatgtaattggtcatgcgtgtaaaaatcgatctccattttcgcatatggctcattaagaggcacacgtgcaaaaatctattttcgcaagcgggccacttagagagccgcatgaaaaaatgagcttattttcccatacgatcctcttaaggggccacatgcaaaaatagattttcgcatgcgaaaatacgctcttcttttccacggatattttctcccctcctctctcttttccctctcaacacttcaaattttttcacctcctctcctctctctcttcctctcacctcttcctctcctctcctctcctctctctctttctctcctatcctctctgtcttcctctcctcaccaagcgggagggagcggcagcggccgccaccgcccccgggtggatctggcggccctcactctcctagtccccattcctcttccctctcctccctcactctgacggcagtggcgggcgagggtggtggtggaggacaagggcgatggcggtggagcgcgaggacgacaggtgcaggctccagcggcgacggtgaacgagtgggatggcggcgacgggcgtgggtgacggcggtggtcctcccccgctcggatccgacagcggcagatctcccctgcaccgatctggccgccaccactctcccccacccagatccagtggcagtgaccctccccgcccggattaattaatcggtggttgccctccccaaccccgatctggtggcggcccctcctgcaaggatccatcggtggcgatgacgacggggtggggatgggaggaggacgatgtcgatggcggcggctggaggatgaggacgacagcggtggtgactagaggacggtggtggcaatcgcaacgagaggacggcggcgatggtagcgacggtgtagttttctattttcagaatttttatttttttcatgattttccttttcgtgtgcggtcagcttaagtgctcgcatgcgaaaatcgcatgaggttgtgctggtcgtatgcaaaaatccaattttcgcagacctttgggcgcatgcgggccgcccgtccacatgcaaaatttgattttggccgtatagaaaaatcgaatctatattagtgacatcaattataaatttatatttttacagaataaaataaacacaaagaaaatacacaatatagacaacaacaacgcaaccttaatatgtcacatattagtaaaatatcatttttaattacgaattgaggtatcattaactcatgcggcaaaatatttttacccaactcgaatcaaagacttaggttgtgtttagttcacaccaaaattagaagtttggttgaaattggaacgatgtgttggaaaagttgaaaatttgtgtgcgtagaaaagttttgatgtgatggaaaagttgtaagtttgaagaaaaaaatttgaaactaaacacggccttagcatgagcatttgtatctattattagaatttaatcctaaggctatgtttggataatggaaaatgaggggtaggattgggattgggaaatgtggcaaggtagagaggccaagttggtgtcgtcccgtgcgatggagaccgagaccgagccggtacaggagatgcgtgcggctgtagtttgagagaattacaatttaggtttggtaattgaggatagagtcctagtgtgactaggagttgttctcctactttgagtaggaggttttcggtataaatagagagggagaggtagcctcccggtatcgcttttcagagcgtggagttgatagtttagttagggtttcgagattagtcgagatttttgtaaggagtgctgttgttgcactttgtaaacacagagagaagcaataaagttgtcatctactttgagagttcttcgatttgtatttcatcgggttcggcggtctaaccggtgacataccgacggttcaaccggtgacaagacggcggttagactggcggcatacgagcaatccgaccggcggcgacaggactacgtcgagatttccatcgatttgagggtaacttttatttccgctaaaagtttttgggtttttggttttccctaccattcaccccctctctggtaggtttgattgcttgtgttcgatcctacaggaaataaattaagacctaggataaaataaggtagaaaaaaatgaatggttaggatttaaagttatcccttcatagctggaaaatcatttccttttccgttatccaaacggtgcctaagaggtagtacatgcacagatccaggtcgtcaaggtacagcggagaagcactgcagctacagtgagactgcagcacaatatgctgagtctgctacagtgagtcaatgcagtaaaacagtgtccaaatactgtggtaaagtactatataagatcgagttctacaagtcagctataagcatatgaaggagagaagagaagagagaaggaaaacaggcttcccatcaaaaacaaaaaaaagaaaacatgctacagacttatagccaactgcaatgcggactctaatacgttgtgtgtgtatgagaggtgggaccatatattaatggtgtacaataatagactataagtcggctacaagcttatgtggaggaaataaaacaggagagagaagagaagtggggctacagatttatagccagttgcagcacggactccaaaacgctgtgtgtatgacaagtgagacagtgagaccaattattaatgatgtaggccgcgttcttttcagcagttgggtgatgatgattagctacacgtaaaacgagaaacatgattagcaatgtaattagttaagtattattatttaaaaaaaaataaaaaataaacttatttgatttttaaagcatcttttatatagaaaattttcacacgaaataaaccgtttagtagtttgaaaagtatgctaatgaaaaacgaggaatagctaagctgcattagctgtttagaacgcggtcgtagtatatatttgtagttaactattatataaataagctattagattggttataaatgatttgaagctagtagctggctatactactaattaaacaataattcgatcttttactatttcaacaattacggctcgcattcactgtttagttatactgtagcactttattttggaccgttggatgtggacccaacaacatacactgtagctccctctgtagtctcttcataattacagaggatccgaattaaagcacgtgaccgtactcacgcgaggttagacctctaatcttgtcaagacatgtgctaggacatgtctacacgttggtgtagtatcaaagtgtgggtacgctttcaacttgtacttcaaatactacctatctctctgtatttaatgtatgacgtcgttaactttttatccaacgtttaatcattcatcttattcaaaatatttatgtaattgtcatttattttaccgtgacttgtttcgttatcaaatattctttaagcatgacataaatattttcatatttacataaaaaattaaataaaacaaatggtcaaacattggtcaaaaggtcaacggcgtcatacattaaaatacggatggagtatcatttaatcccaaaagagagagtttatatgattatactttcaatggtgtgtttgagtactcttacactccaactggacggtcaattaacttaaaggaggatggcgatatggcatctcatgtgttctcgcgtcgcgatcagttaaatattactcatataataagttttctatttttttctaaatcaaacttgatcaaatctataaatttattagcaacatctagaatattaaattagttttattaaaatcaacactgaaaatattgctttattttccaataaacgtgatcaaacttaaaaaaaatttgattagaaaaaaaaaggtcaaagcgagtaacgtttctaaagccttaattcagagacatggactttggccaaacgtccaacaatcaattaattgaccaagttgctttctctcctatatggacgatgaaaacgatagagtagtgtactactcctaattactgtatcgatcacatcgaccaatgttttaacgtgaagaaactgtgagcctaattcactgcagagcgtcatcatagaccaattatgttcattaattatggtaaacatcttattacagacagttcccccggtcatatatactgatcttccagtcatgaaaaacacgtcgctttagatatatatggacgcaattgtcaaaatgcaaaattgacaattcacttccactgcaaaatttcgttagaaaaattctgattagaaaatctccgaaatactttataaaagtacctttgggacaaatataaagttatcattttcaaatatccattcaattaaataacattaatttctgaagttactcatccaaataggcatgctttcattgctggaccgagtacggttttacaaacgtgactatctctattgaaatatacattgaaagtgagaggtagcatgctatgatgtatacctctcttctgaaaagaaaggcgccctactatacgtgtcgtcaaatcttaaaatcttaaatcactcatgtatgcaactatgcctacattgaaaatgcgaaaattataccaatagatttgtcaaaaaaaaattcatataattatatttttaacaatttatataaatatatactttgaaaactaattataaagttatcgattcgatgtccacttcacccatgaacgattatcaagtgtcaggtattcacagatttcatcgccgattggaccgtccccgaggaggacaaagttgatcgtacggacaacaaacattggacaatggcctttgatggtgcatttaacagccaatgagcaagagctgaattcattttcacatcaccaaccgaagatcagtttcgacatgctgactagttagatttctgagcaaccaacaacaatggggaatacgaaggacttctcgctggacttagagcaaccgcgtcacttgtggtcaaacgactagtttggaaaggggattcagaaatagtcgctaatcaagggcacaaggatcacaaatgctcaaatcccgagttgtccaagtatctagcagaagttagaaagttggagcgtaggtttgatgggctcgaagtgtgccatgtctatcacaaagataacgccgatgccaacaaccttgcctgacgagcttttaggagagagcaggttgaacctgacacattcctagaagtattaactagtcgatccatcaagagttcaccagacggcaacattaatagcaccaccaacgttagctcaaaagctactactcagattgacaaaaccatcacggacattgagaccacttaggactggcgcacaccgctcatcgattttctcaacgctgacaagttaccggaagatgatacggaagcagaaaatataccaagttactagcccaagccctccaaacgatccttatgtcgttttcgtgttgggggcttgacatcctcgaatatttttcacgaggacaaggcgactacaaatttttattcatggctatcaacaagttcattaagtggatagaagcggagccaacaagagaaatcagagccgaacacgccatcaagttcatcagagggatattctatcgatacgggcttccatatcagatgttgacagataacggctcccaattcacaagcggtacctttcaggattactgcttcgaactcaacataaaaatctgctccgcattagtttcccatcctcagagcaataagcaagtcgagtgggccaatgggatagtgtatacaataggctcatgacctgccattcaagctgggttgaggagctcccttttgtttcgtgggccattcgtaccaccttgactacacccaccaaagatacccctttcttcctcatgtacggatctaaagttatgctccctttagagctactctatcggtctacacgagattttttttctgtagaaaatttacattattggctttgtttccggtgtcatcctggctcttggtgctatccagctatgggcgccactagtttggaagctattaacatgtgctttcttatagtaggtatcatggttatagaattagaatataaccttgatttatttgcttattaaaaaaagatattcgtgcattttatatgttctcttgacatgcatatcggtttcatctttaccccttaataaattttattgccgcactatcaaatgtacaatactccctccgtcccataaaaattacatttctagctaatttaggacataacaataggattgaaaaatgaccacaatgaccttatttaatgaacccattgcatgcacacattccatatatacaaatcattaaaaggaagtttgagagaattaacccatataattagcatacttaaattacaagctgagagaacttaaggaaacttatctagataaatcaatttgctgggccccatatggctagaaatacaatttttatgggacaaagccttagagttagaaatgcaatttttttttggacggaagtagtagtaaaatatgacctcaaggcagaaaattcactttcttttttcgacgacatatatatacggacctttaaagaataattttacaaaaaggctaccttaattctgtggcgaaagttttagtggcccttaatttaattatgttattctagctaatcttgcacgtggcaggacaatatgcatgacaatttcttgtgtccatgttccaaatctttcgatgacgagagatatatattgtacgatttgtcacttttagatgtgatgtttaatatttaccatactatctacatgtcatagatatatagaaatctacatatgatacatatataagtggttaatagttaaacaccacatctaaaagtggcaacttgctaatggatggattaataaaaaaataaatatttctaccaaataaagcatggcagctagcctttagcgcaagtgttcaaagcaagtgaatcattttgttagaaaaacgtggctcgcgaggaggttccatatgtatgatagatactaatccctccgtttcgaaatgtttggcgccgttgactttttagcacatgtttgaccgttcgtcttattcaaaaaaatttaactaattattaattctttcatatcatttgattcattgttaaatatatttttatatacgtatataattttacatagggctgcaggaat

SEQ ID NO: 6481 - DNA, 6788 bp, Oryza sativa
agtagagtgcattttctttcagcgttcgattcaaatctggagtactgttattattgtactccctccgtcccaaaatataagcttttttagctatgaatcttggcaactatgtgtccagattcatagctaaaaatgcttatattttgatatagaggtagtattacttcagaacagtgtagcaacaaactcataacaatgttcaaacaattgcttctcaactatgaaaatataggattcgtttccaggacttacaaactagctagttttcctgatgaacggcgtttttctcaagtcaaccatttgcaaaataaaaccttttcaaggcattgatgccattctcatcctcaacaacaggaaatatttgacttgaatgtgattcaagagtccaggaaatcttacaataaagactaggcttgaatgcaagtttttgtttgtaaaacctttttataacgttttaaaaataaaccctctagtattcttcttttcaaaagtatacattttggccatgcttgctaccaagacacaccacacccaattgcatcgtaaaaaggtaaaataaaataaaaagattcttaaggagggaaaaggagtgtaacaagtcaagacagaagatagctgcattgacagatgagtattttctagatttttttttcaggtctgttatgtgttgtcaattaatgattttagctgtttaggtggcagttgttcttgatggttatatatattttaagtgtgacattgctgcccattgtatattctgcttctatcatttcaaagattggtctgctgaagatattgagtaagcaaaagatgggagtaaaaaatgaataggtaaccaaacatgtttcacttttatgtactgttatctcaaatacaaaatttttcagactagtgtgaagatttaaaatagtttgaatgactttgttgctcttttcttttactaccacctccgtcctaaaaagaccgcaattttatactatttatatccaacaattgaccgtccgtcttatttgaaaaaattttatgattagtatttttattattattagatgataaaacataaatagtgctttatgtgtaactaatattatttttaatttttcgtaaattttttaaataagacagatgataaaacgttagacatgaaaacccacaactgcactaaaaattagaaggaagtagtacataggaaaataatcatttattcaagatattacaaaattgtcagtgtctggaaattttagagctgtttatattagttgagcctacatttggagtaagaaagaaataaaagatagatttgatagagcagcacgcacgaacaggatgtttgttatgcaaaactcaattgaagagaaaataacttgtatataaatcttttcatgcactgttttttttgtcatcaatctagttggttgaagttaaaaatttaaaatcctaaaactattgcatatgcagggtgctaaattatcatttagattcaaagagatggcaaatcctaacatcaaatattcaaatttaagtgtatcatatgataaaaattacctcataaccatttcagttcacttttatcgcctggcgaattcaattcactgatcagatttatgggttagtactttgaattcagatattcatgggttagtgctcggaacagcagtttgcttcctcctagatgagacccagagtttatatgtgatcaagatcaattgaaacaaaacatcccaaaagtgacaagaaccttgtttttttaagataatagtaccttgtttttctaataacggaataacataatctcggtcaaaccaagcaaccatttgttatacaagcaggatcatcttacaattatcaacccaaaggcggcagcctacacacagtgagtgttttcttacaattatcaactaaaggcatacttaaggtcaaacaaatgcaagctatctctccttttctttttcttttttttttactgcacgactctaaaatggtcgggaaacaacacttcaggacaacacaacaaatcagaaagcagtcatggtaatgactgctgctaacggttgttgattaacaggaaactgataccattgcctttgtcagctgaagagtgactgccccagctccggtgatgtcaggttggctacacactcaaactgcacacgaagtacaattaaatggtcacaaaagatgaacaaatgaccctttttagtctagtacctcaagaagctggtgaagtggtgatcatgtaccttttgttgcctatacttttcacgtatagcattgagagggcaattactggtgttatgctgcagttcccgtagagcacagacacatatttgaatatcagagcttttgtaagaagtgtagtgctcaagagtatgattctgtaaaaagataccaaggttgaagattagaaaaaatgttttggggtgatacagaggtcgatatagtgcatatccttgttatacgaacccatggaatgtcagattggtcaagtgtccatcttgcaagaaagactgcagatgctgccaccactgaaggaagaaatttgaggaaactgtaatcgatcagggtcagctctgcaagataattggccagatatcccaaggtaattgaaggaacctggaaatacagtttgaaaatttggcgttcagggatatacacataaaaggaatgaatgaaaattgtagctgataaaaggtcgggtgccaatcttacattacgagaagcctgtgcggctctaaggaatctcctgataaaatataaagaaaagcaggacggtcatgttagtgatagaaccacaacttagattggacaagaaacaccatatgtatgtggtaaccaaaactacctgagaaatgtttttgttgttggaacagatagatgaaaccccatatcattaagcaccaggccctccattttcagcacctattgaatcagggggatatcatatcagcaatggcagttcaatggctcttctatatacataaattagcaatttcttcagacatcacattaaacaaatacctcagcttttgtgtatgtattgtcagttatgaaacaaaattcttcaacacgaggagcacatatctcttcatatttcctataaaaagaaggtagacttagcaatacttccaatgacatgaagacaacatgcaattccaatgacatgaagacaacttgcagagttgttagcttgtactttacattagctacagactaagctgcatcagcagctaggtaaacctttctatggtacattttgggaaaatcacatatatgtatccaaaacttacgaggcaatcagcatgcttgttattccaagaagttggagtttctgtctttcaatataatgttgagaaagaaatcggtcaataagattaatggttaggtagagtgtgtctggcacaagcttatattcttcagaaacctgaaatgaagacaatatacagaacttcataagctcagaagtcatgaacagttcatattattaaattaaaatgtacaaaggatgatcatggtttattataacaaaaaagaaaaggcagattcttcgaattttgcaagaaatgtataaagcttgcttctgatgcagaagccaactactcatattctcacctcttcagtatctcaggctctccgctaaatgatgagaagagtgattttataatccacaacttattcaattatctcatataaacttttcatcattgaaactatggtactttcaaagggaaatgcaaaggacaaatggaaaaagtataaacaataatgattcaatagaaagaatgttcttgtaggcttttaaccagatgcagcatccagtatgtaacattcacatgtaactatgtatttcatgtttgagttgcacatacatgagtttctatgtgacatgcagcgagatgctaacggcctaacaataaacggcttaaattcgtttgaaaagatagcagggcagtttatgtgcaaattacatcaagagaaatcaacctcaacaagccaatcaatgagaatgcctcgcatgccctttgtgatgtcacgttgcaaagcctccatgtaatttgacctgggtcttctgataagctgggaatggcataagcagaagatggagtttgaattcaaacaagaagaaagcaccaataacacagggatgaaacacaaccatgaaaaactgaaattacttttgtcatactagaatgtttgaaatatgaagaaaccatgagcatgttaagacagtaaacaagattttgtttttcatcaaagaacaaaaacatacctcagaggccatcagatttgtgtatatctctgaagcataggaagcacacatttgaggatttccattatcattgtcaatatctataaaacctaaaccactagagtcacctggaacaaaataaatgactctttagcaatcagcagtgtacagaaaaatttatattcatgtttttcttgattatgactagcaaaatacccgtgcattgcaaggggattacagtaaagcccaaaaagcaaaataaaattattaccactctctaatcatcatatcatatttggtacaattgtatacatgtaagtcgagctacacagttgctctagcgataaacaattggtataaattatccacattgtatttgatttatatagtggacactgacatcataggcccacatgacactggcagaaccaccaccaccactaccaacatctgcagtagtaagtacagattatctacgaatatctcagaagtcagcagtgtacagaaacatttatagtcatggttttgtacagaaacattatagtcatggttatcttgattctaagttctgtgacaacagaaagacaatcaagagtatgttcctgatagaagtgattgacaaccggtagataacatgacacgctaagggatatatgaatcttttttatagaattagctgacttgaaaagaaaaatcagtaagtccagatactcattgctaaaaataagcacgcaacgtatgcaaaataactaaccaggcttggagtcagcgagttcatgtttatccatggcgtttcttgcctcaaagaatgcctcatggcaattactgtccctgtttcgctcaatattctgcaatgacagtaacccctcgttttcaaacaaatttgtgggttcctctgcttttgccaaaagctccaccttttgagtttcttcagaacttttagaatcaatcacaaatgaagttccagcaacagccggagggggtagcttaggaaccttctttgcacactgctttttgctcgggatttgtttcaccctttgggtgggctttgacttttgctggaacaaaggaataaccttatcactccatcaacaatgttcatggaaaataaaggtctaaaaatcataatagcataatgcgataatgcagcagctcttgatacctgcagcttgctcgtggtggtgcaatttttggatgagttggcacagccgatgttggttacatccttgagcactgtgcgccgtttaggctgaggagctgaagttgcagtacttgcactagtgatttcatccaaagctcccctttttgtctttccttttgctgtctgctttcgttcagttcttgcgggtagtgatacggagggagcaaacccaaaccgtccacgatttgcagcagcttgagctcgtgtgattcgaccactgggtgcttggcaagcagtaagcaccggattttccttccttccagccatgtgagcctgaatgtgttaaaaggaaaaaaaatgacataagaaattgtgcagttttgacgcaaaaaaaagaaagaaagaaattgcacagtgagcaatgaagatatcaaccaaggcaaataactttatggagctgaatgagacggtgtattaagcattaagtatcagtgtgaaaaagaaatcgaacaagtagatgcaatgcagacataaaacagtatcagatcttatttgcaaatctaacaagatcatatttactcacaagtgcacaagttaaaccaaaattattcagtcccttcgtagcataattgagagaaataatagataatcccagggcatacagatcggaattagcagtcagttggcacaaatgtttacagttatgatctataattcaaatctgaaaccagatttatttgtccatttcgttatgtgcaaaaaaggcagcgctttctatagattttatggcgttctttaaacaaaagtcccttctaaaactgccttgcaaaatgccatcttcatattcaggttagatttcctaacacttttgttttctttcatggcgttgaacagatgcaaaattaaccttatgcaccagattgtgccaagaaaccctccaagtcaagctaccatcagatactcaactaaaaactcactttttttttcaaaaaggatgccacccaaccttagccctaaagctgaaatcctcgcaaacgttaccaacatggaccaatctacgcacatcccccatcctcagacgcgcacagatcaagcagatctaccacacagacgacggggcaagaagccaagaaccccccacgagcgccgcgaaaatcaccaatgcgtaccaagaacccccaaatgcaagaccaaatcaagaaccccccaccccacccggccccaaatgccaacccacccaaaattcccggaaacaatcggagtcacccaccccctctgcgcggcgcgggcacccgggacacggagaggcgctcccccgtcccccgcggccgcctgcggcggcgagtagtgccctagaaaagtaaaaaaagggagtcgcggctgcggctgcggcggcggcgg

SEQ ID NO: 6482 - DNA, 9170 bp, Oryza sativa
ccaggccttactactgctactactgcaaatgtgcaatgcacctcaaggagggcagtttagatctgacaaagaggataaaatttctgcaattattggggtacggtccacctaaggtgtgggcccaacagatcacatcctagtcacccggttggtgaactggctcgtgtgggccccacctgctcccaatctccattctcctcatcacatatccataagtctgctactactacttaattagctaaggtttagctatagctaagctcactgactatgcatgaagcttccagaggcagtgaggcaccacaaattttcagacacatgctggctggagtagtgtaaatatacacacacacacactctctctctcatagtaacagggctcaagggccaacaagattagcactcactggttcttcttccttgtttatttggtatgttcattagttctttgctttgcatgaaaaaaagctagctgttatgttgctatttctgcacttaccttgagcaaaactgttgaggtgttttgctgtgaatgtgtgttctgggtgttttggtttgttccaagataatttaacaaggctgctagatctgtttcaagttcagttcttgagctcagagatggtttcgttgtgcttcttgaatctttagcaatcctagagctgtggtctgtggtatgcaggaacatgaagcttctcttctccatttcttccagagtttatgggaatcgttgtggttcacatgttcttggtgttagaacatgcaagtgcatgtgcattgacttcttaatttgttgttcctgcaagtgcatgtgttttctgttatttgctcacacagtgtgttggatcatgttgacttgaattatttatagaagagattgttttggagagcatagatctttggaaagtaatgtccatggattatgctctgcatctttctgcgtcttctttctgatgatgctgaaaatgcttcttgtaatgtttccactccaatccaaagctgttcttagcttcactcttcagtgttccttccttctgtgagttcacttatatggtacagctgaacagagactgatagaagcttggttcctggattgaattttaagttattttagccttttgttgtagaggaatctgatctgtatatgttgtcggaaagttcaggtgaacaattcttctttgttactacctctgctgtttcctgaacagttcttgagctgcaaccatgtagctgaagctgtatacttgtatttcgctttcagagatcacatatttccatcgcacacctctcttacatcttccagagttcagtctatgttttttttttgttctcatgttcttggtttcaatgcaatacacaaaatcctaatgaatctttcccactgagagtttggattgaatcttgttctttccagttcatagctttacacagtgatctgttgctcactgactttgcagagtaacaccgtttaccaagtctgacagagtttcatggagcaggtaattactctgtccctgattcttctccggctccggcgagatcatgtatcttgtgaaggatatcggcggcgccattgcgctgatgggcgtgtcactggtgctcctgggcacatggccggtggtcctcgccgtgctggagcgccgcggccgcctcccgcagcacacctacctggactactccatcaccaacttcctcgccgccctcctcgtcgccttcaccttcggccagatcggcgccgacacgccggagacgcctaatttcctcacacagctcacccaggttagtgcccatggttattcttgtctgaatttagacatgttagtctgaaggaagtgatgctcatttcagacattcagtatgttggtctagtacagttttcagacttttcagacatggggtacaaccttttctgaaaaactgtggtttgtcactaggaagtgaattttgttggttttttacattcatgttggatgtagaggccgggttccaatccattgtctaaaaaaaaagggaagtgaaccttgtttcctgtcggaagaggccaaagatgtaaactgttttcattatctaaaaaaaggaagtgaacccagtgtatcaggcttgtgttaatagaaaactctgaaaatttcagttgatcaatgctggataaccttttttttttcaaataaagatgcaggacaactggccttcaatcttgttcgcgatgtcgggtggcatctttaacggcctagggacactggccacgcagtacgggtgggcgttcgtcgggctttcggtcaccgaggtcatggcgtcaagcctgaaggttgtcataggtacaaaaaaattcagagtgatatgctctcctgataataagaatgatgcctgatgcttgtatagcatttactgttcagaatctgaaaatgacaatatggtgtgactgagaaacttctcttccagggacaacactgaactattttctcgatggccggatcaacaaggcggagattcttttccccggtgtcggatgctttctgattgcagcctgccttggatctcttgttcactcttccaatgctgctgacaaccaggagaagctgtctagtgccatggtgaaccacagcaacaccaatgggtataaactctcttcttccgtttttcactcatgtggtgaatccgtttcatcagttctgcctaaattctacttctgaaatactgaaaattttgaaaaataacacgtatataaggtaatttgcttttacttgaattttatttggttgttgctaattgcgaccaatgtatcatttgtgcatcagtacattattccaatgcagtaaattcatctgaacaaacaatgtaattaacttgaactctcaacagggacactgaaaatgaagaactcaccaagcacctccttgagataggtactaatcagatttagtctgaaaataatagtatatcatagagctatgtgtactaatctttcaattgacagaacaacccaaggattgtgaagaacaagagcctgaagtggcaccggctgcccaggctgtggaaaaactagaggcaggaacagctgatttcctggttgaccttgaggggaagagatctattaaagtacgtacttataatactaaccgtaccaatatattagttaaaatgtcatgactaaactgcagaaattcaggtggagcaattgcaaagcagagttgctagcaaaatttccacaaatgaaaatccatgtatctctaaggaactttttttaaaaatctgacacaaccttccatgtatttccaacatactccctccgtttcatattataagtcgtttgactttttccccagttatacttcattaagtttgatcaagtttatagaaaagtataatagtattttcaataaaaggcaaatgtattatcaaaatatattcaatattagatttaataatctaattcgatattttatatgttactaagttttcctatatatttagtcaaacttaacaaagtttgactgaaaaaaatcgaactgacttatgatataaaacgggggggaagcagtaaaattcacactttcacaacagaaacaccaactcaacaacattaatttgtttcttctccatgacacaaaagaccttctgaaaaaaaaaaaacttcacattcaggtgctcggatcgaacaccttcctgggcctcggcatcgtcaccttcgccggcgtgagctactccctcttctcgccggcgttcaacctcgccaccaacgaccagtggcacacgctcggggagggcgtcccccacatggtggtgtacacggcattcttctacttctccctcgcctgcttcgccatcggcatcgccctcaacatctggttcctctaccaccccatggtcggcgtgccgcggtcgtcgctcacggcctacctgaaggattggaaggggagggatcttgctctcgtcgcaggcatggtgtgtggccttggcaatgcgttccagttcatggctgggcaggctgctgggtatgctgctgctgacgctgtccaggtacaccatctttcttcaatccaggccgtctgcagtactgctgtcgaaactaaatttctgctattctaaaagggtagcaaacaagctagaaaagtagatgggttatgagacggatgatttatataggttcacgtcttataggtatatggtatccataatctccacaactgtagaggatctttctcagctcaatttgcatttcttgggagatattctctctcgttataaatatttgatgattaggataagatttcattaaaattttgggatttgacattcagtaacttctcaatttggctgtatatatccacttgtagatatatagaccggatttctacccattatcttttttaaaaagtattttttaaaaaattattggtttaaaaattagtgtgtgcagattaggataaacttgttctgaaataaaattaatggccaaagttttgatttgaccaaatcttatcctaaacgttaaatatttacgacctggagagaggagtacatgacttgaacattttatcaggcaagcattaatgatcctcaagatgaagattcatatgtgcaaattatgatctgatcatggttttggaatttgacagtatgagaagaagacgatatgggttttctgaaactctgaacatgaatgggccggggcgtgtgtctgaacttttctgaacattatttctgctgcaggcgttgccgctggtgagcacggtgtgggggatcgtgctgttcggcgagtaccggagatcgtcgcggcggacttacactctcctggggagcatgctgttcatgttcgtcgtcgccatggtcatcctcatggcgtcgtcggcgcaccggaggccgctctgatggcggccggccggcggctgccgtcgacctcctcctctcctcatggacatgaccgagaaacatcagaagaagaagaagaagctgcatatgtacagctccattgatctgaccacatcagtgtgtagttcctgaccttctcgacgtaggatctatgcatattgcctcccggtgcttgcgcatcggcgaggctacacatcaattaatttcttctgcaatgagcaaccatgggatgggggagtgaatttggagatgtgattggactagtatatagtgtaatgttgtaatatatgtctcagcttctttgtgtgaagcttctgtgaagggaaccaaaataattttcaaatgtataaattttgatcaatgttatgaggagctacttcctccgtttcacaatgtaagtcattacattcatattaatgctaatgattctagatagatatatatgtctagattcattagcatcaatacgaatgtggaaaatgctagaatgacttacattgtgaaatggagggagtagctattaaggctagctctagtaaaaccagattaataacctttttgtaatcctcaaagtagaaatgttacaactttgacaatgaaagaatcaataatggcattatgacgtcatgagggcttttttcctgaaatcaggttcatattttcttttctatacgtgcagtctaaatattggtcctagaacagtttttccccccctgaattttgcaacgacattaagttgattatcagtgctaaaatgactccaacaaaaatactaaaatgtgtctcccggtgaaaaataattgtgtttttctttgacagataagaatatatactcacataggcatctccttaaagttttgagtaaattttacaaagggtggtgacttggcaagtgatgtcatcagcacataggtgaccggtcccacatcaatcgctgattagtcccttgcatggtccatactccatccataccagttcttgtcatggttgaaaacagagttggggcacacctacaggctactctagatctagtctgtgttggatagtaaaggttgggaaaacttttcccgcacacagaaaacgtgataactcattaatatatgattaattaattatgaatatgattttttttaattaatatttttataaaaaatataaaaacacgatgtttaataattagggaagcatgcgtctgagaaacgaaagagtagagaggcctcggtcccgggccatctacataggtgagatggcatttcaactaaaactctggtttgtctagatcagactaagactaacacgagttattttaactagaggttcgtttgcatgctacagtaagtggcgcgattaaaatatttgcagtgtttgaatcatccaaggatgttgaacacactatatatattttaatttgtagatgcaatgaatgagtgaagatcatttcttattgattttgatttatatgactgagctgatggtgatccagtaagcttgcgtttaaaacagccctattgactaactgactgcttgtgcagttgtgctcgatatataggctgacagaaactatctgtgaaatcttcattttttggttagttcagtgtcactgtccatcaagaggaaacctattaccagtaattaatactgtcacagtataggactgaatgattcgtactccctccgtcaaaaaaaaaacactcaaccaagggacaacgaatctagctagataacgagttttttttttacggagggagtaaaagaaaaatacagtaggaatcatctctgctgtatcacaggtggatgatgacgatgatcatgatgatggtaattgtgacctgtacgtattcctggtgtattttcgaagaatgcatggtgggagtggcgtgctactggtctggaaggaatcacaatggaagagatacaagatcacctaggataactcccatttggttttgccaaaagtagttaatttgttaccagcaaaacccagttaagatctactccctccgtttcaggttataaaattttctagcattgtccacatgtatatagatgttaatatgtctagattcattaatatatatatgaatatgggtaatactagaaagtcttataatatgaaacggaggaagtacttgggtagggacggatctaattctaatagagggggcttatctccttcttcctcctcaagcccctactctttcttctccccctcttcttccccctcctctctccccttctctcaatggtgatgattcagtaaggtaaggggacttgagtccccccatcacccatgctagattcgtctctgttcttgggtttaacccctttccttgtttaagtttcgattgttatatatatatatatatatatatatatatatatatatatatatatatatatatatatatatatatatatatatatatatgtggtcacacttgttgtaatatgtaacatcttcatataatcttaataaaattggtcggggctttttctttattgcaaacccaatgaaattacaagtacgtgtattacataagtatgatttcttttagccatctatatataagtaactaaatagttttatagctaaattcatcttaccggtcactacctttgttattttttgttaatgttttggatatcaacacattctcccgtgcacatgttttataattacttttcagaagtatatatttatataaattattgaaaaatataactatatgaaatattattttatgacaaatataattatcacattttaaatcttggtatatttgcatctatagattttgagatttgacgacacgtgttgtagggcaccgtccttttcagaagagagatggtacgacataatgctacctatcacttacaatatatatttcaaagtcacgtttgtaaaatcgtactccgtccagcaatgaaagcatgccttttttggatgagtaacttcagaaatgttatttaattgaatggatacttgaaaatgataattatatatttgccccaaaaggtacttttataaagtactttggacattttctaattaatctgaaattttctgacgaaaatttgtagtgtggaagtgaattgtcaattttgcattttgacaattgcgtccatatatatctaaagcgacgtgtttaattcatgacactggaagagtacatatgaccgggggaactgtctgtaaaaagatgtttaccatatatttgaacacaatattcttctatggtgacgctctctgcagttaattaggctcgcaatttcttcacgttttaacattggtcgatgtgatcgacactgtaattagtagtacactactctatcgttttcatcgtccagataggagggaattaaagcaacttggtcaattaattgattgctggacgttggccaagtctatgtctctgaattaaggctttagaaactttactcgctttgacttttgacttttttttttctaattaaaccttattctagtttgatcgtgtttattagaaaatatattatttttaatgttagttttaatgaaactaatttaatattttagatgtcgctaactttttttatagttttgatcaagtttgatttaaaatacataaaattaatttataatgtaaaacagatgaagtaatatttaactgatcgtgacaagaacatatgagatgtcatcgccatcctcagttaagttaattaactgtgaagtttggagtgtaagagtcaaacacaccattgaaagtacacacacatttgaaagtataatgatatgaactttctcttttctcttttaggattaaatgatatttgaagtacaagttgaaagcgtacctacactttgatacatacaacatgtaccaacgtgtacacatgtagtcttgacaagattagagacgtaacctcgcgtgagtacggtcatgtgctttaattggtgtcacacccgtgtgcatacatgtagtacctcttgggattaaattctaataaatacaaatgctcatgctaagtctatgattcgagtcgggtaaataggtaccaccacatgaatattgatacctcaatttgcagttaaaaattagactgtattaatagcaggcatgttaaggttgagtttgttgttgtagttctgaaaaaggagtttgttatcgtattgctatattgtgattttttttcttattttattaattgcttgaaaataaaatttatagttgatgtgtttgttacatatcaattacaattaaataaaaatatgatatccaactttgtttagttatctaaccagctgaactatgtccagtttgtaa

SEQ ID NO: 6483 - DNA, 6587 bp, Oryza sativa
cattgggcctgataattagttactaagtgcggatttgcgggccctgaacacgtgcacatgttgcaccggccagtatatgggcctgatcacgacttcaccatcacactactggtattgttttaatatgcattcatgcttatcaacaacatcaagtgtactatcaatgatctatttccttttttaagatctcttacctcatcggagataaaggaatatcaaccgttggatctacaataaatggatggcccaaaacaattttgggaatacagtaaaaatatcccctcttttataatactcaatgcgttaatttgacccagaatgtttgttttctcaaagatagtgtttgacgttcttgatattgttccaccacagagggtatcccttgctgaccttttcaggtcataaatcggaattacagatatgcataagcttcactcaactagccaacaactaagcttaaacatctgacgaagcaaactctaccaatatatatatacaagaccctttttgttctgtcataaaatatatattcaccttccaaaccacagctttatatggaagttggacaatgtgtgtaaagcagaaaaaggagagaagtgggagtaacttaagcacatcattttgctgcagatgttgcactagggagatcgaagctgccaattatcaatatatagctttggatcgatggctagacacatacattatttaaatttccatattaattgtgtcttcaggcgtgcatgtgacctctgtgtaggaataagagtcgttaggaaaatagagatcgcgagcgtcttcatcggttgagcatcagcaattatttcctccggcttaaggtgtcttccaagctgtgttctcttagttcattgtatttcgtgaagcttgagataatatatattcatgacatatatgatgatagagctgcaactatagggcatgagctaattaattcgattcaagatgattaattgtttctgtctggcacgatggctctttgatctcaaaatctattgtatactaaaaattcattagacgtcctaaaaacgctcttaagccgtcatacatgtgacactactacaaatgttcctgggctgtcacgagacatacgctctattttctgaaaagaaatagttagatctatcttctaaagaaaagaattccgaaacctgctgttcagcatgcaggtagctagccatccctcctgttgatttccttttcttctctctcctatggtggtagttaagttagttaagttaaaacatactatctaattccttttttatggccatgcaagcatacataatggtctcggtagtaggttttataaatagataaacaatcttttaaatggttgtaactttcaagttatatttcaatttattacctatttgcacttgtatttttaattaaatcaataatttaaaatcaaatagactaaatttccaatgctacaactgttgaacccacatttatcccgagacctctactaaatacaatcaaagcatcccactttattttttttacttatggactgttagacatctaataactttgtaaaaacttaactaatttttgtcaacatatatctacacaaattgatcttaatgttttaatagataaacattttatatgatcatagcacctagcttatagatatgatctatgaagtcactaataaattagagaaaagtatttaaatgatacaattattttgttatggacacatttatccatgctaagttagggcggaggtcgaaaacattacaggatgcttgatagtatggtgtaacaccctgaaaattcgaccgacaaaaatcaaaactctaaaaatgcggattttcaaaaactttttaaataaattgcatcatgccgattttattcgattattttattggagtttgggttcagagtttataaatcgcgaataatggataattggttaggaataaaccctaaaaagtaaatggacaaagtaaataattaaagtgcaatttaaaataagatttggtgaggatagaaataagtaaaatattattacgaccatatttatatccatcaaatttaaaagcaatggaatgagaattaactctaataagttcaagtaaattacaataataatatataaaacatggaataaattaatctagaatgaatccatggattggaatggcgcaaatattgagtatacttcatttatgcaaaatttgggaattaaagaatcaaatttaaataataaataggccaaaatcgggttaattagaaaatggcactgttcattgcacctaaagtgttcgacgaggtcccctagccctagcccctcctttgccgcgttgccctcgcgccccgcgtgccgcgcgccgctccgcctcccctctgccgacgccgttgccatcaccgcgcctagccgcccctaaccccgcgccgtcgtcgccgtcgtttccgtcggtcgccgcgccgccgttccatcgccttgcgccgcgcaccgccgctaccgccgtgccgtcgcgcgtcgctcgacgccatcccgtcgcgccgtcccatcgcgctgtcccatcgcgtcgcgcgccgtcccgtcgccactgccgagccgtcgccactgccgagccgtcgccgtcgtcgcctcgcgccccgtgccgcgccgctcccccgagccccgtgctgccgctgctaccgcgccgcgctgcccgttccatcgccgcgcgccgtaggcgttcggccaacgcgtcgccgttgccgcgctatcgccatcgcgcgtcgcatcacctgccgcgccgcgcccccaagccccgtgccgccgctgctgccgcgccgctgccgctcctcgcgccccgcgccctgccgcgccgcgccaccccgccgacgccatgaggccgccgcccctctcccctcttccccattatctctctccccccctcccttatataagcccccctactcccactcttccccttcatcctcacctcctctcctctacccacgccaccacgccgccgcctccacgccgccgcgccgccgcctccacgccgccgcgccgccgcctccacgccgccgcgccgtcgcatagagccgccgcgccgccgccacgaagccgccgcgccgcgccgcaccttgcgccgacgtcgccaccgtcgccgtcgccgccgtcgccgccaccgcagtcggtaagccgccgcctcctccacttgctcggccgccgtcgccgccctgggtagcagagagccgagagagagagagagagagagggagaaaccgagggagagaaagaagaaggaaggtggagagaaaccgggagggagagggagaaggaaaaagaaaagaaaagggagagagagaaggaaaaagaaaagaaaagagagagagaaagaaaaaaaaaagaaaaagaaaggaaggaaaaagaaaaagaagggaagaaaaagaaaaagggaaatagataggaaattagagggagattagggaagtttagaaaatttaaaataattagcatttagttatagactagttatagacgtagaattgcgaaatttaatataaattatggattattcttggtaatttctacaagaaatcaattcgcggtagtagtttaaatgtaattaagaactaaacgattagatgaattcttatagactattatagattattttgggtaatctctataagtaattgattcacagtagaaattcggatttaatcactaggatttttagacgtatattatatttagtcgtttagtcctagactaaaattaaatcgtataatattataagataattataggattccgtccgatatttagcttgcgatagaaatttccaacctattatatggatataatgctcgggtagattaaattaaaaacttatgataacaaaatatttatacccgcaaaatagtttaggatataaaaatcgaaattgggtttgccctagttcgcgaatagtaaagttaatataaaagaatcgacttacgcgttcgacttccatttggatttatttggatttttatttgaattctaaccgaattcaaatcaattttcgtacgtaactatagagcccgagggagttgcggatccaagtgaaggccaagacccgcaagactttgagcaaggcaagtcatcactattcttgaacatattgatcccaattgcgaaattgttttgtttacaaataaaattgcatgcaatgaggaacatcctacttgcgattatgccatgccttgattattgtttaccccttattcctttgtaaccatgtttacgtatgagtccctagtcaactatgacaaatgcttagaaatgctattctagaatcatgcatactcatatttgtcaaatgctatatgcttggacaattacctttgggaaggtaattgagatgcggcatgtggagacatgagcgccacattgccatgatattgaggacatgatttgtgaaaggagaaataaactaaataactgttttcgactggggcggacggaggatttgggtggtatctggaaaaggctagtaccgtctccggtcaattaaggaccgagccatgaaattaagcatgaaacgaccctcgtacaactgcacttctcgtatgggtatagacctagcggagtagatagccgagcggaggcagtatccctgcatagatggttcacccctgagtgaggcaggtgcgttacggtgggacagccgttgaggtagggccaagaggcgtgccctacatcggtgtcgccattggtaggactgccatgagtgtgtgtgagagagaacttaacttgaaccataatttaatatgtgtgtgagacttctctttcccgggagcgccagaactcctctcactactagaaacatggacgcctagagtgcatgaggatttaagttcatggagcgggtactgccaatgcgaggttatcaaaaggctttgccgtggcgcgtctcatgtgttgggacgaggctcatgtgttgggcagtcgcggagtgcgggtaaagtgtacatccactatagtgtgagtaaaaccaaatctattcgaatagccgtgctcgcggttattgagcaccgggacatgtattacacttggctagactctaaattctttaacttgtgtgggatgggatattgcatgatgatttttatgctgatggagccacttcctgagaggcgggaatgtggacgtcctcagaaaaccataacgactcaatggcgggaagctatccttgggatcacaatggatggtggacagaaccgtcattgtttaatatgaacacaggtattaaaacttgatcagtctatgctaggtcttaggcttgtgaaaagaattacaaaacttgctttgtgcaaaagaaccatagacatcctttgaattcctctgtcatgtgcatcattgctgtggtggcttgctgagtacggttggtactcacccttgcaaatataaaattaatcagaagcgggagatgaagcttcggaggatccctatgcctactaccaggagggagatgaagacgatggcactcagtaggtcttagttacggtcgttacttgtggcaatggcgtgccgctgccttaactccgctgccttacctacttctgtttttggaatgtattccggaccgctcggtccgatgatttaagactgtgcctgcgggcttatgatgtaataatttgtactagactctcgtatatgtgcacttgatatttcagctataagttcgtgtgtaccagactacttgatccagggaaatggtactgtttacacgattgattcctgttataaaaacggggtccacatatggaaatccccaaaatttattaaaaaatggacataataaatttgattaaaaaaaaaatccaaaattgataaactttgttgaattcaaaacccatgctaaattgaaaaaaaattgaacattttagtaggactgataaaataaaaaaatacataaattttcaaataaaatctataaaacaaatttgcacattttttggctagggggccaggggtgtaagatatcctattggggaggtgaaatacccaaactttcagaaatttcagtttgaaatatagaacccttggctgcaatttaggaggggtgaagaaaacactctttccaaaaaaaaactctctccgattcgtaaaaaaaattaaaataaaggccattgagttatttttcgtataactgctaaaccatagaaagcaaagacatgcttctagagtgccccacgacatagaaataatcatattagaaagtttgagtatgtaatactttacaaatatacaaagctaaattaatcgactcatgtacaaacaaaccaatgaaatctgtctataaatgacactcttaacaattattatctcgatcccataatataagggatcatgaattaaggacaaaggaaaaactatgatacctttaattaaaaaggttatgtctagagtgggaagatggttggagtataattaggtcaaaattaaatgaggggtggttggatgaggcaagtactactatagaattattaataatatacaaaggacgtaactacacagctacacagctagtggtagctggtttataaaccagctaccactccatctataaaac

SEQ ID NO: 6484 - DNA, 11369 bp, Oryza sativa
cactacatatgtgatttgcactacatattttccgccgaaaaagagtatatattgtagcaacttcaggatgaaggtccaatgaacttagcatattttcttcatggcgatgatgtgttccagggaacgatggatggataagtcgttcctcgatcctaggttgaccccaaatttttaaatttaatttctggttaacttatcgctgtttataacagactgcccatatttagctatgggagctactgcactgtacatcattgagttggctgggggggatagctacaaagatcaaaaacctttctgattaatgccactccatttcatattatatgttattttgacattggtcaacgtcaaaactaagtttgtagaaaaaatgtaataacattttcaacccaaaccaaatataacataaaactatattcaaatatcgatttaatgaaattaatttggtgttataaatattactatatttatctacaaacttaaataacttatagtctgaaacgggggagtacaacttactacactccagccttacaagaaaataaaaggatggccattagctagtacatcactgatgtgtcaaaattagaacatcattgttgtgatgacacaaaattaagtcaaagtgcagtgacagctgaaatctatctatgaacatcatcgcagcatcagttgagatggctacaaaatgtcagatggaatcatacatgagaaggtactcaaaggaggagagatagcagtaaattaagtgttaatgtgtaatcttaattggtgttaggatggagtttcaggacatgacttcctaaaatatgatacttatataactggttagctgtatagtggtgtccttgttgaccatctgctggcaagaggcggatgttatgtttgttgtgcatgtgcagataactaggatatggccagttacatcagcatggtggcataatcctaggatcgttctagacaatttcttgatgcctcttaatcctacaagggtccattcatgtatgcataattgaatgttgtctttaaagaaaggctaatttccttagtttacagttcttgttttgtctgggcagctcatgttctcgccttcattcacctgcaggtaaaaaattgaatatgattggacatatacagcctgtggttctttgttcttggataatcaagtggagatcaggaaaaaatgtcgagaaatcaacaaccatgcattcaatgatgttaaggaaataaatgcatatggaaagatgcctgcttttaacttttggaaaaagtacgaattacacccctgaactattacgatcgatcgaattaccctcctaaactcaaatactagatgttttacatcctgaattattcaaaccggataattaaccctctggctcaatccggagtggttttaatcctacgtggcagtctagtcacctgtaagactctcctccctctatctactctatctcttcctccctcttgtgcaatcccatccccctttctctcctccctccccttctagcagcgagtggcggcggtcgacaaagtcggagctcacgctcggcgaaggtggtggcaatgatggcggagccaaagctcacacatgtggctggggcggttggcaccgaagctccaggcgcagtggcgggcatagctagggcgattgcggcaactaggtcctcttcaaaggggaggatcacggcagcggcggtggtggagtggaggctttagtcctagaagccggtcttctcccaaatggcgttgcgaacgaggcagaggtcatggtccttgagcgtgcggctggtgccctcgtggacagagaaggacgcggcggtgcgctccaggctgagaaggacgcggcccagcccctgcccctgtggaactcctcgtcgccgcactcatccaacggccaccgcgtcgcgtccgcgcctgcactccccttgccgctgtactccacaccgaggatatttggccaattgaggatgttcactggcagcgatgtcgctgcccctcccccaccaccaccagctccctcccacgccctcgcgccagcgccgccaccacctctcttcccgcccttctacgtcatccccacaagcgtcagcggggcggcacataggtacgtctccatgggcgacaacaatgacgacgctgacatccccgtgcctccctgagctcgccgccaaatctgcaaggactgtgccacttcctccgccgcctctgcgtccactgctggaggtggatctagagccgccgctccaagccccttctcggcttctcctgccatatgtgcagactagagagagagatagagcaaggggagggagggatggcttgacgggagagatgacatgtggacccatgaatttttttatatattttctttgctgactagattaccacgttgacgccacatgtgcaagctcagatcaaaaccacctaaaacagtgctgatggggttaatcatccggtttgaataattcaaggtgtaaaacgtctggtatttgagtttaggaggataattcgatcgatcttaatagttaaggggtgtaattcatacgtttctcttaacttcttacgcgtgttgttttttataaaaaaaaaacctaattttcgaacaagtccccttttactttattggcagttaataaggaaatccacctctgccaaatgacccgggtcaacagtgttgttttaagtcaccggctctaaaaattgatttttagagcacattgttttaatcgagatctgctagtttagaatagcctcattttccagagacggttggcttaagcgtccgcctcaagaaatagcctctccggaaatagcttcactcaaactcgactttgttttacacataatgtcgtcttgtccctgattttaacggactgcagatcgtgaagctattgagttgaatacgctatatctgaagacaaatagagtcaattagaagctttttctgtccacaaaggttaaaatccttacggatatatgctattgtgatttataatatacaacttgcaatttgctacactctagtcagacaagaaaaagaaaaataaaaagaaaaaggatgatgatctctgatgtgtacaaaaatacggttaaagcaccacctgttcatatggaatttgtagccaacaaatgaaaatgttgatcatatgagaacacacaaccaatcagagaacaagaaacatccatcacgcccatcttgttgcgaacataaggtatcctccattttgttaatttgcttacacaagaggtatatatcctccattgatcgctgtacagatctgtacattgtatagctgccgtctgttttagtggtgtagctcctcgctgcaaattttctctccctttcgatcttcagcttctcacagtagtcatgcaagcactaggccaatgcattaacagatactacctccatattttaatgtatgacgctgttaactttttatccaacgtttgaccattcgtctcattcaaaaaatttatgtaattattatttattttattgtgatttgattcatcatcaaatgttctttaagcatgatataaatattttcatatttgcacaaaatttttgaataaaacgaattgtcaaacgttggtcgaaaagtcaacggcgtcatatattaaaatacggagggagtaaatcttaaagaacagactagctaatacccacacataacaatatgaacaagctgagcaatatcaacacaagagcaaatgctatcgacctatactattcaaatccgtgtttccaaatcacttagtcccaatcactgtctctacaatgatcgcggctacatgacttggaatctaggattgaatgaggattaatggtgaatcatgttttcctgataccgctcattcaatatatacatgttggatgccgggctctttgccgtctgctatcatcgatgctagcatgtgtgcaagcaggtagaaataataagaaccgacagaactgagcttgtcgatcagttcgtgtgctaaccattaatattaaccaagtactccctccggggttttttaatagatggtattttattcaaatgttaatttgaccattcgtattatttataaaaaatatgaatatgtaataaaaaatgtaagtaacgctcaaaagacctttaatgataaattaagctactagctaaaaaaacaaatgataattacttcaattattaatttttaataagacgaataatcaaatgtatataaaaaatatttcaacttttaattgttcacataccaatggaataggcagtcacagaatagaatttcaaggaaagcaagttggatataatgccattcaaatagtataaaaggcgagtttaattaaattatatgagctgagcaagctatgatgaaagaagaataatgccatccaagtagaataatgacgtgtggctgtagcttcgttgaagtgaaggtcgggatttattccattatgaaaaaaatagaataatggcatgtgtgggaggcaggtgaaatggaaggtggttaatcgtaaagaaattacttattactctgttgtgcatactactatagtagaacctactatagtgagaagattaaaaactttgatcaatgcactgcatagttacagttaggtagaagtggtaaacaaccaggactttcagctctcgtctctggcctttacctatacctattcgtttttcaaggttgcaaatttgagtgattatgcatcgtttgaagggcacacaattaaactggactaaccatttgcatagtttcaattcaagaaaattggtagcaatttgagatcttttaatcttcaattcttgatttgcaatcagtgagttcgacgatatttacaaacactgatatacaactagataatgaacacgtggaaggaggagtttaaaaggctagaacattgtttcctgcccggagatgatatgatcctgacatgcatgtgtttggaggtattgttcaaggcctgattctgtctcattgcccatgatttaatgttgataccatggaaggttcacaaaaagaagcttggtgttagagaactagcaatgcaggctgcgactgccatctctcgtctcctcctggtgcttctcattctcaacctcttgtatgatgtgttctatgttcttggtagagcatagcatggatgatagcttatagtatctgttctcaccttgtgattttgctctttgactgatgtgggtttttattggtagcgagctgaggtatgggcaggtgaggatgtaaagaagtaaactacagtgtggatgtaaagaagccacttccatgagcactcgatgacctaccataatatttgaccaaattcataaatatttgaaaaaaaaatccaaaaagttcggtggagatttgtgttggagttgttccaaattcacttcaagatattggccgggcttctgacgaagcggagcggtatatatgccctttgctagggtttcgtggagacttgattctcttgtaagccgccataggcgtgtaacccaaaactcttgagatagtgagattgttgctggctggtgcccgtggttttttcccctttcgcattaaaggggttttccacgttaaatcgtgtgtctccgctgtgattgtttttcgtttactttgtatttctatacgtcgttcataacaagtggtatcagagctttggttgctgttagggttcatgacgacgtcgatgaagttcgatcttccgctgctgaactacgacacgcggttctcgctaaggcaagtcaagatgcgggggattctggcgcagactcatgactatgatgaggcactggataacttcggcaagaggagggccgagtggactgctgaggagatccgcaaggatcagaaggcgctcgccctaattcagttgcatcttcataatgatattttgcaggagtgtttgatagagaaaacttctgcagaactatggctgaagctggaatcgatctgtatgtccaaggatctaaccagtaagatgcagatgaagatgaagctgttcactctgaagatgaaggaggaggattcggtgatcacccacatggctgaattcaagaagatcgtggccgacctagtgtcgatggaggtgaagtatgatgatgaggacttaggtcttctactgttatgttctttgccaaattcatatgcaaatttccgtgacaccatacttttgagccgtgatgaactaaccctaaaggaagtttatgatgctctccaaaacaaggagaagatgaaaattatggtgcagaatgacgggtcgtcgtcctcaaagggcgaagctttgcatgtgagaggcagaactgaaaacagaacctcaaatgaaaagaactacgataggagaggccgttcaaagtccaagccgcctggtaataaaaagttctgtgtttattgcaagctgaaaaatcataatattgatgagtgcaagaaggtccaggctaaggaaaggaaaaacaaaaaggatggtaaggtctctgttgcttctgctgctgcttctgatgatgattctggtgattgtctggtagtatttgctggttgtgttgctggtcatgatgaatggattcttgattccgcatgttcgtttcatatttgcactaaaagaaattggtttagttcttacaagcctgtgcagaaaggggatgttgtgcggatgggagatgataacccatgtgctatcgtggggattggatcagttcagatcaagactgatgatggcatgacacgcacgctgaaaaatgtgaggtatataccagggatgtccagaaatcttatttcattgagcacgcttgatgcagaaggttacaaatattccggttcagatggcgttctaaaggtatcaaaaggttctcttgtttgtttgaaaggtgatcttaattctgcaaagttatatgtccttagagggtgtactttaactggttctgattccgctgctgctgctgttactaatgatgaacctagtaagactaacctttggcacatgcgtttgggacatatgagtcaccttggtatgacagaattgatgaagagaaacctgctgaagggctgcacttcgagtaagatcaagttttgtgagcattgtattttcggcaagcataaaagggtacagttcaacacttctgttcacaccaccaaaggtactcttgattatgttcatgctgatttatggggtccttctaagaagccctcacttggtggtgctcgttatatgcttacagttattgatgattactctagaaaggtttggccttattttttgaaacataaagatgatacctttactgcttttaagaactggaaagtaatgattgaaaggcaaactgaaaggaaggtaaaattgcttcgtactgataatggtggagaattttgttcgcatgcctttaatgattattgcagacaggaaggcattgttaggcatcacaccataccccatactccacaacagaatggtgtggccgaacgtatgaacaggaccattatatccagggcccgttgtatgctgtctcatgcaaggatgaacaagcgtttctgggctgaagctgcaagtactgcctgttatttgataaacaggtctccttctattccactaaataagaaaactcctattgaggtatggtctggtatgcctgctgattattcacagttaaaagtttttggatgcactgcttatgctcatgttgacaatggaaaattagagcctagagctgttaagtgtcttttccttggttatggttcgggagtcaaaggctataaattgtggaatcctgaaactgggaagacttttatgagcaggagtgttgtattcaatgaatctgtgatgtttactaacagtttgccctcagaacatgttccagaaaaagagttgcagcgtatgcacatgcaggtggagcatgttgatgatgatacaggtgttcaggtggagcctgttcatgagcaggatgaccataataatgatgttgctgatgatgatgctcatgatgatgttcagcaaactcctcctattttgcagctagaggaggaattacctattgctcaacgcaagtcaaaaaggacaacaaaacctcccaaacgtcttattgaagagtgtaatttgtcttactatgctttgagttgtgctgaacaggtggagaatgttcatgagccagcaacctataaagaagctgttcgttgtggtgatagtgagaattggatgtctgctatgcatgaggagatgcagtctcttgagaagaacagtacatgggaggttgtacccttgcctaagaaaaagaagaccatcagttgcaagtggatcttcaagagaaaggagggtttatattcaagcgagcctccaaagtataaggcaaggttagttgctagaggttacagtcaaattccgggtgttgactataatgatgtgttctctccagtggtaaaacacagttcaattcgtactttccttagtattgttgcttcacatgatcttgagcttgagcagttagatgtgaagactgcgtttttgcatggagagcttgaggaggacatatacatggaccaaccggaagggttcatagtgcctggcaaggaaaaatatgtgtgcaagttgaagcgatccttgtatggtttgaaacagtcccctcgtcagtggaacaagaggtttgattcatttatgttgtcacacagttttaaaagatctaaatatgatagctgtgtttacatcaagcatgttaatggatcacctatatatttgctgttatatgttgatgatatgctgattgctgccaagagtaagattgaaatcactaagttaaagaagctgttgagtagtgagtttgatatgaaagatcttggtagtgctaagaaaattcttggtatggaaattagtagagacagaaaatctggtttgctatttcttagtcaacataattatatcaagaaagttcttcagcgtttcaacatgcaaaatgctaaggctgttagtacccctattgcaccccactttaagttgtcagctgctcagtgtcctagtatagatgcagagattgagtacatgtcaagggttccttattctagtgctgttgggtctttgatgtatgccatggtttgctctcgtccagatttgtcatatgctatgagtcttgttagtagatatatgtctaatcctggcaaagaacattggagggcagttcagtggattttcaggtacctcagaggcacaacatattcatgtttgaagtttggaagaactgataagggccttattggatatgtggattctgattatgctgctgatctggacaggcgaagatcacttactggttatgtgtctactattggcacttgtgctgtgagttggagggctactactacagtctgttgttgctttgtctactactgacgcagaatatatggctatttgtgaagcatgcaaagagttgatttggctaaaaggtttgtacgctgagctcagtggagttgaatcttgcataagtttgcattgtgatagtcaaagtgcaatttacctcactaaagatcagatgttccatgagagaactaagcacatagatatcaagtatcattttgtgcgtgatgtgattgaagaaggtaagctgaaggtatgcaagattagtactcatgataatcctgctgatatgatgacaaagcctattcctgttgctaagtttgagttgtgctcaagcttagttggtttaattgaatagtccaagagactattgttggcaccagtggttttctatctttgttgttcaagatgattggttgatttatgatacaagaagaatttgtctcaaggtggagtttgttggagttgttccaaattcacttcaagatattggccgggcttctgacgaagcggagcggaggcccaagccggaggcttgggcctgctagggtttcgtggagacttgattctcttgtaagccgccataggcgtgtaacccaaaactcttgagatagtgagattgttgctggctggtgcccgtggttttttcccctttcgcattaaaggggttttccacgttaaatcgtgtgtctccgctgtgattgtttttcgtttactttgtatttctatacgtcgttcataacaatttgtacttaccggtggggtgcgaaattaccgaaattttgaaccgaagttttaaaccctgccggtgaatatagaaaggatagagttatcaagatctggtctgctagtcacaaagaaagacctgccactatttttctgcacctcgtgcagtgatgagctaactgatgacgggtgtccttcctcaattgaactactccattgtttctgcaacacagatggacagattaatgatgggatcagttctgtgttgaactactccctccgtcctaaaatataaccacttttaaactttgatatagtctccaagatgttactttgaccaataatagctataaaagtaagatgttttaaataaaagagttatacattatgatagtttgtttaatgataaatctagtaacatcaattttacatgagtgatcctttttatttttttttataaatagtgaagtttgaaaatgtttgacttatcactatgttaaaaatacttatattttgggacgaagggagtacaaaggattgcatcatccgatgtgaaaggccacacggtcagatgagatcatgcatgagagggtattcgaggtacaaattaaattaccagcaaatttggtgttagtctataatctgaagggccattactacgctggagatggaccatcgcctgaaatttgaaatactaatatagaagtacagaatacatccgtgcaacttaaccttgatttggtttctgaaaaatccttacaagtggatatcaatcatcacttgtacctggcattgtgttttatagggagccctaagtggatcaccactcaagtcttggtttatacttttatattgttggacgcactaccaatgtcgtgtgtatgagtcaacttataaatatttggcttgtaaacttgagaaggtcaagcaacacaaaacacgtaccagattccctatttctactatatatatatacatatatatacacacatatatgtatatacatatatatatatacatatatatatatatatatagagagagagagagagagacacacacacacatacactcatgttgttacttaaatttgcttcggtgctctgtctggatgcatgctaattgctacagagcatacacgcagtagaaaattggttgtagacctgcattttggatttggaggtgttgggaaagtatagatggcaagacactggagtttcccatccatgtggcttaacaactgcagtgtcccatccattgcattagagttatcacggctggaacgcttcgaaatacatcttcatatcaaata

SEQ ID NO: 6485 - DNA, 24963 bp, Oryza sativa
tcccatccattgcattagagttatcagggctggaacgcttcgaaatacatcttcatatcaaatatcaagaaaccagacccagttattgatgcaccatctggccttgcttccatgagccagataacagtaccgttctaaataactacctaattctaatactctgctggtattaatttgtgtaatcttgtttgtgaaagttacgtatcttctcatgcaaattatgcagagcaagtcagcaagagtagtgttaccgacacagtggttttgatgtgcagggaagttgtgtactataagtggtgtaaaaaatggaataaaaattcacatagcaacaatcctacctctttggctcataaattaaaatgacagatatttttgaagcttcactcaagtaccaactcaacttaaacttctgacagaacaacttccttccaagtacattcagaggcagtggtatgagataatattagattatataaaaaaagcccctcttgtcctatcataaaagtgactcacctttttttgctggaataaccgaaggaggtcattcattgtaattaagattggaacaaaatgttacaagaaaagttttacatcgacagctggactgtcgaggaaggaaatgcgtgtctcaccttccaaccacaacctttttccatatatattcaagacatattgagctataggtcactcagatgatattatacgcaagttggataacgcatataacagaatgagaaggagaagaccgagagtaacataagcacatcgttgcttgagatgaatacacacaattgatctagagtacatgtatgttctgcgcattggaattggaggtatccagaaaatggagatagcgagtggaatccactagcagtatgttcatcatgatctgtccgcgtttgtttttagtgtggcaacaactgtttcctatgaatgtgagaaatcacagttgtttatattttgtaaatcttgcgatatttgtggtatgattactgctgcaatcgtcagtgcgagaatggagaaacaactcacatgattatttatggagtacaaaaatacatgctccaatatggttattggttcatgaccagtcatggatatggtaagatttgcttgatctactggaattttaggattcgaccttgcacctgccaccatagtcaagaatactcaccagaaaatagtttctcagcattaataaaaaactggaggttgggtctatacatgcattgtaattggaatgtaggagatcacaatcaaatacttcacattttatttctttagataaaatgttttacatctccaccttctgtcataagacacatatccataagtctattaaaagaaaacgaaaaaagataaaaagaaatgaaaataagacaagaggtgatgggaaaaaaaacctcaactcctcttattattggcaagcgtttaagcacatagattttttagccaacaattgtaatggaactacaccacccatagaataagacatccttggatacagattccaaaagtatagcactattgtgcatatagtatcctgctctcttgtggtagcatggtatattaaaagttgactcaataggaatacatgatgataacctgcatatggttagacaattgtttacgattaaaaactttgtcattacaacaccgtcaaattgactaacataaaacgctagctccaactagaattttctttatggacccagttatccctctaagccaattaccaaacatatttttggcattatggggtggtgggatattaaatgcaaaaaccacacatctacaaacaaaccacaaaacatgacacccaaaaacatgtttgtctccccctattttccattagtcaggttatctttgttaggattactttcatatgaagaaaccacaaaaaaaccttgatagtagaacctttaggtcccatagattcctcttatggatcataatattagatttcatggacacggtatacttagagttaactggaaattggctattttatgaagcaaccatacaaagtaattcttttcatttgataaagttatattagctagcatgaggatcaaatcattccacccgattagcttttggtaagctgtggctctcctaaaagaaacattcaacaatgttgtgctcaaaacctctgccacggtagactacttctttcgagccacattatataaagtagggtattgatctttgagagcattctcaatcacatgtctttccaaaatcttattttggtcccattagcacatttaaaggatccatacctaagaaaatggttgtttactttgttaaatcagcctagaattgacaaatacttgtattactggacatatcagagagaggcttaccctttaaattataggaacaaacacaaataaccaaacttaccagaggggagatgaatagtagattatgtcaggggaagtcaaataatcaaattttaatagatcaaagcacaccccaatctcaaaatccaatgtaacacatgtccaacacgatctatccaatctactagggtcggtctgactgaggctaggctggtctgaccgcatgacaatgcacacggaacattgatgaatacaatgctttgcccaaatctaaatatattttttttctaacgattagaataagatgtatgcatgtctccataggatagaacactattgccggaattgaaggcaccgggaaattagagttggaaagaagtttgttatactttctgttatcacgaactaaatgccattacaataagaagtccagcttattgcctaaaacatggtgctacatagccctgatttggtttctgaaaaatgcttagaagtggacgtcactgaagttcctgggttgtggtgttctacattaccaatgttcagtgtgtgagtcagcttatatatatattattgggttggcttggcttgtgacctaagtagtgcaaggaattcatatcagattccccatttggaaacactagctactcttgttcttccctcaaataccctttaatttagtcctttgtctagatgcatgctaattatttctagtgatcagcatgcacagtaaaaaattatgtgtaaccctgcatcttggatttggaggcgtccggaaagtgaacatggcaagaagatacacaccatcgtcctgacttgcttgatattccagaaaaggtccattccagaaacgctttgaaacacatgatggagatgaagaaaacaacccagttattgatgcttcaattcgtaaagcttgctagtgtgtataattaatccctgaactatagatcagtcatgtgctaaaaaatttcctaacttacaatatttcagtgcccccctacttttgtgtacctttatttccttatttctagttaatttacttgtgcacactctcttgggttttcatactattaattcggctatcttcttccaaatatgacataataggtgtcctattaatctataaacatcattgtcaaaaaaatatgatgttaatctctctcttttaagaaataaatcagtgcaaacaacaagaggttaatatgataacccatgttctcacagtctgaggactagcaagtgcaacattccagcctgtttgaagtagttatagagttgaggcccatgtggcttagaagtggttgcagtgggtgttgtagctagtaccaccttagaagtttaagttggtaaagatcggcttataagccttggtactctaaccgtgttacttcaggttaaaccctttatacaatgtcagagaaaaaaaatacatgtaaggtactatgtgaatgtagacacaattgtacctctagcaaatacagtgaaaacagcttatttgattctgttgcacagatatttcatttttggtcccttggaaaataatttggatttggaattatttctaatattaattaagtagcaggtatccaagtaatctaaagttcctcatcaaaacatgaagtcaacagttgtgtttatgaggtaaaaaaaatcaaatcaaaattctaagagcaataatgcctgtttgctaccttatctacttatatatttgtagcacccttaatttcatttgcatttatttaaaatcttggcatttaaaattttggagttaatttggatcttgttgatttttgtgccaaagagatctcaaatcctctcctagaaattcccttcaaattctgtgaaaccctagacaaaattaaaattataatccttctcaaaattcaactcaaatcccaaagaaaattgcgaaaagccactgttcatttgggcccttattcctttttcttctcctcgggcccaactccctttcactcttctctcaagaattttgttcgattttagattttttttaatattgacagaaataatctatcggccaaaaaaattgcataaatagaccctgccaccccaatggtgggcggcaagctgacgtggcagacggtgggtcgaccacgccgtctgccgccgtcggccaaaattgcgattaggccctaattgtaattttggccgcccataaagagcttgcggccgtaatttttgcatctgggtcccttgagggcagcaagggacccagatgtaaaaagtacggccaaaagatttttctatgttatgttaataataaataaagaagtatttattggtaaaacttgttaatattgttataaaaatgtattgaagttggttgttgcgcaatttcatatgttaagtgaggtattattttgtactttattcgacgttttagtactcggataattaatatagacctatcgcagtctcggtcgtagaaacattatatggacttaaacaaggagaattatgtaacatgaagaaatagtaggacaatttgaacatgatacaactatttccattgcggttacatagatgatattagattcgaactaggagggaggtagtgcaatagttgaacacaacgacgatgtagtaatgggacaaggaagcatgacagtagaaatttcaatatgccaagttgtccgataatagctaacccctacgtgaggatctctctcctctctcaaactgcgctttagtaaccctgtattgctctggtagttcaagctgcacaacacggctaggtggagttagaacccttctggtgtctatccattctctgtattgacatctccttggtggtttctgggaggaaagaatagatgtaaagcgagcaaagttagtaaatgttgtgagaaaataaggattcatgtaatcaaaatattcttaccatgaaatcgtcgtcaagaatatttggacaaacaaagaaccttcgacccaatgttgtaggatttatggaacgaagaacctgacaacgatcaccacacctgcatcttggacgggcttcccatggagggagtgccgtagttagaacccgccagtcgctctgttgttcatgacattgtcgttcataagccgcttttctctataagtattgctcagtactttcggatgcgaaataccagctaccttcttgtaaacaagtggttaggtcaagaacgggattttctgtatcgacccactcgatgtatgcgcaagccgtagtgcgggtctgccgaatagagtagtgttacgaagaataaagcgattgcccatacggaacgaataagcatatgcagataataaaatacctcacggtcatagttagggcacctaaaaaagcgctttcctcgaatatcaggattcctcgaagccattagttggcatcgatcaccgcataggcagataggacgctggcaccaaggtggtagtaggtatacacaaggatcgctacgccagtttggatcctcaacaccccggcatctagccattgacgaaagccggtaggatttgtaatgaagcaagtgggcaagagagtacggaatgtgactgagttctgaaagattgtgaggcctcactcgttaagacgacttatataggtgcaaaaaattgagtgatacccctgacatgtgaacgtggtggggtatggtgggtacgcctgattggcgccgaaagttacatgcctgatcggcgccgaaagttacattggtcgtacacgccaaatggtgggcaaatactcgtattgcacgcgaataaaggaggctgcatcggtgtggcagaaagtagtcgtgcatgcgccgaaaggtatcgtgcacatataataacaacgtagtcattacacaagcatacagtactggaaagtgaagcaaaaaaacaaagagcagactgctctactggccctgccccgcgccgcgaccacgcttggtcctccgggcctgtgctcgcacgtggtcctgggagtaggtgaaacgatccggtggcacagcacgggtagcacgagtgtctggcggaggagtggcctgcgcctggtcctgcgtctgcaccggcggtgcgcctcccagctgtgaggggccgatgacgtcctctgtcgagcctgaagcgaagtcgaagtcagtgatgtcgaagagcaaggtggaaggcagcaagcggtccgacgaggtcccagcatggtccagtggtggaccctgactcgacgtgccggctgcctgtgacgaagtcccggtgtattgccagaactgcgctgagtgcgaggtcgacgcagctgcctgagacgctgatcctgcagcttgggagaagtgggaggcctgcgtcatagcgaactgggcgaaacctacacatcgacaacggggcccttgtaagctaagacataaaatgcatgtaaattgattgtcaaagtaatgttgtttttttaagtacccgtggggggcacaacagaaggcctagccgaggaaggcggggtgctgaacggtgcacgaaaccctgaagcaatcggcaagtgaaacgactcacatatatgtgcgaggcatgtacagaaaaatccttaaaaatacttacctccgtgcggagggggagtcggcctaggaacgtgcgcagctggacggggaccagtcggtacgggtggccgctgtacagctgcgtctgcccgagcaacgtcgtctgcacgacaggtgagcactcggagaatcgagcgcatcgactccaccatccgcgtgtacgtcgtcaggtgctcctctacgggtaccggaatccccgcgcctaaacgttggatcgtcgttgaaccgtcaacgacgacccggttaatgtcgtcgatctgcatggttaatttgttcgtacatatttgtaaaatttgacgaagagaaagacatgaaacataaaggaatggtgtgatgcagggtactcacagcacgagcgaagtcctggtcgcggtgcctggcgtagaggtctctagtgctcgcaatgtggggctgctgctccaagggagcgaaggtgaccctagtacgggtgtgtggctggtaccagcgtaggtaggcctggtacgcctcctcagtgtgtggctctccctcatggtccatgacctcctcggttgcgagcaaccagtcctcaacaaaagtcgccaacttggcgggccagtcgccagctgacttctgacccttgcgcgagtacctgtgaattaatgtgtaatattagtgtgaatcgacagatgttacaaattattgtgaacaggtagattttaatgcaacaacggaaagcatagtgaaagattttactggtgaacagcagctgggatggtggtcggaaatggtactggaaagggctgacggaagccgaactgccgcatcacgcggaaaggggcgtgaggctcaatgcagatgtcgaagaccatcggaaccgtagtcatccagtacgcctggtccctggtgcagagtgtggacagacccaacggcgcacgagcctgggtagccacggtactgtagggctcccacacgatgtcagtcggcagaaggcggtcgaactccatactcccaaactgcaactcttctatcgctcgcagaatgccagcgtgcctatcttgtatcaggcacacatttggcctcataccaacaacttttgttttaaccaatatcaggaaccagtacagctgtcagtattctcactctcaacaaaagcaaatgccaagggcaatacctgattgttcccatctacccctattgctgttagtatctagccccgatactttcctgtcaagaatgtcccatcaatgcagagaacaggacgatagttcacgaatgccatcttgcatgcatgtagagctaagaacgccctttgcagcacactcttgccaggatgttcaattgaggggaatttcttcactttgtaagagctcccagggtttctttcctcgataacaccaagcaggcgtggcaaattgtcatacgaggcttcgtaagttctaaatctcatctctattattttctgtttggccctccaggccttggcatagctaatagtatacttgtatgtctcctcgatgtgttggattattgaccttggttcatatgtgagattatcgatgacatgcgcatacatctcagatgcaacaaatgcacatgtaatgttcctatggtatttatgaacaccaggtagaaaacatgtatgcttggtaacgactgacactgtccaataatccttccatttccccttatacgcgtgcactctccagggacaaccatctttttccttaacacaccgaactttatattgcgaccggttggacttggcaacccaaaactctctatgaagtgacactgcaaaatgttttactgcctccttcatatcttctgctctactataaatcgctccctgaataacctcattttttttactcccatctcacactatcctcttcagagacgatcagcccagaaaaatcctcactagcccattatgctggattaatatccgtctcatcatttgacgaatcatcttcctctacacgctcgttgtcagaatcctccctctccatttcatccacaatggcaccgacagtctccccctcgtcggccactccacctggttgaatgcccattggagctactacgcccccgtcctctcgtgcgttgacctcctccacagaagtctcatttacttcagcacttggtccctcgccatcatccatgttcatttgcacacctggatccttcgggtgaacaaacggaaccaaagctagaggccacccgcgttgcaatgcattttccaaataccatctccacactcgagagttttgaactggcattagttcccaataaaaaccctcagttgcccgacttactataacattgattgttatgtcacttgtctgtggatcaactcttaagcccctcattaaccatccttttatagaaagtacactcctctcagccggtctatcaattcccctttctgatacaataaattctgacagatctaccccagttggcccgtaacggacgtttcctggtccatggtaaacttggaatatttgtttgttcgacatatctgtcaatgaattaactagatcatattactctttcatgcaataaacatctataatgtaatatcttcttgtgtaagccaatgcaacggtaatgtattgattccaaactagcagatctacgtagttaccgatatatacaatacacacttctagattagtacaactaaaaccctaaaaatataatgcatttattcaaacaaatttttaaaaaatacacactatttaactcaatagtcacatataggatctatgaatattacctgaaatcggtgtctgaatccggcagggcttcgccccttcttctcttctcctcccctctcttctttttttttcactggatttgagggggggaggaatgagggctgggggctgggcggcaggccttttataggcagcgaggcctgccgctcggccagagggcggcaaggggccgcctgtaaaatggccggccccgactggcttttttgcattcgggccccttgccgccccaccagagggcggcaagggttttcctgcaaaaaaccctccctctgtcaccgcccgttcctcccccgtttgccacgtcagcttgccgccccagaggtgggcggcagggtctatttttgtaattttttaggccgatagattatttctgtaaatattttttaaaaaaaatctaaaaaggaaaaaaaattccttctctcaacccctcctctgttctcctccctgagcaggccggcccagcccagcccaactcctattcatcatcttcctcttcaggccagccagccacgtgcacacaaggtgttcggcgaaatgtctcgcccggacgccgcaccatcccgcatcgtgtccgagccacattgcatcgagccgaggccgcgctgcgccaaaaccgcgtcgcgccaagccgccctcgccccggtttccctctgggaaacatggagaagtcccgtcgccgtccatccatcaaatcgccatcccgtcgcctgtcgcgtcgacactaacggataacggccaccacctcacccttcgtcacctctaaccctaggtcgagtcatcctcggtttacacttatccattcgcccttgctttgtgacaaaggagcttagccgctaagccacgtctctctctcgctcgccaccgcgtcgccgcctataaaaggggaagcagcccgagctccttctccccacaccatcacaatcccaacccatctctctctcctctcccattctccagtttttgctctctgtgccaccaaccagcgcccccgggcctcgcctcccagtgccgccgtcgccggcggagctccgccgggcctcgcctcccaacgccgctgctgccgctgcacacagcaagagagggagagcgagagagaagtggagaagtggagaaagggagagagagaaccaggcttctgaagaataacctatgtaccaagccaatgaaaagctaaagaaataacccgtaaggaagaagagctttttcttttgtcaaaacaccatatcgttcatgcgaagccataacaaccaataaatagtgcccgcccctaataggataagcgactttaagtatttcctaattccccgtagccaattaccgaatatatgtgatacaccatgaggtaggaagagccatgtagccacttgaatataccacacacgacgggcaaattggcacacacagaacaaatgtaatttttcctcatctttgtgacaacaacaacatttcttacttccatgccaatttcgcttggcatggttatcccttcacataacccttaggatgcaaatatcataataagaagatcctgtctttaaaggtaattttaacttccaaagtactttttttatattgggcatatctaaatgtaccaaggcaagataatgcaactttaatgaaaactctccattctgggttcatgaattatcattgatgtgctatgctttggttggtgcacctgcctccgtagttaagattcctttacaaacaatactttttctttattaattgagcaatgtaggttagaatctaatgcgtatgtagataatgttactacttattatagttgtgtgtgcgatgtgattccttcttctatcaacactacttctgacagtacgagttaaactagaagtcccacttgttaattatttgaatgtacaagtccacgtctgacattgatttaatggataattttaccatccttataaatgtactacaaggtaacacatttttttaacgtaaaattagtgctacctcatggtaccaaaatttttaatgtaaatttaggtatcttgaggtacttttttaagaactataatttttttcttaatttaatactatacacttttatgtagctagcgtgagctgttactgtcagatgaatattcttgaagggtatttgagctcactagtcattaatatacgtctcacaaattgtgaagtttcaaatttggagatcagctcaaatatcttttggtttgctttttatttttgcaatatataggaactgaagtttaagaagacgtctcttatttctcaacactgaacaggtcacaaacttgcgcaatgcggcagcaggatataactattgtgtcaatccatcttgggcagaaagagattcacccaaagaactctgtgctttctttctttagtcacatctctcacaaagtatatatatgtggagacatgtgactaaagaaagaaaacatggagctcttgaggtctgaatcacagttaagatatgtgtaagacaaattgcaaataaattcagttccctcccaaaatatgtgtaataattatacatttctacatttggatggaattatattgaatagtcatgtaattgacttggttctagagcacaacacaatggccataaactgtctctaatacctggttttgtataggggctaagagcaagtttaatagtatatcccactactagctccaattcatctatagccaatctaatagccaactcatacaatagttgcttactatattattaatatatggtcccacctatcctatacatactacgtcttggagtccgtgctgcagctggctacagatctgtagcccgcttcttttctctttcatcttttatctcattaaaatatgtttatagttggctaatagtctgctaatgtacctgctctaatgagtggattaggatggttccaggggtaaaatatacttcatttgaagactatatatatacacatatatatagtcaatgctgtagtatttgccacattgccaatgctgcatgtattgacgaggaattttaccgtacatgagaaagtatcttgaggtacttaaattttaaattaattttttttactagaaaatataataccactaggtaactttttaaggattctaataaaattaccctatattggtatgcgagtgttataaaagggccatttggccaacaaagattcagaaatgcaatttcaatgtatgtagctgccattcctgttgttccccaaatttgcttcagttaggtctagcttctcaacaaagtgcacttgttgtttgcttgcttggggtgtaaaagattgtgtgtaggccagcagcatgctggattgggaggtgccgagaaagtcgagacagcaaccatctgcagttttcggagtatgattgaataccatacagtgatttatcctgctttaaagcacagtttcttctgaacaggacgatagacctagatgtatggttattcatgaaggatcatgcatgctacgttgggattgcaaggctctaaggacaggaagtcatttgtgttaattaggtgcaattaatgactgcagaagtggctaatttgacagtcctaaattcatccttgttgcactgctgaagttcacatctctaatccaagatgtcctatgttcgtgttccacttggatatattgcagagtttatcgtctagtccctgttaatctgttatttaggcgtgtaattttcatgcaaaagaaaagggattatactcagaggtacatcctcttttgtcacaaaattgtccatataccaaccaaagtatgtgagttgctatacaacaatgaacaaattgatttttaccagtgtgtcagttgattcctaacaatttgtgccccaacatcctttccacccacctttctcattctggactttcaaaccaggaaaaataatatagtgtaaaccatatatgtagtaaaaacctaaaaattactattgaatcgatggatgtatgagattcgtccatgtccatttttcaatgatgatgtggacgaatcttagacatccatttttcgatccaatgatagtattcaggttttcactacatttgtattagtttctaccatgtattttccctacataccatgcatgcaacctattgattgcaacagcagtaaatagatactccctccgtcctaaaatattacaacttttagccctcaacatttgtctcaaaatatagcaacttctccaccaacattctctttacaaccaatcacaaccctccaccattcatttttctcacctacctccactaattaaccaatcacacaattctccatcatgcacttctacctactttcttaattaacatgtccaactctaaaaaagcttatattctgggacggaggtagggcagtgttttactgttttggcacattaacaatgttgcgtgtgaagtgtacgtatatatatgctagcttgtgagcttactggtattcttgttccttccaaagtttcccacatgaactctacaagcaatagaaaaaaataaatatgcttcaggcgctcctattaattaatttgcttctccacgatgtgtaattgctctatagggatatgagtattaatttgtttgtaatggaagaatgtattactttgattattggatttggaggtattgggaaaatggagatggcagcgattcctcactctgctatatatgcttaagtaacaggagcaagcttttgcatttgattgagcacagaacatctgggatcaaccagcttttatatatttgttttgacttgagtaatcttccgaagatgaaaatgttatacatgaaggttggttatgcatcaccagtggcctggttgtgcaatcccaaatttttagttttctataataagtagatatgtaagcacagctgccattgttgcatgctaattaatggccgcaggatttagcaacctagatcgatgcattattaagcacttttagtgcaaaacccaaatgattgcaatttgtttttaggaattctccaagaaacaactcaaactacattattatatatgacaactttagcatatattcacatcagtaggcttgaaaagtttggcacacatagctcccgtacctactatctcccttctcagtcttcacattgtacttgcaaaaaatcacaatgcaatgcaatctccaccaaacaggcgcttgtgctagggtttaaattcctcgatgcattgctgagtggctcggtggttgcgtgcattggttgagctgatcgagttggggcgcttgagataggcccctcagtggttggccaagagcatcgcatggcaacatcaagtcatgcgaagtactagtcagcaaagaactacgaggccaggatatttctagttcttcgtgacgtctaacgcaaggaaaaaaatgaaggcctcccctgctctcccccactgaaatgcatgtgtagcacagatatggtggtgaaacttaattagcaatagtttcaacaagtgattgaaattaagctcgttgtagtaatatatggtgatatggcctacactatgctcagttataggtatgataattgagaagcagtgagattaggtgccactaacaagaaccaaccctgaattgctgacctgcatgccaatagagacatactccctccgtcccatataaaatgaatctaggattggatgtaacatatcctagtactaattcgtagtccgagaatttttcacatccgatactatgttggttttttatggaatggagagagtatgactaaatttcactgacctgcagcaacaaggcaccgatcattgagttgttcctggatcagggtatgaaccatattctagatgccccagcactgggcctggtggcctaccctaccatatgaagccctctgcctctgggtgcacctatatatatgttggatatgagttgtgaataagagttgacaagggttaatccagttcctttcaaggttttcccatcactctaaaattattgatccctgtccataggtaattaattaccaacttgttgctcgctaataatccgcttgaatatagttgagcactagttattttgcttcagttcaccttctaactaggatgttcgatgctgcagagagtatatatacatgtcgtgattgggttggaacaactatgtttgcgtgagtacttttgcttatcggaattggaggcactaggaaaatggagatggaatggaggtccttctccatccaatgatcacgagccttcggtactacagtgctatcagatattgtgcactatggataacctcatagtcgcagattcacctcccgggtaacacgggcagctgcctaggcttcattgcaaagttcgctggcacataacactaattcttcgctgcgatggattaattctggggcaagatttgcatgtgagagttgaatacggaaaacatgcaggatttgtatatagtgttaagtttagcatgtgggccttggtcctcggctgcctatggcctctgcctgcctcattgtaaaaagaaaaatatattagtgtggtatatgttttcactcaaattaagcaacgtactcgatgttttatcttttctttcgtccataaatatttacatgcatttttaaccatgttttgtataaagcttttttattgacaactttgattacaatatattaaaatatgtatgaacatgttttagtatagtagttaagttaggccagcccagccttcatagagctcttggttcttccactccctcacattgggtgtttgcgtaggaattgcataaatcaacaagttagaggcagtcatggaagcaacttagaagtaccaaggaggacaaatgttgtccctgtagcagtgtagccacacccattgccaactttgaactggaagaagaaaataccatagatccataaacgattgtttttcctttaaatttttgcctttcctctgttttcaacagactgcaaaaagatagcaattggagatcactggtggataaatgctttttactcctggttggtaacccctatagtcccggttttccaaccgggagtaagaatccgggagtcccggttcaaatacaatctttagtcccctaaagtttttttttctttttttttgctattttgtatatctcacgcccattatctcaaatcaatcacaggaatatagttcatcccaaatcattcacaccaacatagttcattctcaaaatcgttcacacaacaaacacagatcgaatcacacaacaacacagatcgaatcaacaaagatcgaatcacacattaaggaaaaaagaaaaaaaaaatcccggcaggcacaccggcctccattgcctgccgccgcaccggcctccgcgccggccgccgccgggtgtggccctccgtgcaaggccatagccgctgccgcccggccgcttcccctctcggatctggcggcggccggctgcctccccacccagatccgccatgcgaggccacctccgccgccgcacgaggccaccgcccagccgcctgagaatagggaggagaggggaagggggcagatccggaggaggaagaggaagatgggtgagtgaggagaggagaggaggaagagataagggtgagggaggaggagatagaacttatcccgtgcgcctcctcctttcgcctcgatctcgcgcgcatgcttcgttctcaccaaccgggactttttctagtccaccaactgggagtaaagataatagaggggtctgacacagcctgccgtttttttaaccgggactaaaaataatctttagtcctggactaaagatcaaaaaacagctttaaccttttgaaccgggactaaagattatctttagtcccggtttttattgcaaccgggactatcgtttgaatttggtcgaccgaccaaagatggtttctccagtactaaatactgcattgtacatcatgatgctcaaatgagataaatagagcatgaccagagaaactttttttttgtttgttcttggccagaaaggttaaaacacttcgctattttcagttgctacacattagtattgcaagaaaaaaaaggatggccataactacaccactgatgtctgacacgattgtgctgtgacacgaaatttaatcaaatcacacatcttggttttgctgaaatctatctatggaattgcaaattctgccaataaaattaaaatgttcatacgagcacacacagtagaggggaaaaaaaacatctatcatgcccttaattttgcagacctaaggaatcctccattggttgttgttgtatgcagaacattttagccattatctccatttctcaacctttagatctacagcttctgactgtcatgcggcaagacgaacaagctaaaatccgagcactatatttggcttccaccatcatgctcaatgcatacataaataacaaattcgaagctacacacgaggagatgtcattgacttcgtgtgcacttcgaatttgtgtttcaaaattactcagtccgtcccttcatatggatcaatggctgctgcagcatttgggctcaaagaattcaacctggagaatgagatcatgatgcatctgggtgtggaggtggtgcagctagagtacgttttcccgatgccactcatgcatatattctaagcccggctgcaacttatattaccgtgtgctgctctctaggctatagcatatgtgtatgtgcatttgccatatgttacagtcttgtagagttggttggctgcaccctctcacatatatatatcctctcttctagttaattttatgatttctggaattgaatctggtgctccttttctttatagtacagaattggtccaattggacaagcaacttctttggcgaagtactgtatttgtactcgctcaggcccaatatgtatttggaccaccatctaatctgtttcgtactaattaatgtgtatcgatctcagtagataaatgcaaggactccacatgcgatggccaatggtacagaaatattgattttttttttaatttttcggtggtctttgttctgtcggcgatttctgacggtgcacttacaggaatttattttttctgacagtaaaattaatttttctgacggtaaagccaaattttctgatggttttgctcctagagggttgattaagtctggtagtgagaacatggtctggactccatccaaacgtgagataccaagcgtcgggcgacaaggggcagcacacccacaattatagtgcctaaacacggtgttacataaccctgatttgatttctgaaaaaaaatcttaaaagtcgatattcactgaagttctttggttagatgtccccactacccacattaatattaccaatgttatgtgtgtagagtaagcttatatatcttgtgacatgagaaaggcaaggaacacaatacatatcagtttcgtcccatttggaaacactagctactcttgttttttccttaaatttccttcagtcctttgtctggatgcatactgattgctattgaacatagacacagtagaaaaactgtatgtatcccagtagaaaaacaaagatgacatgaagatagcgagaaacatagacagaagagaactgtgtatagctctgtatgttggatttggaggcatcggtaaaatgaagatggtaacaagctgcagttacccatcgatgtgagttactgatcttgcatccactaccagaatgggagtctctcccgagtgggagtaaaaggttacggtgtgcttgatctggcactgagtaaaaacggagtgtttcctagagacactaggtaaccaatcttgttatgtagtgttcattctaaacactatatatgtaatgttaggagattacagagtgcctatcaattacgcccaggaatttgggcccgatgtccatcagtcgaacaattttttttggcgtgaaagggaatgcatttagacgcccacatattgatgcatggtggcgcgaatgctatttagtcgttcgttactgtgtgttttggtgtacacacccggtaagtataagagaaaatccctttatacccctgggattttagctaatttctttcatgcccctgaattttgcttacttccttgtaccccaaaatttgattatgatcccttccatatacctcccatcagttgaccaacgaattgctataaaaatgatcattttacattttggatgaacatataaatttatgaattatattattgaaaatgctaaagtttgtcacacgagactactatagttatgagtttgttgtgcgatgcattatttacgacaaaatttatttttagataatgagataaaaatatgtatttattgctgtgcgatacactctggtgcccccttctcgtcctccactcatccccggcaatctgttactctgccatttttgcacgcagttgcttcaagagttgcccccgatctattcctggcggcggctgtgcgtgaccgataaatgacaattatatatatcactcggaaaatatttaatacccccatatttcaactactattaaatgtattaaatgaggtggtagaagaaataaatctggactctaaacccattcaaatgaaatctcacctgttcaaaatgctttttgtactaccagtagagagcaccaaagtaggatttccgtaaatatattgccatttgtgtgttataaaaagggaaacaaagatgcaaaatgcaatttcaatctacgtaattgctactctcctgtggtgttccatgaatttgttcagcttgaatatattggcatgcgtgtgcactagtagcttgcttgtttgggaatgtaaaacattttgtgcatgcctagatgttggaatggaaggtgtcaagatagtcgagatagcaaccatcgggagttctccagcatccagaatatgatgcactacaagcgagctatctgctgctttaaaacaaaatgcttgttgcactttgctagagacctaaatgattgttgcagatgctagatcgtgcatatgctaggctggttcttcattgggcaagttctatgtgtgtacaggaagttattctcgtgttaggtgtaaatgacagcagaagtggctctaatcttacctttcatcctttgttgcactgtggaagttctcatcactgatccaagaagtgttgtgcatgtgctttacttgttccagttggatattatagagatatttaaagggttaatgtgcaatttaggtggttagagcaacaaaggggttatatccaattggtacatcctctttgttttgtcagaaaaatgtccaccataccaatcacagtgtgtgattttctacaattaacacaataattggtaaaatgtgttagttgttataattcttgttactttgttataacacatcgcaatatcactaatcttgaatcagctcatgtattcttaaccatttgttccccaacatcctctccacccacctgttgattgtaataataccaggaaatagttacaatatatggctcgttaacaatgttgtgtatgtcaaatgcactttgatcaatagatctgcataactagcataactgcagatcaaaccatactaatgcctattcttgttctttcaaaagttcccacatgaagtctacaagattgatccgtaaagtcattggctttcttcctgccaagcaatagaaaaaatatgcatatttgcatgtaatggaagaatttatatatttgcttataggaatcggaggtattcggaaaatggagatggcaaattgttgtgaggaatttatagctttgctatgcctgaggaataggtgcattgttatgcattccatcaaatagaacatctgggaccaaccagcttttatttgttttgaaattgaccaatcttctgaagatgaaaatattatggagtttggttttgcatcaccatgactttttggacagtgcagtagcccacttgtgcaatccctcaggataatatgaaaaaccgtcagagacaaacatctagttgagtgctaatgactgaaatgttcagtttctgtaaatagaatagatatgtattcgtgtctgcctggttgcgtcacatagatctgatgtatggtaatgaccaaattttttttatatattttctcgttgtatgcatgactccacgattaaactagcaacctggatcaactgttttttcatggcagtcttatagaagcacttttagcgtacataaaaccccaatcattacagtaatttgttttagggaactcttaagaaacccatgtgtatgtaacatactcaattttagcatgtaacctcctgtacctactcatctcccactctcactcttagcactgtacatgcaaaaatgcagtgcaaactgcagtaagtacattggtacaactgataaccgacgctagtaaaaattgtgactgatgtgtacatgtctcaatatctatcgcataataaaatggatcaatgggtttaaattttcccaaaagaatataagaggtggttaagggtaggattgggtgaaaattaaatgagcggtggttgcatgtgacttctccaacccgacatgctactcacttaatggatggtgtcattgtatttttccttcctaaaatctcttatatatatttgggacagaggtagtatatgtcccaaaagggcaatacataggccagctacttgtgttgttacccaaatttgcttcagtgtcctctatctggatgcaggctaatcgccttctatcaggagagcatagacaatagagaactgcgtgtagcactgcatattggattcggaggcgtcggtaaaaacgagatggtaacaacctgcagttacccatcgatgcaagtaccttgatcttgcatccgagttcactgctgaaatactttgaagcacatccggaacagaagattagattgctgtttatgatgctttgatgcttcatcaagtacggcatctctctctttctgttaccgacataagatgtcactttcaaactgctaaactgctaaacaaaagatgttacagacacttattacagtgacaaatattaaagggtagtggttgtaaaattatgtcgtcactcactttcttttgccgacaaaagacaatgaatttagacatattctcttgaaaatttgaatttcagttctttttttcaacttcacaagatgtgtttgagaaaagaaaaacatggaaagtctgataaccgtgtgattacctttgcatttgtcaaccttgctgaggactagtaagggtgtccatctctttatataggtaacgcgttcgctcctatacttttttttttttgtaaaatcacctatctcatttgtaaattatgaaaggtcaaaatttacaaaagagtagatagattgatgtgcacagcaatattatgccactattgacagaaaagtcgattcaaattttcagatagtaataatgtatattgatatgcatgaagcttcaacttgaacttatgaggaaacaacttctttccaagaacaaatacacaatcaggggcacaaagccctgctgttctgtcataaaaatttcaactctcaagcactacttctaaatttccataaaaaattcacctctcaagcacaacttctaaatttccagatatattgaagaggcttgtttcatattgaggacgtattgcctcagaagtacaggagttgtacacaatcagaacgggagaaatgatactaacttaatcacatcatctttgtttcagacattgctctagggacaagcttccaatcatcaatagctagatatgagtagacaagtatacttgattttgataggatgagtgaataagtattggaattggaggtattgggaaaatagagatagcgaatggccacttgatgactcggtgagtttttcaagtggaagcttcacaattctctcttctaacctttcctaatacatatacaagcatatggggagatggaccttgtggggtttaacacacatgttggtgatcatgatcatcactagttgattcattaagattaataaataaacaactcaattttgtcatctctacatgaaatgggacggattccctaaaagcaacatccatactgacaaatgttcatcattctgaacaaatggccagatgaattgcctgtaagtgcactttacagttcgaggatctagttttccaacacaggatttattatctctaacaaaaaaagtacgactaaacacttttggtagaatgataaattcattcttcccaaataaaatatggtgtcttcatcccaaggattcttgaatgtgtgtgattgaatacacaatcaaactagaatgaaactgtacctaaatacctttttctagttagaaaataataaatcgataaggaatttagttaatgccgcaaaatatacttctctctttgaagactatacatatagcaccacacacacaaacacatcgcacacacacatcaacatatgtgttatcctttaacacacactcaatagacagatgcaaatgataaatctccgacattagtaatttctactgaatgcgtgtccgatgtgcaaaaattgtgcccaatgtcgacataactagtagataaagtcatacatcacaactccagcacagcaccaaaggtgcttcctcgagcaagcttgtaatccgtttataattgcctgggtgttaaaaatgataacgaagattcagaaagtgcgatttaaaactgcatacttgccactcttttttgttccaacttgttccccaaatttggttcggttctctggattctttaagaagagaaagtaccatctagggttcagtcagcgatggcgtgattggatctccctcattcttagcgcctcctcttcccgggtgctgatcaatggggtgccgggtccgcgcttccatcaccggaggggtcttcggcaaggagaccctctttctcctatgcttttcattctagtcatggaagtgctcaatgcgatgcttcgtaaagcctctgattcaggcgggttccttccgcttaatgatcgcgctttgcgacaccgcgcctccctctacattgatgacttggtcctcttcctctccccggttcagcaggatctcgagttcatccaggttattctctcggtctttggtgcggcatccgggttgcgcaccaattttgccaaatgctcgattacactcctatccgctactcggatgaggacttggagctggttcactcttgcttcccctgctcaatttctgattttccttgcacctacctcggcattccgctgtccattcgcaagttgccgaaggcgactcttcagccgctggtggacagggtcgctcatcgcctaccaccttggaaggggcgtctcaccactcttgctagccgctccgtgctggt

SEQ ID NO: 6486 - DNA, 29045 bp, Oryza sativa
  unsure (1)..(29045): unsure at all n locations
ctagcatgtgatctgttgggcccacaccttaggtggcctgtaccccaataattcagaaatttatcctctttgtcagatttaacttgccctccttaaggtgcatggcccatttccagtagaagcagtagtaaggcctggtttagctcaaaaaacatcacatcgcctgcatgtcgactctataggatccccgcattaaacatagataaaaacaaaaactaattgcacagtttgtatagaaatctcgagacgagtcttttgagcctaattagtccatgattatccataagtactacagtaacccacatgtgctaatgacgacttaattaggctcaaaagattagtctcgcggtttctaggtgagttatgaaattagttttttcattcgtgtccgaaaaccccttccgacattcagtcaaatattcgatgtgacacctaaaaattttattttcacgaactaaacaaggcctaagatgaatcagttcattattatctggaactcgtcaccatttcaccaaatgatattttctcttttctttatatttacgcctagtcgggtctgcgccggcagcaccgcaatgcaaccgaatagactaatatatttctaagacagaacaatactcactctaacccaaaatataaggaattttatgtggatatgacacatcccagtataataaatctggacacgtcacaataaaataaatatggacatgtgtccagattcatcgtactagggtgacgtgtccagattcattgtactggtatatgtcacgtccatccaaaattccttatattttaaaaccgaggaagcatgtgatatagctatacatcatacatccatacaaaatttcactgtcgcgctttatgtaatttaataatgcgagcatgagattgatgatttaattttatactagcaattgattatgcttgctttactggttttagacgcattaagctgatcagtgtgtttttttccggtaggttatgggacattaatttgtgaagttaaaagttatgtaaagtttgtgctgtttttatcctcacaaaccaaattaaggcacgaacttaactttgaaactgaaaagttaatttcagtacgggattctgaacgtactccccacatcccataatataagcatctttagcatagtgtcaggtcaaccattttaaactttaaccattaatagcaagaaaataaaaaaaatacttatattcttgttatttaaaacattttatttttatagatattgttggtcaaagtagcatcttaaagaccgtgtcaaagtcaaaaagaatacttatattctaggatggagggagtaagtaaaatagaaaagaggtaaatataccaaagattaaaaaagagagagggtaggcagttaggcacaatgtcacatcgcctaatgtcattatatgcagacatgcatgcattatatgatggagctgatcgataccgtttgatgccaggtagaagcatattcgtgaaaatcgcatgtgttggagttgataccgtttgatgccaggtaggtactggtgtctgaatcaaaaatagtattaacagattagtacttttacgtttatcacgactagtaatatcgttttataccattgcaaattatcagtaataaaaacgatttagactacttacttacgggtcctattacccctgggaaaaaaccttgtaattaaattgtactattgtattatatataaaattgaggtggtaggataattaaaagacgaaaacggtagactgattgcactaccgatagagaaaactaaaattgcctcaacagataagatcaacatgttataaaactagcaccgaaatcaacgttgataaccgagcacgaaaaaagactatagaagttgcaaatataatgacgataccgagccacaatatttattaataaaatttagccaaaacctatatctataggacactaattacgaatatatttttccgatccagcatattacatgaatatccgggtataacgaccctcggccggtgtggctctatttaagtgagagccatggctaaattcaactctactactatcctaaattcctaatacatattacaaactttaagttttaattaatttgtaaccgattatgtaagcatatccgactaaactctaacattctgcatagaactaagacgaacaatatcacatccacccaaaatattatcacaaaattccacggagatttcggaggaaataaaggtctagaatataaataaatatccaagtattccatgcatctcaattaaactgtacttaattaatttctttgctgcgcctgacgatccgtcggccctgtgctacatcccccagttcgcatgccacatgtgctgactgcatgagtccagctattgctgcttggactgtactccttcgtcagaaaaaaaaattaatataggaggagatgtgatttctcctaatacaaatctggacaaaaggatcgcattcccttagagcaagtttaatagtatagccaactgttagctccaaaacaactatagctaatctaatagcccattcatacaagtaggaaggtggcccgcgcgtatgcgcgagcacttatattattgaaaggtaagatttttattgtttgttaaaaaaaattatctcatagattaagggcaaactaaagttcgcatactgttattttgtaataatttaagggttctattttttgttaaggtatcttaaaaatccattcagagtgggagatggattaagtacttacgacttttgaatcatgtttttttctgagtaaatagattaaatcgtctcataaaggtgcatgatatagtaagaaagggaggggagcatattcatggagaaaaagaataaagggaaaaataaaaaaaaggaggggaagcgtaggtacccacgtacgtaggtgcgtactaaaggtggagaggtgggaccttgtagtatttagtttgttctaagatcaatttaatctaatggtttataatattggacccaacgattcaagtgaaaatcaagtaatagatactttgcttttttttagaatttctaatattttctctaatttattagagcaccatgtggcatcttgagggcattttaagaaattttaatgggcttaccacatataattagaatattaagatgtaatatatatgtatgggatgtatgttaatattcgttctagtttcgtccatgtttatatacacgtagagaaaaattaaatatgttgctagcaagccattagatgtttaattaatagcaattaattttgatacctatttacaattggtcatagtagttcttacagattcatcttacgactttgattatgcgttgatcaccaatttacttatcaccatgactcgcacgaaaaaatatgtactttaggggttaggacaactgaaattgatgaattatctaatttatgtgatagctatttgagattataaacgaatgaattgacttctaaaaagttaaaaagttgtttaagaaaagcaccatttagtaacatggaaagcgtggagcgtgcaaacgaaaattcaaaagatggaatcagggaaaaatagggccttaaactcccttataacactcttatcctatcaagagttctattgatattcgttaatattgtgctcacaattataacataataatttctttcaaccatacgaacaaataatacaaaatccaaatacaacataacacaatacattataattattatttaatcaactctcgatttcagcttaaacagagttaagtgttccacggtacttaattcttctctcgctgcatcaaatctttaattttcttttcatgctattaacaacagcggtagcgctgcagtggttgtgatcacccaagatgtctcaaacacgacactttatcatatgtgtgaaaggcaaaggtgcagacgtgcattgtgcagtgtgccaaaaagagaactttagacattattaacaatagatccgatgatttaaataatgggtccaccggttttagtgtaaatataaattagttaatatatatgttttaaattgttaatttaatgggtacacaacataatggtgatggtgtagattttattttaaaacactaaattattcgagaataatagtccaaagtaattaaaaaaatagatccgatgatttaaataatgggtctatctgtttaattacacatatatattagttaatatagatcttaaattgtttatttgatagttacacaatataatattgtgtaagctttattttaatatattgcattatatgaaaataatagtacaaagtaaattatcttacattattgattttagagctaatttacatataatatggtgtaaattttattttcaaagtctgtatagctaatttagttacctgtgtttataaagagttatacgatggtattttcctttttaaaaaattatgattatttaaacaaatatatatcaaattgtataaatggaaaaaagaagaaaaaaaaggagaaaaatggagggaggcgtacgtactacaggcccacgtgacctacacctatgcacgcgcgagaaataggagaggtgggacccatattatttggtttgttttaagatcaattttatctaacggtgtataatattggacacaccaatttaagtgaaaatcaaggggtggatgttttgtttttttcttaaaatttctaggattttctctaatttattagaacgccacgtggcagcttgaggcatgtctagattcgtagtcctaggatgggtctcatcccatcctaggttgtaacattatgggacggagggagtaatagttagatagataattaactataaaaatatactacaccattaatacccgatccatctctcatacacacataacgtcttggagtccgtgttgcagccggctacaatctgtagcctgctttattctctctcttctcttttcttctcggtatgtggttatagctggcttatagcttgctattgtacctgcttttataggttgggttttttaagatggagggagtggtatttataccattcattatcatcattcatcatctcgctcctgaatattatacctagggactcgtgcagctaaccatatgcatgttcatgatttcatgatttcgatttgaggcaggcatgcatgcagcatttgtataatctctggcaagtacctactcatggagaaaaataaaactacaagccaaaataacagatcaactacttgtgagggttcacaatctcactcgataccagatcaaattaaatctctgttcactagcggtatcattgaatttcgcggaatccgtcgatagtctaacaaaacttgataactcgaatgaattttttttaataactttgaattcggttccattttttaacttaacttaaagatcaagtgatttgtatttttagccgagtccgaaaagtcgagatcggtttccgctggaattctaaaaccctgctacttgccaacttggtgccaagtgtcatacatgcatacccatgtcccttggaaatgcagtgatttcagacacgaagatttggataattaattaatgcagggatgggcctagcttcgtcgttcagatatactccaattcggtatggttatctgcacgagtttatttaatagttttcccatagtccaatcgtttggccgtaatctgtcttacgtgctatttgcgagtacacacgagttgaacaatctgaccatattttctatagtttagttcgtttcaaaacttataattataactaaatgcagggccaaagaccaacataaaattttgctgaagtcctgtttgaaatactttgattttgtgggaattttgcaagaaataatttaatcccagcgaaattcctctaaaacccttacgactcctttggaatatatggaggatactcttagggaaaacctataaaaaatttacgttcgaaatgagcaataaattaacggaattgctacatcacattcaacgaatttgcttttcgattcatactccagcaaccccaactcctcctctaactccagttgaagtatgagagttaaggtataaggccccgggtttgaatggggcgggggcaatcatacttagagggatcaccgtgaaaaaatagtagtccactagtatgtaataaatacagtcgaccgctatcatatcagcagtgacatggccgtggatggaggagggtggttggctggcattggtagcaaggataaattggcgcttgtggttaatttaaagacggcgatcagtgatgatggatccggtgacgggagctgtcggagacaaggaattaattaattaatcaccaaagtaattaagctagtttacagatccatcaaatgatcaactagttaggctgtatgcctgggtttgtgcacacacgtagctagatgggagattccgggcgatgtgcgtacgtgtagctaccagcacacacacacatgcgtctaccttagaattgactatagaagaacagacatggatgagttgcaacgtcgtcgtcaaaacggtggtgtctggccggacggaaggagcgagacgaagatgaaaccagtaacctgcctggccatgcgtcgccgtcgccattattattcaagtcttggagctttgctaaagatacaacaattttgagctatgtccagatacatagctaaaaggttagtaatatatttttgaaacgaaagtaggtactctatctatctaaaaaaaatgtactagatatgacatatactagtacaacgaatcttgatagaaatctgtctaaattcgttataatagaatatgtcaatacagttctatatttgttttttgggacagagggagtatgtatatatatttagaggagcttaagaagcaacaagtgagaagtcagttagtgagaatatataaaaaaggtttcttaagttctggtttctaatttattttctaaattctatatataactataaattttcaaaattcagatgacaacctaaactgtttggaagaacttctgacaaattatgtaagaaattgtagaaatgagaagcactccaaacacgatgatagtgaccaggcgatatgtatatgtatgtgtatgtgtatatatatatatatatatatatatatatatatatatatatatatatatatatatatatatatatatatatatatatatgatttgcttggaattgtttaagcaattctcgtaatcgtcggccccttgccaattgattctgacttgttttatcgagagcagaggcgaattatgtaaaggcttgtaactctgcgaattgagctaattccaattttgatttgccagctacttgtttcatggctttaatttgagccgcggatcctactctgaaaacggaaatacccacattaatagcaagcccgaattccggcattgaatagatctgcccacgggtcgtcaacttcttttctcggagaagaaacaatgacggtatctgagggatnnnnnnnnnnnnnnnnnnnnnnnnnnnnnnnnnnnnnnnnnnnnnnnnnnnnnnnnnnnnnnnnnnnnnnnnnnnnnnntctgtagagtggcttttcaaggtccgccgtctaagtcctagggctcataccatggacaaggcgagtggagcactaccaagcttggagctacgcgtaggggcagaggagaatttccggtggagcggtgaaatgcattgagatcagaaagaacaccaacggcgaaagcactctgctgggccgatactgacattgagagacgaaagctaggggagcaaatgggatgatgatgatgtccgatcgatctcgacgtaccccgccgtccaaaaagactaaacaaggaggagattagtacattgaatctggacaacgttttatccagattcgttgtatttggaggagtcacctctttttcttctaagagtttttttttgtttttatggagggaatacgtacgtgtctatgtggctggactagtggactgtactacgtgtgacgtgtccactctaatccaatgccacacgtgtatatacgcatgtacatataacgcatccatgcctgaatatactggagtactatattactatgtaaaatataccaagctagctgatgttactgaactgtcagtatacatatgccacgcatgcatgcctctcgcctgaaaatttatatattagtttttctgctgggtcatactagtactgatgaagataaaagtaaagattaagttaacacgtcaaacgagaaatccatcagcagattaacaatttgatatactccctccgtcctaaaatataagaacctataaccggatgagatattttctagtacaatgaatctgaacaggaatcactactacggaaatcatctttcgtggcggctattttagcttttcgttggcggaaattgcagccgccacaaagtaaatgccagtaaagatcaatatctttgctagcggttattgaccgcaataaccgctagcggtaattcatttttgctggcagccgccagcaaaaatctattttcgttggcggttgccttaagacggccgccagcgaaaataaattatcgctggtgggtttcactgtgctagccaccagtgttaatactggccaagtttaaaaaaaacgacagacgaccgctccgtccgtctccgtcaacgctccaccattcaaaaatttcacagaaatttacccaagcatttattcaaaattccacagaaatttatatcaacaatttatagtaaaaaatttccattcaccttagcattcaagcatcacaaaattgacacattaacaaaaatttgaagtcccctcgcgaccgccgctgcatctcctccttggctacatcggcgagcgggtcgcctcaccggagttgctcgtgctgctgcctgatggcctcgcactgtaacgccccgattttcattcgggattaaaaatcatttaataatgtatttcccagaaattaaataaaaatttaatcaatttaatcaagtgaaattatagaggaaattaaaattttcctttaaaaatcattagccggaaatattttttaatattctctgttccctaatttactctccagatttttttcgtgaatttttggagctcaagaagtaattttaacatcacaaagtgcatttaatcaattaaataaaaagaaaacaaatataactttcccttcctccctttcgggctcggcccaaattcctcccctcctccttcccaggctggccttccctccctcggcccgctcggctctctctctccctcaagtctacaatgcctccctagcccgtttccccctccctctctccccgacaggtgggacccgtgggccccacctgtcatcccgaaccttcggtctcccaggtcggcaaccgccataccgccattgccgcccacgtcgccgccgattccggctcctcccgctcgcgacctcgcgcccaaaccgcataaaatcggttcccctccaccttctctacactctcctcacgtttcacccgaaaatctcgccgggatcgagctccacttcgcccacgatgtcactcacgtcgcccgccgcgccaacgcttccataggcttcgccacgccgagctgcacacctccttttctccattccaccatcgaaacactgcctttgtcgcgcaatgcaagccgccgtcgcctcctccactacatccaactgcttcccgccggggagcgagatctcgctcggccatgctgctgccgccaaaagcatcgccgcgctccaccgcccctctgccaccgtttccccgccgccgtgagccgcctaactcgtctccccgtgcatcccggtgagtttcgtcgccattgtccactccggccggcgtttctcgtcgcgcagcaactcccttccctaccctaacctttcctccttgttccccaggtccttccggcagccgtccaccgattcccgctcgcggaacaccgccggaccgccgttgctgtgccaccccgaggagcccgccgccggtcgcctccttccgccgtgccacccggtgagcccccatctcccctccctttttcccttgcaccggccgcctcccgtgcccgccattgcgctggtgtcgtcgccggtggccgcgtccggccgtgaaccgccgccgcccctttgccatcctgtgccgccgcccgtggaccgccgtggtccgggtccacggtgtcgccccggccgcggtggaccgtgtccactgcgccaaccccttgtgtcgctgacttgtggggcccgcctgtcggcgccggtctcccttgctgatgtcggcgcttaacttatcctttgagaaaattatcattaatcgcgtcataaattgaaattcatttaaaatggctcaaaacttctaaaattcatatctaattcatgcgaactccaatttgggccattcaacttgcaaaattcatctaaaattgagttctacatgtttgttcttttcatgtactattttcttggtttttattagagtttttcctcgttatgcgtgccagcgtatagaatccgtcgtttcggaagtccgcggtcgcgaggaaaagagtttggaagatcgtttgaagaagcaaggcaagtcatacgtttgcaaattaaatatgcatgttttgctaattacatgggatcagggtttacctatctgcttgcttgtgccatatttacttgatatcttttctttgtcaaccttggataataaatcgactagcttgtgttactatgttgacctagctagaactatttgcttagccatgcttaattaccactagctcagttgatgggataattacagttttagacctattagtatcatgacgagctgcgtgctcgagacacccgaccatgttgcactgatcgtaattatccaactaaaatgcgactgaatggtgggctgtgggtgcatggttttgctagtcgcacccatggcaattaaggaccggttcgcgggatgcactggaagacatacaacgcttgccacaagcgggaatgggtaactgcctgacttgaagtatagctttcctctggctgatgttcccaggcaagggtgagcatgatggagttgggtcggctggggtgtccggttgtccagctgtcggattcaccgcggcgcacgaggggactgcccacctccggggtagggggtgggggtgaaaccttagcgtggtgtggatggttaggggagagttatatgaagggttttgtcataatcactcgacgtggtgacgtgttcatcatgagcacatgatgacacggtgacatgccggtggattgtgtcttgtgggtacagttgtgtacctctggttagagcaaaactattcgaatagccgtgctcgcagttatgggcgatcgaccagattcaccgtgattagtcccatcctgaataattggttaatgaactggtgtagttcaggtggtttggttggacctgttcaacgtggtgtagcgttgtacaatggagatctaatattaccttaattaatcaactattttattgttttgctcaataaaatactttacaactgcctttatgcaattagccacaagccatccttttatccccttgcacgtctgcatcattggtgtggcttgctgagtacggtggttgtactcaaccttgctatgattttctcttttcagaagtgtagtgcttctgagctgaagacggagttagaggaccaaggctcagacaccagttgagttttgcctgtggagtggagctgaagctccgctagggttgcctttttccgctgctgctgctttcgtttcggtgtgaggactaagtgcctcctctgtaagtatcttacgcttttattttcgtttggaaatgtatattacttgtcgttttgtgtaccatggctggtcttggatagggatttaatacacaaaatagtatggaaatttgggctaaatttctgggtgtgacacgcaccgccgcatcttctcgttcttcctcgcccgcagcgccttcgtcacctctgtgcatccaccaccaccaccacacgcggatttcagattgctgcgtcaacaaaaatggtgaattgaagcgcaagaatggatgggtgctgaccttgggaggtgatgaggcggtagaccaggccaaggactagctccactggcgtcgttgggcttgtcccccgtggcagcagcagatccggcctcccctcggcgcgacagcggcggatccggcctccgcgcggcctggcggcagtggatccggcctccctgcccacgcccgagcgccgccgccctccttgttacccgcgcccgagcacgccgcggtcgtcgccaccagagctgccaccgccgtcgccggtggggaggccgggagggaggaggagagaagaggagtggataagaagatgagaggatgtgtggtgttttattgtgaagaagaggaagaggaagaggtaggtgggtgttttaatgtgacatgatatttgtggttgggtttactctagcggttttatttattggtcgctaggaaaaattcgaccgccagcgaaaattatctttttttttgctggcggcgcacttaattgaccgccagcaaaaatagacatattttcgctggcggccgcattagacgggcggccagtgaaaatttattttcgctcgcgattggtgcccctcacccccttgttacgagtttgctgacggttttcatatttttccgccagcgaaaatgataggctaacaccatgaaaaatcgtttttctagtggtaaatatcccatctggtcttaggttcttatattttaggacggagggagtatttgatattttaaagcaatgtatcgtttaataatttaaaaagtgtgctaacaaaaaccattgtaaaatctacatgttaatcatcggaaaagaacagtgtaattgacccaaattaagagcagcaggtcagggaattaaagagtagtggagtacattcctgttcgtggcgccatatattatggtctttgtttgggcagaacggttgtatgtgggccgggcctttacaaaagctgatttcccttcctcgaggaaaccttaccgggccgaaccttgggcccacacgacagatcgtgacagccgagcaacacggcccagagcccgtgtccccaccgagtcaccgacccgcacctccctgggccccacctgtcatccaccattccccatacccgtccgtgtcacggagaccgccaccgaccccaccacctcgttaccccccgccgtgctcgtcccagtctctgccacgtgggccccacacgcaccacactatttattcctacacgcgaatccgtacgcgtacacttcgactcgacgcgtattcccctcgccgccgtcgccgactcgccgtcgattcgccgccaccgttgccgccgcttcgcgcctagggtttcgtcgccggccgccgctgtatgagcagtcgccccatcgtcgccaacctggaccgtcaccaccaccaccaccgccccgatgtcgtcgtcgaggaagaccgcgggcccccgcggcggcggcggccgccgcagggacgaagaaggtgggtagtgggccgagccgggtgacgctggagaggctccgggaggggatcgagcggcgggcggaggaggaggagaggcgggcggaggaggagaggagggcggaggcggagagggccgccgcggaggagcgggcgaggcgggaggaggaggaggggagggcgcgggcggaggaggagaggaggcggagggaggaggagaggcggcggaggaggaaaggggagaaggtgagggaggaggcgcggcggagggaggagcagcggcggcggctcggcatcaccgtcgtcgctgattctcccggcggaggcggtgatggcgatcgtcgtcggcctgtgtacgactccaggaagactaaattgcaggccaagcctcatggggatgcccagtctgaagctgatacggcagaattgctgagctcgaagccgcaattggaggacgagcagatcaatgcattatctatcgaggttgctgctgccgcagacgcagtagaattgggagtgggaaggaaaactggatcatcagaagaggatggcactgttagtgatggtggtgatgattcttgtgaggacaagagcttggatggttttgatgtccaatctgatgggaattctccctgtgttgcagagggggaaacagaggacaaacttgcgacttctgcttcccaggttgttaatccagtcgatatcgatgtggctggtgaggttgaggaagatgggatccttgattctcaagatgcgtgtgcaatcgagggtgacagggtgctccgtgagacgatatgttgcatccttggccatgtggatgctggtaagacaaagctccttgattgcatcaggcacaccaatgtgcagaaaggggatgctggaggcatcacgcagcagattggcgctacctacgtacctgttgaatacgtcaaggagagggccaaaccccataaaggtgtgtcgtaatcaaagttcctgggttgcttgtgattgacacccctggccacgagtcgttcagtaacatgcgctcgaggggaatgagtttgtgcgacattgctgtggtggttgttgacattatgcatgggcttgagaagcagactgttgagacccttgctcttctgaaagaccgcaatgtgaggttcattgttgtcttgaacaaggtagaccggctttgtgggtggaaacattgtccagatgcaccgataaagaaggcactcgagaaccaatctggtgatgtcaaaagggaatttgggtggaggttgactaaggtactggcaatgccattacattcattgatccaatatgtttcaatgcaaatattttctttgattttatttgacaatttgactcatctatctaaacaggttgtgacacaactgaaggaaaatggctttaacactgcactatactatgacaatcaaaagtttcggaaagtgtttgacatagtcccaaccagtgccataaggtatgtctgctatatgctttgacttttcttgtttattaggtttcattttcagttgttatatgtgatttgaggtttaccttttcctaacatatgctattccatcctccagcggtgaaggcattccagaccttctactaatgctggtgttaaggtcccaagcgacaatgatggagaagctaacctttgtcaatacagtggaggtttgtccactatccattactatgttaatctccattactctgtttaatatcgagttacttactagtttggatatgcaccatttatcaagatgttgaatgtgagattgacttcatgtttgtttgatcagtgtactgtcctagaagtcaatgatgacaaagatttaggaactactattgatgtagtgctgattaatggtgtgctgcacaaaggtgatcaagtgaatgtttgcactaaacaggtataataacttcttaaatttgagatttcataccccttgaatttttccacaacggtttgatctcataatcttaaacatttttcatcttcaggggcctgtcacaacaactattagagatttgttgacccctcatccattgaaagaactgagagttaaggtgagttaatgattgcactctcttttgacagttatagtttctgtacataagtttttaaaagaaagaaacaacatatgcaaatctagcaaatccccagaaggtaataaatgtatatgcccatgagagtgaaacagttcatcttgttaaaacatgcagtttatatgataagagaaatactgaatgttatcatcacttaggctgcgttcttttccacatctccataatacaactttctcgttttccgttagcacgcttcccaaattactaaatggtgtgttttgtgtaaaaaaaaatctatatagaagtttcctaaaaaagttcaaataaatatattttcatgtttataataatcaatactctattaatcatgcgctaatgaggtgcccccgttttgcgtcctgttaatatgctcctccaatatggaggttcaaatggacccttaggctgtgttcgggaggaggagaacccctcctccctagcgtgcaaaacgaagctcgtattattgcatgattaattattaactatttttttgaaaaatggattaatatgatattttaaaacaactttcatatagaaagtttttgcataaatcacaccgtttagcagtttgaaagcttgcctgcggaaaacgagagaggtgggttgggaaaatggggggaagaacacagccttaattattatgtggggttttgagcaaaaatgggccacctaagcatgtacagtatatatgaatttaattttaatatgtggcaagattatttgacagtatttgttgggtgtttatttaatttgtccacttctattctgcagggcatatataagcatcacaaggagcttaaagctgcacagggggtaaagattgtggcacgggtgagtttatttcagttgtcatgccttaaaaaaaagatccaatctcgaactaattgttgcttaactttatcttttcagggactgaaatatgcaattccaggcacttctctcgttgtagtgaagccaggggatgatctgggacaatctgaagccaaaagccagaggaatgagaatgaagagggaaatgtaatacaagaaataagtaggctcaaaacttgcaaggaaggtgtctatgtgcaagcttctacttttggaatcttggaagcaatcattgagcatttgaacagccctggtgtgaatgttcctgtcagtggttgcaacttaggcccaattgagaagaaagatgtcatgaaggcaagtgctatgctgaagcggaaagaagagtatgcagccatcttagcatttaatgtcagggtgatgcctgaggcagatgtccttgcatcagaatcaggagtgaagattgttacagctgacacagtgtacaagcttgttgacagctttaatgaacacattaaaagatcaaaggagttgaagaaaatgcagtgtgcagccaatgcagtgttcccatgcaccctgaagattctgccaaaccgtgtataccgtaagaaggatccatttctttgtgatgttgaagtcttggaaggtgtcgtcaaggtacttcttttagccttattattttgagtgaattctgttaaaatgataattatcctagatactgatgcataggcatttcgccacagtttgagttagcacaattaaactttacatgtcagcagtttggttcattggcttttagtcttggcctacttatcacggtcaatgacagtgcaaaaatatggtaccttgttattgcatccaaattgagcttcacaaaaagtgtggcatgctacaccttagaaataaacttgatggaaaatcttggcatctatccaaacctataaaagtttacaaatctggcgctattgcaataggtcacatatattactgctcatcattgattgtggtaattgcatttcaggtgggaacaccaatttgtgtctatgttggaggcacagtccatggtcttggaaggatctcctcaatgcaaacatcaaatggtaatcagattgattcggcaaagcgaggagtagtagtatccgtaaaggtatgaataacaaagatcgttaggataatttcagttatcaacaactaaatagaaaaagcctaacatacattttctccaccagataaccggggagagccccaaggagaagacctggttgtatggacgccattttgatgagagcaatgagctgatcagccaaatctcaaggagatccattgatgtcctcaaagagtactatcgagtaagatacataaccacagccatttccatttatcttgcagagcccttaacacgtgcatctaatttttgtgaattcaccttgctgcaggatgaaatgaatgatgagaattggcagcttatccgcaggctaaagaaactactcgatatagcctgaaggattggaatacttctgtcgtcttctcgtgtcggcaatttagatcacgttcatcattttctggtctgtgttgtgtccagaaactccagtcatactttgtcatcatttgtcaaaccgttttgttactttgtgaataatggatgaatctatagatgtttgtaatggcgaatattgtcgttaatggtgaatgttgcatctgtgatatcttcctggagtgaaatccttctgtgttggactaccctgtcttcctatgtgctgctgaagccatgagaagtaccactgcaacgatgaacatcgacaacatgcaaccgagcaacaggtaagtcttcctcgatgatctccggtactcgccaaagaggatgactccccagaatgtactgacaagaggcagtgcctgatcacaccatatcatgaacaccatgagttttagttgtattacagctgaaatgcaggtaaaatgcagcaaacattgcagagctgatatgaacctaaggagaggatcacctggacagcatcagcagctgcatatccagcagcctgcccacccatgaactggaacccattgccaaacccacagagcagccctgccaggagcgcccagtgcctgccgttccagtctccggcataagctccgatggtcgacggcggtacaccggccaccgggcggtagaggagccgggcgttgaggccgataccgacggcgaaacacgagacggagaagtagaagaaggcggtgtagaccgtcaggtgggggacgctgtctctcagggtgcgccactggtcgttggtggccaggttgatcgccggcgagaagagggagaagcagactccggcgaggagcaccattcccagtcctagccacctgctggagccaaacacctgaaacccacaaaccggtattcaggtttctgaatttcagggcctatattactcctttataagcttcaccaatcttcagaggcagtgggtgatgtgaccttgatggatcgcctcttctcaacctgaacgatgaactctgcggtgccggtatcgaaatcgtcgtcttcgccattctccagttcttcttgatttggcagcaacttcactgaaaaaaaaatggtagcaaagtagcaactttgttagcttctgcattgcataatctcaccctttttcaggtggttagaagatagatagtaccaccttggtcagcaacatcactgctgagctctatgcctctactcctgcaaacaaacgaattgtacttcttgacatcaaaggaaggtctctcgaagaaaattcagattggtagtgctcaaatgcatttctgaatcctgacatgcttagcttctcctcctcatccttggcattggaagagtggacagcagagccgaggaagatagcgacgaggaagcatgctacacccgggaaaaggatttctgccctatttattcggccatcgaggaagtagttcatggttgttccttcaatagatcatggtcatccgcattagcgaagtgcaagataaatagctgcagattcaccaaagattcagttttttgcatgtttgggtgtacctagaactacagccagacttgagcagatgatgtttgtcacagacagaccgacaaatgcccacgcatactgcgagatcaaatgtccgatgctgagagcaatgccaccggccatcgcaaataggactgaaggccagttatcctgcattgatcaatggctgcaaatcatggaagaattcactgaagttgattatccacataaaagctgaacactctaacgacagtgacacgatgcaaccaacatacagttgggacaagtctctcatgcttgttttgcgtccacagataccatccaaattccaaagtcacactgtcaacttgaagcaattctgaatttccagttatcaaattcagctattcacttccaaattactctcattaacaggtactaactcacacagcttcttatgaaatcaccactgcattcttgatggctaagatattctagtcctagattgcatgacacaagaacaaccaactgaaccaagaaaccttaaaaaaagcactgacctgagtgagctgagtgaagaagcttggcatgctaggcctggtctctccaacctgcccaaatgtgatggcaatcacagcagcagcaaggagatttgtgacagagtagtccaggtatgtgtgctgaggcagccgtcctctacgctccaggagagtcaggagagcaggccaggtgcccaggaagaggagggaggccaccatcaaggcgacggcgccgccccggtcctcgacgacgaacatgtcgacgccgggaagcggaacggagagcctggggtgtgatctccggggaggatttcaggctagatctttcatctcaagtctcaattggacgaattgctcatgtccatgtgaactagtctcactctaacccccatttccctggcatgttgtcctcatctagttcatgttttggcctgaaaaaggtaaagagataatcaaggatgtggtcatgatgagcccgctacggcgctctctactcttagtagaaatcaatatgaaccctatatcttatttgattaaagagtttaaatttatttatactatcaccttagttagcgggagtagaatatgaaggggtattattataaaaaaaatacaaaggggtataatagttatttatcagtgactaaaccttttttttcttgttttagtgttttcgatgaaatatgagtgatgctagtacaatgaatgatcgatgtagccgggaaaaaaataaataataaagttactcctaatcattatattattagtaaattactgattaacagttgtattatactacagtaaaaagcaccagagcatctcattgcaaatatataacctgtgactgaataaagaaagcacaaagttcttgagatctggtttacaagtcagagctgcccttatttttctccacttcatgaaatgatgcaatataaaatgaactagttgaggatatgtgttccttgttagtaggtctacttgtttgcaaggatggatagattaattagctggagtacataattaacgatgggttcagttctctctgctctcttcattaactatagagaaaattacataatgggctaatcaaagagcagcagaatcagatgaaagaacccaaaatcagatgggatcacatacgagaaggcacttaaggtcgagagtagcagtaagtttggtgttaatgcgtaatctaaagatttttatagaaacaatacaattttaataaaaaatcgtaaaaatataggccagccagataaaatcgcaagtttagcacccatggggccatgaaaaaaataataaaaagtgcatgcatacaagggcatgtccaacatcccatgttcgacaggttctactgcacaacccctatcgaacaaccattgttcgacacagtgctaaacttatgattttatctggccgatccatatttttgcgattttacattgaaatcatattactcctaaaaaaatttctaatctaaatgggtaataatgcttgaaattttcatcatcaaagaaatgtgaacgaacctatatatattggctagtgagcacacaaagtagattttttttttgtgtgtgtgcctcctgtctcagggattttgaggtgtcggaaaagtggagatgccacggagttgcggtcggagaaggcggcgtcgtgcgagcttgaaggtaggggaagcatctgacatgtggggtcaggtgggtccgacatgtcagcgggaaagaacgaggaggcgggattgctgggctgggttgggctggctcgcggctatgttgggcccgcggaaagatgcacgccagagttgggctggatttggcccagatcgaggaggaggaatttcaatcgctttatgatttgctgaagaaaggctgaaatgatatttactcatcatcaactatcctatatttcattcaccaactttttttactcatcatctatatgtatatttcactaactcattttaatcatcatcatcagacaaatccaacagcctaaataatctataggagtactgtagaagcaaatgatccagatcacccatctctcctttggacacagatcgacctaccctgagtcctcgagcacagattggcctaccttgagctctagacttgtgtgcgaatatgcaaatttttaacgggggcacaaattaagtttgaattaaaaaatagtgacatggtaaaaaattgtaagtactcagtgattcactgtagatacgtccacggcgttagaacccgaggttcgtagaaagaagcttgggatcacagaattatccacgtggtcgttgatcgccgtctctcgtttcatcctgatgcttctcattcattctcatcctatcctacaattggttctatggctgtgtttagttcacactgaagtttgaaagtttgattgaaattagtacgatgtgatagaaaagttgtgtgtatatgaaaagtttgatgtgatggaaagttggaagtttagaaaaaaaactttagaactaaacaagacctatatttttcttcatagtactgcattcgatcgccgtctctcatttcatcctgatgttagctgttgacacctgtgtttggctcttcgactgacttggttttttatgggtggagagctggggtatgggtaggtgcataagcaaggaagtaaatttatattgatgtaggggtcactggtggagaaaccgtttgtagtcccggttagtaacccctttagtcccggttgttcaaccgggactacgaatccgggactaaagatagcatcccgggtgaaataaccgggactaaaggttaccaatcgggactaaagatcaaatatgcccgttaccctttttaaccgggactaaagatcatctttaatcccggtctttgttgcaaccgggattattgtggaattaggcctaccgacgaaagatggtttctccaccagtgggtgtccatggtgtgattttggtgggtgtttattaatttctgattaagatatatattttaccttgattttcgttagcacacatttcaaacggttaaacggtgtgttttgtgcgaaaactatttatatagaaattgccttcaaatattaaataaatcaaattttcaagtatgtaataattaaaaatcaattaatcacgctctaatgactttctcattttgcatgcccatacttaatcttcattggatgctatgttgaatggggcataagggagcataaaagtgtaagtacgatgatatgtgaatatggggtcgctcaatatgtagatcggataaatgcggatttggaggttggggtgttacaagtggtatcgaagagtttaagtgatgtacacaaatatggtacttagatgaaatatataatggggcttatttcttttaccactagagaccacggtaaaaaaattgtcctatgttggatcggatacatcatcagttcatcactgaagttcttaccaatgctgtgtttgtgagtcagcttataaatgttggcttgtacgtgacttgagaagcccaaaactaccatgaactctttttcccccaaatttgcttcagtctactgtctaggcccaatgcaaatttctggatagcatatgcacagtacaaaactgtctgttgtatttggatttggatgcatcgggaaaacagagatgactagaagcagaaactacccacgttcagtacctactggatctagtcgtatatctcaaccatggaaacacatgcatctttggcctaacagttcaattttgttgttgaatcttcatcaagctttttgttgtgccttcgtcaagcaacaaaaatccatgaactgcaaaaaaaaaaaaaagtacgctgaagaattacctaacatctaatacgtactctggcgtgcgtctatttgcgtgtaccttcattagtatcttaccctatcctcaaagggattcctaattataatgtggtctttaactttattagggttataagaacatcaaccgttggatcaacagccaatggatggtgtaaataaacttagattattctaaaaagaaaaaaaatccttttttggatgagttccgtgtcttttctttttctgtcggggtggattcccctattgggatttcattctaccccacttcctttttatttaaagaaggcaaaagcttgagcggtaaaaagcacacttcgtacaaacgtacacatcgtgctcaaaaatccaaaagaaaacttcttcccctttctaaaagaaagaaattcccagttgaaccaaaaacatgctcttctcaacaactctccaaaaattcaccttgcttctcccaaaaatccaaaaattttcacattacttctctcccttttgacaatgatttcatcaagcataggaattatgttcattaatattcaagagcttagtatacatatagcatatcaagccatgtgttacaataaaaagaagatgaacccatctaaagcagaacaagcaaaagtataaccatgaaccaaagattttacaattaagcttgaatcaacaatcaaaattcatgatttcatacgatttataatgcaacatcttaacaagtacataggttgaagaataaacactaaacacatatacttattgcatttattactctttctcaaataaactttataacagaataaccaagagaactttttttaactttttcttttcttgagcctttttgctcatatttttctcttttattccgggtacgtcctagtcgtcaagattgtttccaaggattcggcacccattattttgctcacatcgaatacgtccttgtcgtcaagactgtttccaaggattcggtattcattttttcatattttttattttcttcttcacaataagcaattaaagctatttgaggaataacaattcaataaagcatatatatagagcatttataaatcaaaccacatgctagcatcaatattgcatatttgcttaattcaagtagaatttaagtgtcatgcatcatctcccttaaaagcaaaatctaaatctcatgaaaagactggaatacatacaagctatgctagagacaaataaaccttcaaagtattgctagcatgcacaaaaaaataccatatgcataaacaaagttctcttttctcaattttttcattgtcatattattgcttgataaaaccatgaggtacaaattccccctcaaaacatgccaaaaggattcacgaataagcactaactccccctcaaaatatcaacaaaattctcatgaattgacacgtatccatttgtattaaccaaaactacaacctcaaatactagcatatgaaaaagctaataaacaagatagtagaataaaattatgtcaacccaaaaataaattgatgttaccatgaaaagcaatcgccatctcaacattgaaagctcatgaggagtatgccgtcaaaatacctacgaacgagaagatgtcgaggcctccgtgttggggttagaaataagaaattttggaatccaacactgagtcacacgaccagtagaactagtaggtacatatgcactaacaaaatcagaatcagacttacctgaaaaattacctttttgcttcacaaaagtctgagttgaatttcgcgaaaaattgccccgaggccggtatgaccgccgctgtacctgcggtctgatcgggcctggcaatcggtctgaccgccggttcaactacggtctgaccgctggccggtcggaccgactggtcagtgtcggtctaactgtggtcctcgaattaaaacccgatttttgccaacgtcgttttgcaaaagcaatttccctttcctttttctgtttatgggcaagtctaaaacaaaaaccaaccaaatatccatcttttccacaaaaagaacaagtgtacttctcacgacaagtttttgaagtagatggttttgcatcaacagaagtttttgcattcacaacatttgatttcgaagaagatgcattcaaagaaaacatgatgccagcagatttaaacacagtgttcttaggctcaatttcaatcaaaattccacctctcctagcaacacccaaaacagtaggaggatgtctagtatgatgagcataagaatcaaaacctaaaccacgatggtgtgtgttaactttagattgatcaagaatcatgttgaggttctttttaccatcagaaaatctttgcaaagaacttttcaaataagaaacctcctaagtaagaatagcacaatttttgcaagcatccaaaagacctttttgttttctacaagttgagcaggaaaacacctcatcttgtttaacaatttcttccatgtgtttaacatgctctaaagcatctttcaacttcaactcatttaaaacacactttgaacaatcttgagaaatcaaaacaacattgttttgttttacattatttgcacatgaagcattgaccaaagaacttgcacaaaaagcaactttgtatttttcaacatgttctttgtccaaatcacattaacaacacgagcatgtaaagcaaatccaagagcaaaagaagactccaactttttagatttttcaatctcaaattccaatttcttgcaattaacagaattgacatctcgcaaagcattaatttcagaaaataaaacttcacaagattgccaattatcatcattaggaatcaaagattttaatctagcaatttcaacattaagaatctcaatagtatgatccttctcatcaagcacaatataacatgtttgaagtttcttagcaaatttgtaagcagcatattctagtcgatcataactaagcttttcttcattatcatcatcagattcatcaacatcagaacttgcattacgagcaataaaagctagatcaacaacttgcttacctttgctctcatctttatcttccgattcatcaaaagttgctatgagttcttggattaaccactgcatgcaattcttcttcttctccttcgtgttcttcttgtccacgtcatcttccttgactctaccattgtattccttcttgcctctcccaagcttgggacaacgcgaacaaaggtgatccggagaaccacattcaaagcaacgattcggtccacctcttttcttgaacctaacattattcacagcttgagaaaatttgttagataacaaaaccaagtcctcctcctcgaactgttcgagttgctcatcggacatggcatcaaataaagcaagcacagaagacttcgatgaagaagcaccaacatccaaagaagtcgaggaagaaaccaaagcacttgacttagaatcaattttacgagaaagaatattcatctcatgtgttttcagttttgtgtaaagcgaatccaaagtcaaagtagacatatcaacagactcctgaattgatgtaattttcatctcccaaatagacatgtcaagaccattcaaaaagtgacgagaaacctcagattgtgagtaattaacatcataagaagaatcaacagacctaagatcactcaaaattttgttgaacctagaaagatagtcatccaaagcttctccaggtttcatctcaaattttatgtactttttgaaaagatctcgacgaagttttttaatatttgaagttccttgatgaaagtttttcaaagcgttccaaatctcatgagcggtttgaaaatgtgaaacacgatcaaaatccgaacgacaaatcccactcaataaaatattgtgagctttacaattttgttcaaattcagttttcaaagcagcagtattaatttgatcaggaatcacataaggattagaaacttttctccaaatatcaagatcctcagcctggatataagattgcatcttactacaccaataaggaaaatccgttccattgaaaacatggggcttagttgtaaacttattagctatggcaaaaactcaagatcggtaaagatcgaaaagagcaaacgtggctctgataccacttgtaggatcgaacacaagtaaccaagcctaccagagggggggtgaatggtaggaaaaaccaaaaacccaaaaacttttagcggaaataaaagttaccctcaaatcgatggaaatcttgacgtagtcctatcgccgccggtcggaccgtttgcacgccgccgatctaaccgtctccctgccgcctgaacccaaagaaacataaatcgaaaaactctcaaagtagatgacaactttattgcttctctctgtgtttacaaagtgcaccaacagcactccttacaaaaatctcgactaaactcgaaaccctaactaaactagcaactcaattgctctcaaaccgggaagcctcacgctccccctctatttatacatgaggtaggcagcctaaagccacgaaccaaactcatactaagagtcctaaacatcttaggaaaccctctagtacaagaaacaaactttacataaccaatcataccaaatttggactccttccaaattcgactccgcatcccataagcacacaatacctccatcgtatgccatatggaatcttcaccaaccacgtgcatcaactctagccttagtatcccgcatgatatctgaccaccacggacatcgtcttaccaccaagccgactcctggtccatcaccgcaaatactctctcgaggcatcgagtcacctacacatgaaacaaacaaagaaaccatattccgagaccaagctatctccaacttgactcattgttagcaaacaacagtattacatacgtatagtatccatctagaagccataaccatgaaacaatcacggatatccaaagaaacaacccgaaaccgaaaccaactcagcgtcggccggtcagaccgcggacctggccggtctgaccgcacacatagcaccggtctgaccggcaacctccgcccggtcggaccggacacataaaataacagtgaatccgatcatcacctgaaaattgattatctccaaaattgattatctccaaaaccacttcaatgataatctcaaaatatcaaaaccaataatcacagatgccaattgttcatcacagaataagaatcaaaacacacgttgatcttacaccttgtatatattaacattctaccccagttgtttgcttccaaagtgtctaa

SEQ ID NO: 6487 - DNA, 1510 bp, Oryza sativa
  unsure (1)..(1510): unsure at all n locations
cggttttggaaattcatttagttcgcaagcaccgacccaggtgtcgggttttccaagtcttttgtaaaacccaagttttacccatgttgtttttcagattttaagtttgaaggcgtccgctgatactcgcactaggtgcgcgaatatcgagacgcaactagatggttgcaaagggacatggtatcacaattaacaaagaaaggatcaaatgcaacaaattaggtaggtctaccaatctgccttgcagacgggacaacagattaagtgcgatcctatcaatgcataatatttttcaagcaacataattaaatttcaaatataggctcaagatgttcaaaggtggcttgccttgctcgagatctggagctcgatcctcgaaatcctcgcactgcgggtcttcgggctccgaaactacacgtgaaacgggacaactcaacaaacggcgaaaataaagccctattaatgacctcgaagcgtgccattagatagatctcaagatttgaggaattttggaagttgaacggagtcaaacggacttacggttgggaagatattgaatttctaagattattggatttttggtctaaaggaaaaggatttaattaaatcctttttggaaaataaaagaaaagaaaagaaaagagggagggaatatagacttttctcgggcggctagggcgcggcacgagagaaagggcggctcggccgggcttaacgggccggccggcccaagaaggcggcccagagcggcccaagacgcgcgcgcgtgggagggaggagagagagagagccggtggaccgggcttaccacgcgcggtcccgggtggcacccgcttgtcagcggctcggctcaccgtgcggagggagcacgcggcgcggcgctagggtggggggaggatgcggtgcacgcgcgtggttcgcggtggacgcagatgcggcgggcccacgcgcagcctcacggctcgcggtggaacgcgcgcacggggaggggctgaccggggtcggctcgacccggtcttggctgagctggcgccgacgtggcgcctacgtagctgccacgcgggccggcgggaggtagacgacgacgccggccggaacggacggtggacgacgcggcgagcggcggagcgaacccggcgatacaggcaaaacgagcacaccgggtggttgcaacgtgacgaggggagacgagccaacggctcggattcgccggaggaagcttgacggcggcgaatcgcggcggcggcaaccggcggcgggagaaggggaaaacggcgacgaggtcacgaggggccaattcccggcggcgagagcatctacgcggctacgggaatccgatgctagcgtcggattgggcggaactacgccgagcgaggccggggacgagcgggtgctacggagctcgagcggcgacggcggcgagcacacggcgagtgacgacaacggtcggggcggcgccggctagggggcatcccactagttnctagagcggcnncgcccgccgcggtgg

SEQ ID NO: 6488 - DNA, 9319 bp, Oryza sativa
cgaccccgagattcagcacctaagggagcagctccgggaactcggcgcggagaagatcttctcgctcccaggttgttttcactggcacgaaatgagccaatttcgtgagtcgatccacgattacccaaatggagtcgtacccgctaggggttcttggcaaaccggtgatgaaatccattccgatttcttcccatttccactcgggaattggtaggggctgtagcagaccagctggcctctggtgctctgccttgactctttggcaaatgtcacacaaggctacgtattctgcgacatctcgcttcattccagcccaccagaagtatgccttgatatcttggtacatcttcgtacttcctggatgaatggagtaggcggactcatgagcttcctttaggatgagatctcttaattccttcttggccggtacacagatacgtggaccgcaccaaactgtgccttgatcgtctatggagaaattggtgtctttcttctcctgtattctttttattaactcttttatcccttcgtcgtctttctgagcttcccggatttgcgactctagggtaggctgtactgtcaagctggcagggacacctgactgtaccacggtcagcctcaacttctccaattctctgcacaggcgatcttggtcaggccgtatttgagctacattgcaataggccttgcgacttagcgcatcagcgaccacgttggctttaccggggtggtaatgaattccaagatcgtaatccttgattagttccaaccatcttctctgcctcatatttaactccgtctgtgtgaagatgtacttaagacttttgtgatcggtgtatacttcacatctgttcccgattaaatagtgcctccagatcttaagagcatgaaccacggctgccaattcgagatcatgggtgggataattgacttcatgaggcctgagctgcctggatgcataggccacaacctttcgttcttgcattaggacacatcctaagccttgtcttgatgcatcacagaagatctcgaaatcttttcggatatctggcaaggtgagaactggggcagtggtcaaccttttcttcatttcttgaaagctgtcttcacaggctgcagaccattgaaatttcttttccttctttaacagctcggtcataggtctggctagcttagagaattcttcaatgaatcttcgataatatccaactaagccaaggaagctgcgaatctctgacacattcttgggcgggttccaagcaagtacagcttcaaccttgctgggatctacctcgacaccgttggaggagatcacgtgtccaaggaatgctactcggtctaaccagaattcgcatttcgagaatttagcgaatagttgatgatccctgagcttttccattattagcctcaggtgttcagcatgttcttcctcattcttggagtatatcaggatgtcatcgatgaacaccacgacaaactggtccaggtattccataaagattttgttcattaagttcatgaagaacgctggagcattggtgagtccgaaggacatttctgtgaactcatatagaccataacgcgttgagaaagcggtcttcgggatatcttcagatctgattttcaattggtggtaacctgatctcaagtcaatttttgagaaaactcttgctcctttaagttgatcgaacaaatcgtcaatccgtggcaacgggtacttgttctttatagttacttcatttagggctctatagtcgattaccattctctcagagccatcctttttcttaaccagaagcactggggctccccaaggggatgagctaggtcgcacataacctttactctccaattcttcgatttgtcttttaacttctactaactcattagctgccattcggtagggtctttttgcaattggtgcggtgcctggtgccagttctatggcgaactcaatctcccggtctggtggcatactcgttaattcttctggaaatacgtcgggatattcacagactatgggcaccgactccaaggaggtgacttgtaaacaggttaagatagaccgacttgcggtaggagtgttaggggtaaagcggacttgctttcctccaggtccttgcaaggtgatggacttttcggcacaatctatctgtcctttgtgctttgccaaccaatccatccctaggatgatgtccaagctttgcgagtctaggactatcggtttggctaggaagtcaacttcctcaattctaaggttaacttccaggcatatttgagttgcccttatatccctcccaggggaatgtactatcattggtacacgtaaattttgggttttccaaccatttcttttcacaaaagcttgtgatatgaaagagtgggaagctcctgaatcaaacagaactattgcgggtatggagttgacagagaacatacccatcacaacgtctggagcatcctgagcggtctcggcttgaatgtgattcacccggcctcgaccaaggttgttggacacacgagaaccttgtccacttgcctgagagctaggacgagactgagctgccgctggagtaggagttctggcagtgctgccattagcatgccctgagctggtgttggtaggattctgagggcactgtctggcatagtggcccatctggttgcaccggaaacactgaactgctgacggtccctgtggtgacttgaaagaggtaacactgttgggcgcagtattgccactaggggcacgctgctgtggctgaggtgccggacagttcatctgaggacgaggggcgtagcctggctggcggttagcctgagtgaccgactggtggtattgcatgggttgaccgtagtgagggcgaggtgcgcctcgggaagaatttccctgatggttagagttgcgtttcttgtattcttcggtagcctcttttctggcatcttcaagtagaagcgccttgttgatcatatgctgaaaagtggggaagtcatgagcaagcaactggagtctcattccaactgcgattcctttcacgaatttcctgatcttcttcttatctgtgtccacttcctcaggggcgtatcgagccaagttgttgaacatacttaggtactcattgacactgctgttgccttgcttaagtctgttgaattccactttcttcatgtcaatggtgctttcaggcacatgagctgcacggaaagacgtagcaaactcatcccaagcaatgttagtgggttcagggtgtgcattgcagtaattttcccaccaatctgcagcaggtcctcttagctggtgagaggcatagagcgtcttctcaaccggagtacactgcaccaagttgagttttctatccacatctttcagccaatcgtcagcctcgacgggctcgacggtctgagagaactctggcggacgagacctcagaaagtctgtcagcttggatctattgttgctcatgtgacggtggccatttccatgcgcagtatgctgaaaaccggctacggctgcggctaatccttgcaagatttgtgtctaaactgccattaagtgctgcatgttgttttccacatgaggtggggaagggaggcgttcttctccagaattgtgactggcagtgcggtgagagcggtgagactgttccatctctacatcacaggaagccgtgcgatgcgagcggttgctgcggcggggttgctcaacttctgcattgcgggaagcagtacggtgcgaacggttgctgtggtgagactgctcatgatttgcttctggctcggctctaccatcttcaaaaccaaagcgggctggtgcacgagctgcacggcgggggcggctagccatctaaactcccagaagagggcggggtaagaatcaaataagcacttaggagggcaaggagcaacgtaaatagcaactcagatagcacacactaggcataaactggatttttcaaatcataaaaacacctgatacaacgggtgtggacaagtcacagagctacgccgagcttgactgtgcgcacaccacctaggagaaccagactaccgaacaacacccacaacaaacacacgcacgcactaccttgccacgactccgaaagagttggcggcggaacaaaagggcctaacacacgggcggctgctgtagactgcctcctctactcctcgtcggcctggctgcctcctgtagtcggctcctcagtcgaagaaatgtcgatcggctgacgcgaagggaccggcggaacctgtcgagggccgacagcagcacgggccgctggcggtgggggagctgggtagtggaaacggaacacggtggaagaaccaacaacacgcttccgcgcggtgcggataaagcgtgggccacggcgggaggaagcaactggggtgtgtccgggggtgtaggaggggctaactgggtgtgggtagggggagtacactggtgagtacggcgcacgcgagctgggggagcgcgggccactgggagtgcgggcagagccgcgggagctgtgggaggacaggtggctgccgtgacagaggcggcggcgtagcggcgggcaagggagcggtaagcctcaaggagtaggtcgtgctgagtggcctgagcctccgaaagctcaaccatgcgagtcagcactggctgagactcgctgtacggacaagggtacctggcgtctgagtggccagaaggaaggcgtggtagctgccggaaggcgaagcccccgagatggtggctgtagtcgtgggccaggtgacgaagcgcagtccaggagaggtcctggtacgcgatctggagagtgggcctggccacggtgaagtggtgtgggcgaaggccagctccgtgtatacctccacgagggtaaaggtacacagagagctcacagtgagggggaacacggtccacggagtaccccgtgtactcgggacacgagaagccaaggaaacgagcgaggtcacgaagctgagcgacgtggtgaccctcaccaaaaccgtgggagctgaagctggcgttcactgccatctacaattttgaaggagggagaaaagatcagtaaccattttagaaacaaactattgaaaataaggaaaccaaagaagccttagcttttcgcaagtagttttgaacttagtatccttagggtcgtcctaaacgtcgggtttcgccctagggccaagcctgtgctctgataccatttgtaacgtcccgcctcccccaggccgggcccacttacatctgatagctttcataggtcatagactgccctcacagaccaacacatgtcttttctgcacactttgtcctcactcgtgtgcacccgggaagaatttcccaatcggtcacccatcccaaattgctccaggccaagcacgcttaaccctggagttctttggagattggcttccgaaaaagaagttgcaacttgttgatatgagtattctattaatcctattaagccctaggccgggatgttacaccctcacccccttaagagagatcgacgcccccgtcgatcaaccctaggccaggaacgtcatctcttggccacgtccatgtgtccagtgccagcgcatgtgccatgctgtgtaaccactcccggtctacatcagccatgcgcaccatgcctgcgcaactacgacacacgcgcccgtgaaaccgcgagagtcggctctgataccatctcttgtcacgccccgaactagtcccgactggaactagcccgtgacgctccaaattaacctgttaatcgataccagtcccaggaaacagtgctggtatcacaggaagacagaatatcacagcaacagaggtctctttattatagagtaggagtacagtcatgttgggctgcggacagatcccgagctcacaactgcattacaaaagggaaacggaagccaggactcgggccaaacaacacaggcgcgacttgggaactaggccgaaaccctaaaactcattgtagccggcttgctcctggaagaactcctcatcagcaggatccgcttcatcttcttcagcatctgggggggattatttatatagagcaagggtgagtacgagagtactcagcaagccaggggaaataagtgtttaatgcaggcttcaaggagaggcgggtgtttttgcaattgattttatttgaactcttttctgaaacaactaagtgagtgcttcttaaacgacacggatgagacagtgcgtctcgtccggtcggagtatgtgcaatgtattagtctttagattttgaaacaaggttggcacccggccaacagcttttcaaacggccacccgggccaacaacttccaaacggccacccgggcgtagctgatcccatcagctgcagattttccaaacatcgaacccctttccacaacagcaatttcacaagcagtagtcaaataaaactacgctaggaatcacctcacatccgcccatgaccgtgggcacggcttatcgaacagtttgttaacctctgcagagggggtacactttacccacacgacattactaacccggatcacccagcccgtggggatcagccacgttgggagacctccaagctttcattacaaggcatttctaaagccgacacaggtttaccatatgccgacgagaggggtcccagaccaacaacaggttaggtcccagaccatactgtgccaggaagcccaggggtcctccccaacaccaccccggcgaatccacatgtctctcggcatcaaggctcccctgataagctagttactcagccaggggtgtcccattccacccatgtggtcgtacttgtcttatgtttggatgaaattccaaggaaacggtctttaagtgcaagagcggaaaaccgtacacccggtacgttccccggtccgcggttttggaaattcatttaattcgcaagcaccgacccaggtgtcgggttttccaagtcttttgtaaaatccaagttttacccaagttgcttttcagattttaagtttgaaggcgtccgccgatactcgcactaggtgcgcgaatatcgagacgcaactagatggttgcaaggggacatggtatcacaattaacaaaggaaggatcaaatacaacaaattaggtaggtctaccaatctgccttgcagacgggacaacagattaagtgtgatcctatcaatgcataatatttttcaagcaacataattaaatttcaaatataggctcgagatgttcaaaggtggcttgccttgctcgagatctggagcttgatcctcgaaatcctcgcactgcgggtcttcgggctccgaaactacacgcgaaacaggacaactcaacaaacggcgaaaataaagccctattaatgacctctaagcgtgccattagatagatctcgagatttgaggaattttggaagttgaacggagtcaaacggacttatggttgggaagatattgaatttctaagattattggatttttggtctaaaggaaaaggatttaattaaatcctttttggaaaaaaaaagaaaagaaaagaaaagagggagggaatatagacttttctcgggtggctagggagcggcccgagagaaagggcggctcggccgggcttaacgggccggccggcccaagaaggcggcccagagcggcccaagacgcgcgcgcgcgggagggaggagagagagagccggtggaccgggctcaccacgcgcggtcccgggtgggacccgcttgtcagcggctcggctcaccgtgcggagggagcacgcggcgcggcgctagggtgggggaaggacgcggtgcacgtgcgcggttcgcggtggacgcggatgcagcgggcccacgcgcagcctcacggctcgcggtggaacgcgcgcacggggaggggctaactggggtcggctcgacccggtcttggctgagctggtgccgacgtggcgcctacgtggctgccacgcgggccggcgggaggtagacgacgacgccggccggaacggacggtggacgacggcggcgagcggcggagcgaaccacggcgatacaggcaaaagcgagcacaccgggtggttgcacgtgacgaggggagacgagccaacggctcggattcgccggaggaagcttgacggcggcaaatcgcggcggcggcaaccggcagcgggagaaggggaaaacggcgacgaggtcacgaggggccaattcccggcggcgagagcatctacgcggctacgggaatccgatgctagcgtcggattgggcggaactacgccgagcgaggccggggacgagcgggtgctacggagctcgagcggcgacggcggcgagcacacggcgagtgacgacaacggtcggggcggcgccggctagctacggggaggctactcgtgctactaccgaaaactaagggggagagatggagcgaggaggaagaacggagggaggcactaccgagatgaggaggggcgctgggacgagaggccgacggcgcgggagtaatctctccggtctcgggccgaggaagaggaagaagagggcgcgcccggagtccccttccgcgtcctagtgtgcaccggctcctccggcacacacgcgacgacgaacggcgacggcgaacaggggcgacagtggcggcgagagacgaaaacgagggagattggagggggaggggcttgggtttaaatgggcggcaatgtcaggttgggagaggggaaccggcattggacagtcaagccggcgagctggcgctccggctagcggccaaaacggcgacaggaggtgacgccggcgagagggaaaaagggaaaaagagggagagaaaaggggagctcgccccttgcctctttgggaaaaaggaggaggggagcgggagcgtcgcggcagagggaggagggctctgcctccgtcccttggcggcttgcgcgcggggaggcggggccgaggtgatgacgacggccatgacggcggggcggtttggagcggcgcgacgacacgagcgacaggcgctgacgacggcggcgaccaggcggtcggccaccacggcacgcgcgcgcgggaaacaacgggcggcgcggcggatttgagcggcgcggctgatttgagcggcccggcttgggcacgcacgctggcttgcggggccgggcggctgcgcggctgcaggcgcggcagggcagcggggccgggcggcacggacggcgcagacggcgcggctctcgtgcacgcgcgcgcggcgcgcgggcggagctgagggggaggcgctgggcgcggctctcacgcacgcgcgcgcggcgcgcggtcggagcggagggggagggagagagagagagagagcgcgcgggggagggaggggagat

SEQ ID NO: 6489 - DNA, 3434 bp, Oryza sativa
tacgtatatgtttatgccggcctctttcatgtataggtaaacttagttatgtccctaatgtcaatggcaatagtcatagaaaccatttactgcacttcctttgtttctacctacatatacaaagtcatcgtgactttgcttatcttcacacatattgcttacatatagtcatctatttgttttttgtaagttatatggatgttccatccacgtggcacggttgattcctaggtgcataaagcctagcaagtaggtttaggaggcaatggtaacttagaaatctctttgtgaagggaatgaagtactgcgatactttatggtttagcgtgacacgactccgatgagaacgctagggcaagcaacgatggtaaaatatgtaggagaaaggtgcaaatgtgcaattggcactgatgtgttgtaaagagatcatggcaattctaacatggctatgaattttttttttgacctacgaatgggccgggcaattctaatgtgtaattttttttttgaacttgtgaatagggattgcaatttcagaaatttcaaaccctcccggcaagtgattatctcagctgaattttttgttttttctcaattttttgaccaaatatttagtcaaattcagttaaattatgttaacatttaaagaaaaggtccaaaaagtcccaaaaataccgaaatttcagccaaaatcgaaattaaaaaccctgctcgtgactagtataaataggtgaccaccaaactgtgtaaaaaaaccgcatgatgcataactgaacagtgtttgtgaatgccactagctaccactatgatattagatggtgacagccaaggaaataaactgcaaccgcgcacaacacttcatgaaataagttattattattgtttaaagaaactgcaatttgggcatcactttcaattcgatactcgatgtatatgatagtttggataatgatccgtattgtccagtccattaaggccctgtttagatccaaagttttgttttcaaactttcaactttccatcacatcaaacctttcatacacacgtaacttttctatcacatcatataatttcaaccaaatttttaaatttcagtgtgaactaaacacagcataagtactagtgtagtgctacttcatggcctgaacccgcaggttttatgacttttaggtaggattggatgtgaaaaagcattgaaccggtagtgttgccctatcactgttaaagtgttaattcacactgaaccagcagtggtagcccgttccgtggtagtatcacaagtctattatataggttacatgaaatatctatttgtggcatgcatttttttttatttttgctcgatgtatgtctcccttgtaatcgaataaatgggttgtgacaccatatgtatccagctttgaggactatatatataatataagtcgcttgtttgccagtaccatttctggtccagaggactcctccgaatgaaacatatattctcctgttgctcactcaaatgtgaatttacacctcgtcatgtatatgaccttttgggtgtgcatcatgcagtaggtttaggaggcatccggatgtacatcagtaacttaaatggctgaaaaatgcagtagtgaagaacaaatcgcgacggcagcagcgatttgggtgatggcggctagggcttgtagcagctgctgggctatcgatctcttccccttttcttttttttttgttttttttcagttggtttaatagatatcctgatgaagatcgaatggcccatattaattcgatcaccgattactataaacttattgtctattttgcactactcggcgagctctacgcatccgcggttcctgatcgcctattcaaacaacggtttaaaaatttaacttttgtgcgtttgttctaatattccacgaaatatttcctgatcgcctattcaaacaacggtttaaaaattgaacttttgtgcgtttattctaatattccacgaaacatattaattggaaactcggggcattacattcttccccctttaattaaattcgccctcgaattcgtccaaccattctctagaacacagggtattacacgatgatctacaggctttccccaagctaggcgtaatctgaagaagtttgcagccttgtcccagtgtgctaacccattcaaacctctaactcttaggctccataattccataaacttcaatacatatatacactgcactaaaaccttgaaatcagattctccctgcgtcccaaattacaaggcctatattttttctatacggccttcaataacatactagatcattaatatatttcatattatgtttcggacaaatataaaatgagcatcacattaaagtactctaaaatataaatcttgcggtataacatgcataatactttgtgtctgtgtgtaaattgaagatgtttttgccgagattttggtacattatccgtgtttgaatcagattttaagttcgtttacttttagaaatacaaaagaagtcgtataagaaacctctttaaaaaaactcacttactaatttcagatgaaagtcacactcctaattatagctcatgattttctcaaaaaaaaatatatccaagcgaattctcacagtcaagttcaccctaactaaatgtcacgccccgaactagtcccgactggaactagcccgtgacgctccaaattaacctgttaatcgataccagtcccaggaaacagtgctggtatcacaggaagacagaatatcacagcaacagaggtctctttattatagagtaggagtacagtcatgttgggctgcggacagatcccgagctcacaactgcattacaaaagggaaacggaagccaggactcgggccaaacaacacaggcgcgacttgggaactaggccgaaaccctaaaactcattgtagccggcttgctcctggaagaactcctcatcagcaggatccgcttcatcttcttcagcatctgggggggattatttatatagagcaagggtgagtacgagagtactcagcaagccaggggaaataagtgtttaatgcaggcttcaaggagaggcgggtgtttttgcaattgattttatttgaactcttttctgaaacaactaagtgagtgcttcttaaacgacacggatgagacagtgcgtctcgtccggtcggagtatgtgcaatgtattagtctttagattttgaaacaaggttggcacccggccaacagcttttcaaacggccacccgggccaacaacttccaaacggccacccgggcgtagctgatcccatcagctgcagattttccaaacatcgaacccctttccacaacagcaatttcacaagcagtagtcaaataaaactacgctaggaatcacctcacatccgcccatgaccgtgggcacggcttatcgaacagtctgggctgcagga

SEQ ID NO: 6490 - DNA, 2363 bp, Oryza sativa
agcttggcgagcacgccctcttccgcgtagaactccgacacattcttcgacctgtagatcttcttgatggccactcgctgccccgacgggagccgcccccaggtacccttgccggcgccgccgctgcccagcagaagcttctcgtcgtagccattggtggcctgcttcagtctccgacttggtgaagatgtacaggccctcgcgcggcagcggcggcagcgacgccaccgactcgtcgtcgctgacgtcacctgccgtcgtcgtcgacctacgccggcgacggattgttacgattgccagcgcggcggaggcgaccgccacgacggccaccacaaccgcggacgccgagccgacggcgatggcgacggtgttccttctcgaggaggagcttgggagtgggcgcgatgcggtggtcggcgacgccggcggcggcggcggcgaggggacgaggtcgctggtgccgaggctgttgacgttctcgagcacctggagcatgcagagcgcgtaggcgcggaaccgctcgagcggcggcggcgcgcgggaccagacggcgacggtggcggccatcccgcacggcacgaactccttggtgcgcgcgctggccagcatctcgtaggtggtcgcgatcaccgcgccgcggcacgcggcgcagccggggtcaacgggcccgacccccggcgcgcgcgccgcgcccggcgcggcgcagagccgcgtagcgttcggcagcgcgcgcggcgccatcgcgcgcgcggcgtcgatggtggcgagctggcacggccgcgagcccgccgcgagcttccccgggtcaccggtgaggtcgcacgacccgttgtttgcgaggagcgacggcgacacgaggccggaggagagcagcctggcggcgaaggcgccggagcacgcggcggcgggctcggcggggaggaacgcggcgccggtgcggttggcgtggtcggcggcggcgaagatgtaggcggcgaacacgtaccagcagcagccggtggcggcctggccggcggtggcgttggcgtagcactcgcgcgggatcatccgcgtcgccgtggcgaggtcgtaggggcacgccgtggggcctctcgccggcgccggcgacgccgccgccacggcgagcgggaggaggaagacggcgaggcgaagcatctggcggggtggtggtgaccggagtgagagggggagagtggcatcgataaatgcgagcgggtgggagttttttttttaaaggtggggcccacaaagtgatttgacgatttgacccttggagtgtattgcagctacagtgcaaattttgattatgttgataatctctttttttaaaaaaaattaatgatagagaattatagagcctgggactgggagatgatggatctcacaaagcatccatgtttagaaaaaaaacatcaaatatttttgaagttttgtccacctaaacatggtatgtaccaactagggagtgaactattgacgtcaggtactattgtgaagtgttatatgtttggaaatctcgaataaagtaagtagaacatatgtagcttgaccagaaaagttgtgaagggtaaaatatctttatgccatggaaggaaccaaaattatagctcacctctaagatcaactacagagtacctccgttctaaggccctctttttttaggcttattggcctaaacttttaaattagcttattggcttatatgatttataagccggtggatttaatatcctaagtttagtggttgagtcatacatctacctcacataagccaaaaaagcttctccaacctagcttttggcttaggccctctttgtttaggcttaggcttattggcctagacttttaagtcagcttattggcttatatgatttataagccagtggatttaatgtcctaagtttagtggtggagtcatacatatatctcatataagccaaaaaagcttctccaacctagcttttggcttaatagtgttagagtggcttatggcttcaaaaaaagccaaatgaaaaagctgcttgtttgttttgacttagacttttcgacttataagtaggcttataagcctaaacaaagagggccttaatagtgttagagtggcttatggcttcaaaaaagccaaacggaaaagctgtttgtttgtttaggcttatacttttcgacttaaagttggcttataagcctaaacaaagagggcctaaaataagtgcagtcatggatatccatgtccaatatttgaccgtccgtcttatttaaaaaatttatataaaattaaaaaaaatagtcacacataaagtactattcatgttttatcatccaataacaataaaaatactaatcataaaaaattcaaataagat

SEQ ID NO: 6491 - DNA, 1399 bp, Oryza sativa
gccgacatgtgagacccctgcaccgacgtcccccgccgaacagccttagtgcgccgaagaccgcgccacactcaccgacagcacctcctcacacctagatcgcctcctccaccgccggccgcgcctctctgcaccaagccggcctccttcaccggacgcgcctctcgcgccaatccggcctccctccatcggccgcgcctctcgtgccaagccggcctccatctctaccgcccgcgcctctcgcgccgagccggcctctgctgccatcggctgcgcttctctgcgccaagctggtctccgacccctccaccgaacgatgccgcgccggccagatgcagctgtctcccacgtcctcggctagtcaaccgaggccgccatgcctccggtgaccgcaaacatggtcaccaccaccacagccgccgctgcctaacacccaaccacctcgccgtcgtcatcctcacctcgcacccgactccttccctgccgccgacgtagccaccacctcagagtcgcagccgccgtcgccgctgccgccgtcgccgctgcctccgcaaactgccgctgcgccgtcgtccttcaccaccgagcagctagctgcccgacgccatgtctttcgccaccgccgccagttgacacggcagccaccacagccaggaccgccgccgccgttgccaactgtcgccgctgccgccatcaccacaccacggctgtcatcgccaactgctgccggcgtccagatccggccgagaccgccgttgccaactgctgccggccaactgccgccaccaccgtcgccacaccaccaccgctgtcaccaactgccgccaccctcaagatccggtcgagaggcgcggatctgtggagcaccgccaacgccgccgccaggcaccgcgccgtcacagccacgggacaaccgccgccgcctcagcgccctcggccagctccgtccccgccgccttcagccactgccgcccagcgctgcgcgcccccttcgcctcgctgcctggggtcggagctcggcctcccgtgccggatccagacaagagggggccggatccggccaccccgccgcctccacgctcatcaccgccgccggcaactcaggatccatccccccgcactagatccacgcaggagagcataggagccaacaccgccgcctcgtcgtcgtcggcccggccgcccacctcttcaaccgtcgtcggcaccgccacctcgccgacgccatgcgcaaccgtcgagctcgacgtcgcagccgccgaagtcgctgccccagagctaggtcggggtcgtgggctccgaacactgtgaccttggggggggagaaggccccaccgccgccgtccttgcggccgcgtggtttccggcggcccgctcgggcagcggcgaggtggaagga

SEQ ID NO: 6492 - DNA, 4586 bp, Oryza sativa
cgtcgcagccgccgaagtcgctgccccagagctaggtcgggagtcgtgggctccgaacactgtgaccttggggggggaggaggccccaccgccgccgtccttgcggccgcgtggtttcaggcggcccgctcgggcagcggcgaggtggaaggagggcggtgggggtggtgcggtggtggcggctgggtcgcctcccgtgtcgcccctaccctgggagtgacgcgggggcaaagggtttggcctagcccccgagagaggttttcgcagtgaggcttccttgacgacatctccagtgagaaaaacgatgatgaacaccgacatcgccatccgtcgagatctcaaggagaaccaagacaataggttttctcctggtagcccacctgaggaagaggggtggctcgacaatgccccaaagatggaaaacaatgcctaaaacaccattgttgtcgacctggcaagaccaagctgggctttactatgtcgctcggtccatgaagacctgaagaaaaagctccaaagctccaccacctaccatcctctatcggtacatggtcaccactgtactgacgccctccaccagatagcctcaccgacctctctttcgtcggccctccgcgccatcgaccggggcggcctccctgccatcgcccgaaccaacctcctggagcaaccagcatcagccttcctgaaccactgacgccacctgcgtcgtgctagcctcccttcgttccccgccggatgcccctcgtcagtcagcctcagcccacccatggcatcatcggccacctccacgcatccttcttctcgctgcctccggcaccactcgctaccatcaagacgggcctcactagccaactcgtcaactctcatccacacgcgtgtgacaccatcgccgtggggcacctccaccgcctgccccttcaccgcatgccaccgcctccctgtcacagggagccattgcaggggagtcggcgtccctcgcctaagaagcctgatccattaggggggtttgccgtatctagcgaaggggagccagatccggcgacgcggtgcacagacaagcctatagccttgccgccatggcctctaccctgtcagtcagcggcagcggcatggagtgttcgacggcctcccggagctcctacttctgcgcctcacaaccattatattgatgggtagcacatggagtgttccatgtgttcttgcacggggtagatttaattttcaacatgattttcatgagattcacataattacctctactgtgcatccatgcactatgtatgctctaatatttgtataccgaagcgtaaatcatgtaatcccccaaaaaagacattgttaatggcaatgatagaaactatttatttccttccttttgtttcggcaatgataaaatcatcatgaccttgctcatctgctcacattgcttaggtacagtcatcttatcttatcttatctctcgatcctgctcttaattctctattgttccatttcatctacctctgccttagttggttaactagctagtgcaaatcctagtaggtttaggatgcaacaggaacaaggaattcacccattgtagggcagtggattaatttgtcactacatgatgccacagtttagcaggcagtgacggcggcaataaatcctggcactagggaacggagtggaaaacggcgctaggtgtatggaatagacagaggtgtcaattgcatctattgaaaccatttattttcttcctctgctttgccctacatataaggcatgtgccattgctcacacagtcatctacacatctaattggtcttgctctaagcctattagaatttttgtgcagtcctcctgcccaagttgttccctgggtgcatgcatgaagtgcagtaggcttaggaggcaatgggaatacaggcttcatagcatgaccacattcaagtatcaaattgctatatagttgttctagtgattctgaagagggtacagtactgtctgacgatgcgtgctagaattgatattctcacacacactcagagaccagagtgttgtgtaatatggtgaagagagaaatgataagaggatggtactgcaaattggtgttcgttgtcgtctcgtcaaagtcaaggtagatatagacaatcacactggaagaatatgtgagctatggcctagcaggaaaagtgtttgcccgatgggctcatgggggaagagatggatggtttttatataccggcctgaataatttgaaatgcttcttctagtatgtgttagtcatacttgcaatgagccgaattagattatcgcacagttttatatctagtatattcactggctctaaaagtagttggcattgacatttggagttcaaagttgaaatttcttgatcaacagccgatcagaaaacagcaggggctcccttgctgttaagaactcttgttaataagaaaaaaacaaaaaacaattacagcagtataattcagttctgtactacattctaatctctctcattaagtctgaaaagaagcagcaagaggtctcacttgaaaaggtgtgtccaagaaagcaacgtaggtgaattatgattgaagatcgaaccattacttaggcactgtttgaaagattagcccagggctaattttgagaactaattaatgtttagtcataaattggtaggctaaatattagtctagggtggtatgtttggatccattggctaattcaaggctaaaaggtggagagagagtagaaagagaggagagaggaagagaaagagctgctttttgatggtccctacacaaaattatccccattagcaccccatagaggggttaatgttttgaggagggctaattcactttaacctcaaattagccctcctgtttggatccttgagggctaattcagggctaaaaggtgagggctaataattagcccatagaaccaaacagggccttagcttccaaatgttccacgcaaccaacaataatttctccatacttaaggatgtgtcctaagttattatttccacaatattccagcaagcaactgaaaaagggtattggaagaacaaccaaaaattagtgtctctagagcttgatgactacagaaaacacatgccaaatcacaatctggtggagcaaagttcttatgatccaacatgacatgggctggggttcagtctatccatcaaaaggagtcataaaaaaaccttcaattttaagttacacttactcttccttatccatataaggtgttgtggtggttgactgttctgaaattgagggcatagaatttatgagaagtgtatttcatgcctccgcgtactgttctgaaattgagggcatagaatttctgagaagtgtatttcatgcctccgcgtatataactacattggtcattatcttgggacaaatataattcattaaccatgtctttcataaccagaaattcatcatagctaggcatgctgtgataaatgcaaccgaaatctatcctgaagttgttgattcatgaagctttgaactgaggaatttgtgttaatggcaaaggtaaacactcaaagcctcgctacagtacgctctactagtagtagagaggtagagagtaaccaatcatggttcatcgttcctctttcatctcaactaatgtttagggcccgtttagttccaaaaagtttttcccaaaaacatcacatcgaatctttagacacatgcatgagtattaaatatagataaaaagaaaaactaattgtacagttatgggggaaatcgcgagacgaatcttttaatcctaattagtccgtgattagtcataagtgctacagtaacccacatgtgctaatgacggcttaattagtcttaatagattcgtctcgcggtttcccggcgagttctgaaattagttttttcattcgtgtccaaaaaccccttccgacatccggtcaaacgtccgatgtgacacccaaaaattttcttttccccaactaaacagggcctaacacttcacgttgtttggagcttgtctagtagtggtgtaaatggaggtgcatgtggcccatgtggtgtaaattgggctgtgttcgttattgggggttgggaacccatctcctaaaaacggagcaatccattagcgtctgattaattaagtattagctatttttaaaaaaaatagattaatttgatttttttaagcaactttcgtttagaaactttttgcaaaaaaatatattatttagcagtttgaaaagcgtgcgtgtgaagaactatagagaggggttgggaagtggctgaaacgaacgaagccaggtgatggagttcatatatagtacctatgcaatatgctatgtgtgtatgcagatcctactccttggaacagttgagttaatgtgcacttttgaggcgtgtctttcatacaaagtcatttatgcgagtctacttagggtgtgttcggatgcccccttttcctaaccctctttcttgttttccacgcgcacgttttttaaactgctaaacggtgtgttttgtgcaaaaagtttctataagaaagttgtttaaaaaaattaaattaatccatttaaaaacggggatcca

SEQ ID NO: 6493 - DNA, 9533 bp, Oryza sativa
ctaacgatactccctccgttccataatataagacacaaccacttttcttagatgttacataataaaaggcatgcatgcaagcatgcaattaactatagcatcttctccattaaattattacttttttaaatcctccactctcatgttatctaattctattggatacatgcattatatttattaggatgatccaaactacaagatgataataattatttcttagtctttggattaagagtggttgtgccttatattttggaatggagggagtaatatatattttttttaaaaaaatgaactttcttcatcaacatttcttatatacatgtatatgtatttacaggtatatgtatatacatgtatatgtatatatatactttttttaaaaaaaatcaacttatcaactttctgatatttaaatatttatttgtgttctcaaataattataatccaaagctatttttaatttttttaggactcaacaaagaaatatacagcttgagacaagtcaaatatgttccccgcaaaaaaaaagacaagtcaaatatgtatgtctaaattatatcttgaattgctaaagctgttattgccttttgactagatggttttctattttgcttcaagaaaatggctgcctgttgagaggcaactttacttgctcatggcgaacacaatacacttcagaatttaaaaaatgtagaaattaacattagccttatgaggtattttatggtccttaaaggaagataccaagagatgccacacttatttgtgttaagctatggtgcttcttggtatgtcaaacactagaagacacactaccgtaaatctaacaataaaatcacagaaagattcataaaatagctctgtaacttgtaaagcaaacataaaactttcgaaccatccaccacactgcaatacagagagccctgaatccacatggttaattcaaagatttttcccatcaaactattgcataacacggtcatgatctgcattttgcaactccatgatgttcaggcaaatatgatgcaatctaactcaacttctaaactgaaatcttacattaccaagacttctctaatctctcctgaaaaaagggaaaaccacctatcttagcatcacaagctagcagggttaacagtcgataaagaacaaaatgaatgtgaaccttacaagttacaacaacacatctggaccggccaaaagatttgaggcagctttaaccatcgatctcctcatccagaggagagaaccatttggtaccagactaatcatccagtaaaaggcatactgttttttacacaatagcccatacaacgaaccactcaagctcgacggcatgcctaggggcatagccgtgtaggagctccttgaccttgatgaaagcggtgaggtcgaaccatatttgctaatggctcggttttgcacgtttcatgccaccattgctgaaaggggagacgcttcctggatgaggactgtcctctctcagagtagagttcagcattgccagttccctcagctgttgtcttttatagtaatcttgcgactcatcctgcaaagacgaacaaaagaggtcagctatgaacggcggtcatagctgtaagcaacctacagaacatggttcacagaaaaacactgcaggaataactatcatagaatgacaacttagggaaagaataagtgagggggagaagaaacattgtatatgaaataaaaataaattactactcaagaagagctgttggaaaatatctcaaataaatagcaaagctacaatgtgagacaacatgagaaaggctagttctgtggcatcatatgcataagcttcgaaacacaaacaaaaaaatggtccaggggtatgaaacggaaagcagccaagtctgtaggttagcaggattcgggctggcacccaaaacttaaacccttgccttctcatcacctttgggcccttcatcataaacttaacattgcagatccactgcaatttgggacgatgagtaccacagtgccagatgtatagacataccgcatccacttaacaatgatttgcagcaacaaaatattcattatggacaacaatgaagcatggaatggaagtaatgacttgggatttatggaagaaactttgttttgtacttaattttaattttatgatttgatacaacatgattcatttctgtgctttcttggcaagtaccaaagacctatttctttctctctttttgtggggaaacagacattttcccgcatagatcactgctcattttcccaggaaaataaccaaacatgcccttagctgaggaaagctgcaggtctgactagtactcttttggccctcaagttgcatctgttttgttactatggtgaatgttatattcctgaaagggtagatttactaagtttgtactgcaacactctagatatagtattggcagtagactaagtttacaatttagatcatcattgaatatcttaagggtcattaactccaattaatattactggatatcagttttatttcattatatatggccctcttgatgcccacagggtcacatgcagaaccacaatcagagaaaggaaactattcctgtcctagcgactagcgctgaggactgtctccagcctagatctgcacccataccacactaaccagttgcaacaatgaggacatcaggaccaatgaaaagtgctgccactgggctgcgaatgagagggagaggtgaagttaccatgacttgtatggggtggtacctctaaattttatgtcaacaaaaccacagagatgcaaatagctgtaactactccaataagcatggagatgtaaaattccttttcagttcagtcatgcaaaaaaaaaaaagataaaaaaacataaccggtgaaaagtttgtgccattagcctgtatggtagactttatggtagcacatttctaaattctaaattgtgaagtggtattatccaaatttcagaataaattaatacataaagtcatataaattaataccactggttttagcagttcatccattatttcttgtgcctgcctcaatcttgtatcaatgatattggctggcaactcagcttcaatcaagatatgcagtggatcattgaggtgctcatagccaggttttcctttcagcttctcctcctataaaatagaaaacaaagatgtgtaactgtgtatatttggaggatatatgaggggaaaaaatatggacaaggagcaatctggaatctttcagcaatcaagattaatatatgagacagagtactatcacattattgatgtaacatgttaatgggtttaaggggcaagacagattcccagaagacaagatagaaacccatatgggaatatagtagtacaaaatactaacatatgttctacaaagatgcaataaaactcaccaccatatatcatgaacccaaaaaataaatagaaaattgaaatactagaacaatacatttgtccaatacatgtaagcaaatacgttactcaatgttactaacttattattgttacaaggtttatatggtaagcaaactgatgagcaggcaatataaaatctgccttgaggcacacaatactccataaaaacaattttttaaacagttctttttgtgtgtttcccatgtttcttcgtgtttcagatcaatttaggacgaagtttgaagaccagaattcagaaatactatagaccatggcagaaatggtcacaccaataatggatagttaggatttactaatcagggaagagtacaatgaaggatttccaagatttctacaaaggatattaaattaaacataacaaagaagtttatcatcctagctagctgtaatacttagttttaatttatataacgcatgttatatgagtatataaatgtaaagtaattaacatttacaaacgtttgttaccttatcagcatctttgatagaacccttccctctaatgaaaacacgacaaccagttgatgcttcaacccgctttagagaattacccctcggtcctagaatacgtcccacgaaattgaactggagcaaagcgaaaatagcagacattaaaaacaagacattttatctgctggatgataaatcgcataagaggaacacatacattagggtaagcatcaactggaacctccatgcgtacaatcttcttgacaatataagagccatgacttggcggtgcgccttgccagtccatacttgtcccaggaggaggaggaggaggaaagcctaatctctgtcatataaacaaatcttattagtattgctcacaaagacacaacctaatgtacgccagccaaagaacataagaatcaatggtacagagttttgatgaccttctatatacaattgaagaaaatttcttcagaatcagaagttgaaaacaatgagtaaatgtatagacaagaagattcttgtagtaattaaaagcttgttttccttttgcacttttcagtaattaattcattatacatacctcttggtgtatgccattccaaggcccaaatccattgccatgtaggttgggtctcataattggcgaagacatgggactcggacttctataacgacgcctgtcaaaatcgttgaatccatggtcgttgaccatgcttgatacccgcatgatttctaaacaacacaaagattggaaaaggaggaataaataaggttattacttagaagtaggagtttatacttttttggaatgcaagagttagatgatagctatgatcaaatcataacttccctatgagaagcatttaaggtagaagtgaaatcaagaagcacatcaagataaatagatattacatggtgcaaatatatgctacaattagaagcaggtttgaatccatagcataattcataacaacaaatatattacttacatatttcagtttgaattctcgaaaatggtcagttaaagggttaaaccaggaaagagtgtccttatcgatagttatccaacccatttacttgggttgaaccgtggagtgggttttagataaacagagagacatgctctcagtatatgacaaaaaaaggatgtatttatttgtggatacttgctctattttccagcctatagtaaacataaattaaatgcccgccttgctcatctataaaagaaaaattgcaaatctaaattacatgtagtaaatccatgaaaacaggccgtagaccactttataaacactaaaaggtgcagtgagaaattgaggcaaaaaatttgacttcccactaatgcagctaaaaatagaacctgatcaaatgcagtctgaagctattcactaaaaataaaggcaacatactcaacatccgaagttcccagcccacaagaagaatgcaaatttctccaatatgagctaactattcatgcaattcttacacattcaaaacatcttcatatattaaattcaacagtttcttttatcaagtaagcctatcaacagcacacggtgaagcgcaaaaatttgctgatgcattcacgcccactgttctagaagagaggcagccacctatagctcacttaggtgcccaccttgcctgcctgggtagcgacatagcagccaggacatcttgttggctacttgctgctagccgcacctaacagatcagtaatcatcctgtatccacaatgcgcataccattgtctgctgctgatgcaatggacaaatgattgcaactctacacataaatcttgacaactactagttctcatcaccactttatttttcatcattgatcttcagttctcaacaagtctcaatacatcgaaacatctacattatttgaaggcaaaaattcaatggcaatcaccaaaacagcgcaacaagccttgattcgcatgctgtattataccattacactcggtcatctctgttgtgttgtgcatataacccccaaaatattctaacaatctcatctcgattggcaacgaaaaattcccgagaaagaacaagagggcaactcggcaactctatccaaacataagctgcaggcaaaatcagcagcatcattccacgcattggagccacccgattcccaaatcccgattgcaaaactaacaccacaaatcccccctcttcctcacacgaaacaaacacaacccccaccaatccgtgacaaacagtaagcgagagatcaatcaatcaatcaatcaaaaaaaagaaaagatctcaccttggttgagcagccggctgcatatcggcagcacctgcatgaaaggccccagcttgtgatgctccgcgagcagctcgctcaagtactggctgcaaaaagaaacaaaacccaagaaatcgcacaaccaatcacctaaacaaatcgaaaaaagggcacgcaaccaagagcaagaagcaatccttggatcaaagaatcagcaagaaacacagtagcaatccacggcggcggcggaagcgggcgaggccgtacctatcggcctcggggttgctcctaatctggggcgagagggttcttgccggggagaaaccctggtggttgtagaggccgcctgacatggtggcggccacgagcgaggagaggaggaggaggagaagagaggagagggtttcttggtttcttttccttcctagcgaagaggttgatgatagagattagagagaggaaaaaaaatatgaagatggtggaaactggaaaggttttgatggttccaaaaagaattaaagaaaaactaaaaaggagaggtttttctgctttaggttacactacctgccaggttctgttggataaaggggaattgctggctgctcaggtgaaaattaaaaggagggcaggtgataggagaaaatcccttacctcacatcacctaaatggctatttcatagacggtataaattattactgagtgaaattacgtgtgtgtatatatatatatatatatatatatatatatatatatatatatatatatgtaaagagaagtaatgtgataataaattaaacggtacaattaaataaagtaacccattatatccaatgctcttgttgagggtagctaactctctccaaattttaagtgcataataatggctttgttgctctagggttttagtgtaatagatttttggagcaatattgttacgggcttatttaagtaaggatgtgtcaatagtgctggtttataactcattctcccccataaaaatacgaggtagcttattaacgcatgattaattaagtattagctaaaaaaacttgaaaaattgtattgatatgatattttaaagcaatttttccatagaaaatctttacaaaacttacatcatttagcagtcaaggaaacgtgtgcgcagaaaacgaaggtgtagaggttgggaaagggtaatgccgaagtcatataatggtattgtatggttattttatattttgactggtttatcgttaatgtgtttttcatatggtcttttacaacaaactggagtaaaaataatttgaagacataaccaattgtttggcttatattaatatccatccacatcttggacaagcaacagtcttgatcagaagatgttcttttcatatagcaaatgctcttcatatgcaatcatgcgagctaagaataaggcttctcccttccgtagcatttaatcaagtctgcttacttgttatcattgttccctctatcattttcctcacaattatgagcccttttcgttttttttttctaatatcaatggttcgatatgacgagactagctagccataatttttttttatagattgtgggttctcaccacagaggctatatacctgatttaagtcgacctcatcattaattaatcatgccaatatttggcaaaatagagttatttatgaggggatcaagccaaataattttcattgccacaatagttagcataaaaaatgttgtaggcgatacatgaaatattagaggaacatagtaaatgggatggaataatggtaattttagtttggattgtaaggatgactaggcagccattccctacgattgtgcagcatgcattaccttggctgatcgtgcagaccaaataacctgatttattgggcccttttgaattgcatgaaagaaaaaaaaagaaggaatagaacatatgattgcaaaacataggaataattgtttgattggaccgtaggaaaaactcattggaaatttttcaagagctcttgctaagttttctccaaaatatctataggattgtccattattctatatgaatatcaaaggattggatcaatttcaaaggattggaaatgatccaatcctttgattcaaagacattcataagaatttttctataggattggaatcctccaaaattcctatgtttttcctccaaattaaatggacccttaaattcttcttaatttttgtgttatccttatggttcaatcaaacaatatttttgtgtttttgttgtattttacaattctatattttacgcttatatttctgttaaaatcctaccttttttcctttcatgttcttaatcatgcatttacatgtcccgtagcccaaaactatttttgcttttgcagcagctgacgttgctgtctagctcactgcagtttctcttactagcgagccggaacatttgtcataagaaaaagaaagacctcactgcgtttacaaatgtcttttaatatcaagagactctaattgttgaccgcaattgtggtctaccgagataagtatcatgcaaatcatatcatggataaactgaacatttataagtatcttacaccaaagatgaaggtaaacaaccatcacaatctagtccttgaatagatgggaaatatactcatttatttaattaacctactcacttgatactctaacctctcaaaagcaccatcatagctaatgatcaccgtaacaagatgttgatggtcgatatatctaccaatacatcataaacctagcaaggtggtgggccattgaagatgttgggctggccagcccaaaccttttaagctccttttttgcatgttagctcagcccagagttctagtttccattcctccttttccttttctttcacttttctggaaaaataaacaatcaagtttgatatttatttaattagaagaaagaggcacccgatccaattcaagttgaagatgacttgagctttgaattcagtggtgggaattattgttttaattaactcttactctggtaaaaaaaatatttattgttttgaacaatattcttacgaacttgtaaaattcaactatcaataatttctcaaatactttgtttaacaaataaaataatatatgtagattttcatagaaaattattataatcagaaacttattataacataaaattggttatcagaattttaaaattttaactcctaaacgttaaatatttttgaccggaggaagtatcgttccaatatttattgtttataaaataactcggagttttggtaaaaaaataattagggaatattatatacaattattatttatagaaatcaacatcggtgtgcatcctcagtgtttagtttt

SEQ ID NO: 6494 - DNA, 13175 bp, Oryza sativa
aacattcaagatatcatgtgagataagtagtatttaatttaagtatgaaaaagtggtgtttgtattgtaagagtagtgtctaatactaatttcttgatgatgtggagtttatgaaaattatgtctaatgtcttgggttgggactggccttatcatgctctataaatcttttcctctcatctctcttcttttaaaattttgcaacacggctaggcttttgagcatgtatgcctcttgtgtttctctggcagtactctttgttattaggtgtgcatactactagcgcaggctgtgcagtgggattaggcggtgtcaggattgcaagagtgaactccacactcacagcggatccacactgcatgtgtacataaacatgaagacttcatgctgagatctgtatgattgtaggattggctccagggatcaatcttacgaatccaacagctgcacacacgacttgtgaatacgtcagttcctccggttccaaggttgcagcgcataaagtaaaataagccccatttgtttttggttttcatatgtaatttgagtttcattaatcacaactctatcaagagcaccccttttcagttgggttaatttgaaccgtgccattgcaaatatgtctattcagataaatgttattacaatttatctattcgtaatcgtgccacttaaattttcaaaatggaaccatgccatcgccgtcacgttttctatctttttttccccatcgacacgtggggcccacctgtcagattcatcttcttcagctccatcctcccatcttctctttttttcttcccactagttaagtgcccgtgcgttgcaacgggaaaaaaataatacatcaatttcaaattatagagtaaaattgtgctgaatagttattgagtgtttcttaataaaaagtagtaatgcaataaaatcctaattcagtctggggatatacgtattcagctgtatttacactcatgacatcaaatcaggtaactaatcgcaacaagtatatacatacagatggcattgtgtatttcgtaacatggcaagtgaatgcaagagaagtaattttgcgagtataggggacaaaaccaaacaatacagcataggaccacacgtccgcaattcaaacccagagcaataccataatgtttgcactgctaggatatgatagcgtcaacgattgattgagaacacgcacaagtatcttctgtcatgaggcacatattctctatgcctgcaatatattcaatataaaaatctaatgaaccacaatacataaagcatcaatatgtcctctagaatcacacaccacaggtgcaccacaagctagcttgtttggtcatattcatagcaggtgatattccaatgggagaggaatggaggaaggttgtacacttgctggagatcagagagtgacttagtttggtttgcctggataagaggaaaatgggtcagtccttatttgccagtatatagtaatagttatatatgtatgtcataccattcccgtataactattttctctatatgataatactatgtgtttgcttctaatatatactggagcataacatgtaatttgtgcaaagatgaaaacatcagtcacagcaaaatctttaaaaaagaagaagggaaaatagttgcataaaagagaagctttgaaatctggatcaagaaatgacattgtcccatgaactatttctcaaaaggacaaatccacattcttaaaagtattagtatttcttaattttctccacaagttcttcaacaacaaagacatttcatgggtcaattacagaaaatacagacctaaaaacaaaggatagagcctcttctttataagagagaagagggggaactttttggtggatattttagaacagtcgctatggttcaaggaaatagctaatcctcaagtgggtaatggacaatcaattctatggttggatgatacataagccaaaaaaattgaattgaattgcatatgagcacagaggtagccattcagggctcctggacccactaaattgatactttgctgaaaaaagggaacaaatcaatccaaaagtcagctctaaacaaatgacattgatctgttgatgtagcataagcagtgcaattaaaagccatggaatatgagtaaacggatggaaggtttcgtacagaaaaccccaatttttgatagcctaacaagaaccaatttagggagcctcataaataggggtggaaaaaaagctcgggctcgtgagcttagctcgggcttggctcgagcttggttggcttggctcggctcgtaagccaaacgagccaacccaagccttctttttagctcgttgctgaaatgagccaagccgagctagctcgcgagccgcttgttttggctcgcgagcctaggccatcgtgtgtttatatcgattattttactttatatggcgttattatttgtcaacttgaaatttatcattaagattttgaactattgaatatataaacttatttaaattttacatgttgatgatttgttctttgctttttttaataattacaaaatatatatgaagaggtgttttaacaggaaggcttgcaaaccagctcgagctggctcgagccaggaaacaagccaagccgagctcaagttttagtttgtttcccaaaccaagccgagccaagccaagcctagtttattgcgagccactgcaagccaagccgagctaggctcggctcaactcgtttccagccctactcataaagctttctacaaaatgcaggccatacaaaatgcaggccacacaagaaatgctatctacttacatcaaaagaaatctagctttgttcttctgaaaacagatttgtaggcagtcctagcagcctatgtactcctatttgtaagttaaatatttcttaacttattgttaaaaaaaacatgtccagcatccttgagtctagcttgcatcaacactggctacttcaatcccatgtaaacatatgaatatgacaggcaacaggataaagtttaagagaaaaatatagagcaaaaggtttgtagttgcagcctcaatcccatataaatgtttaaaagcttgacagcctgatgtaagattttttttcattttccaccgctggttgtacgattttgggtagcaatcgattgggtgggctggacaggtgcagccaaaaacgccgcaacaatcagaactgatcagtctcaatatgctgtgacttgagaatttaatgcgttaagaaaaatagagcagcacttaatcagaagttatgtgcaattgatctgaagatagcattatatagtttagaaaggatatggcatcgaggtggggaacaaaagtgtgaaaatccccaatgatggagcagaactcgatagtgaagcattacctagtcatcgaacatcagtttcttatgccaacaagatctcaactaaattgcaagctcaataaacaaaagaatcaatatcctctcttgttctttacactatacaaagaccatttcgtttgacctaacccatccatcctgcccaagtttttcaagtctaagccattggggggagttcctttagttggtttgctcagtgtttcacaaccactattttcgcaaatttgcatttgaactgtaatggttgaaagaacgagatctagcgatgcttaccttgtccacagcatggtggagagagttctggtggcatcggaaaggagagcgtgtctgttaggtagcctcctagtccttgctcacgaggaaaagcagataaatcaaccataggagatggtggaatatcattcccgttgtgtttcaaagccctagaataacaggtaatcaagcatgcatatcacacattttatcctataaatgatggacctcaagcatgatttcaagatagagtgaattcacattgaaaacctaaaaacgggctagtgcaatttacggatactaaaaaaagtaggaatgtccactcttacgtgagtgaaaatgtcaccaaatggatgactcccagagaagtcatctgggccaccacctgacgcttggcgctcagaaaatccagtagaacaatcgatcgcaaatcgaaaatgacaaatcacatattcactatttatgtcagtagtaaggaaggcaccatttggcattgagacagattatcatagtcctgtttggtgcaactgcttttaaatattattttgttgtttggataactgtttcccttagtttgatttataaaacaaactaccaggaagatagatctatatctctacggaaacttaaaaagcacatgcacagtcacagaaaatagttaataacctggtcgtatgtttcacgcttatcttcatgcttcaaaacctgagataagcatgacaaaacacaccctttagaataagaatgtccaatggttaatgtaggacaagctaagatggtgcccaaacaaagaaaccaaaaacatgttcaatgtaggacaaactaaaaatactctgttacttccttgtttcaggcttccattttaatttatgagtttccagatggatgttacatgcagcttgcactcatgcggttaggtctgcctagcgatggaactccgcccaccagatctatgctgagatgacagcgaggaaagaagccgctgaggcgctgacatggcccattctcctcccgcatacggcccctggtcatgggcgtggaccgtggggaagggatcccgaagacgaagataggagcgtggaatgttggaggtgaggaaatattgcaaaattagcatgcaaaaaacatcttaatggactgaataatatgcacataaataaaccgatgaaaaaaactcacatgatcttgttaacgatgttggtgtgatgcccccaatattgttatccatatcttaatttagtgttagccagctgaacaatcctaacagcatgcttcacatcgagagttaaaacttgtttctgtaaatcagaagaaaaattcaaaagtaaactaatgagagtgaaaataaattattctgaacttaactctgaaaacagcttagaaaagctgatgatattcgcaacatcatgttccttttgaataaaaagtatgaactccaagcagctattatatctgtttattccatcgattaaagatactttccattaggaaaaagatatattagctgcacatttcgtagaacacatgaatgcttgcaggtatatattagctgcacatttcgtagaactcatgaatgcttggaggtactctccatgcattggttatgtatatgtgtgtttctggtgataacctaaattagttacagattacaccttcagccaacatttagcttgtacaagtccaactcaagatcaacttctatattgaggcataaataaggaactctcaatttattgaggataaattatgaatacactgtgagaggtctttcttgaaaggaagattactatgatctcattaagaacaacaatagtagtgcggcatacacattttttctcaagtttctagtttgcatgaaataaatatcagttatcaatgttgataattcgaaaccacaaacaaaactatatacttattaagccgtaaggctgcactatcaggtcacttattgctattttttgggtttttaaaaaaaaatcatcatacacatggagggtctatatccttataactatgtgaatttggaatgtgagtcttatcctacaaattattggaagcatacactaataaaccattttatttgcactgtgcctcaactctgtagccaagttaaacacagaagtatttaatacagtaatgaccttttcaattcagagctttgaggcaaccttctgccacggcggggtgatcggttgctgctcggcgcggggtcgtgtcgtcgggggccagctcccatgatccagtggcgactgcagagggcgaggagggaggagaggcagtgtggggtcgcgttgttgggggccagctgccgcgatccggtggtgggcgaggagggagggaggcgcaggcggagatgggggtgggggcacggtcggagaggggcggcagcggggtgaccgtctgctgctcggcgcagggtcgcgtcgtcgggtgctagctcccgcaatccggcggtggttgcggatggcgaggagtgaggggaggcagacgcgtcgtcgggggccggtgtcgcgatccggtggtacacgaggagggagggaggcgtcggcggcgctggggtcgcgggcggaggggcggcgcaaggggtgggtgcgcgggcgcgattgcgctggggaatcgggagcgagcgggggcagcggcgaagggagcggggagagcagttgggaagaggggcgcgatagagggagccgaaaggggagagggcgcgcgtctgaagcgttgattttgcaggaggatcctagaagcaatcttagcccttgaattatccaggactcaccaccaccactagagaatttttaagtagtagagatatgtctccaccacttcttagtttcctttctgccaacccatcctgacccaccacttctcagtcggcccgccactattgcgtccacctcgtcgatgaagacgatggctgtgtcctgtccctggcgagccggaactagccagtcaggcaccatactcggcccattgtaccatgcaagcctggtgctgttcatgccgaagaatgcctaccgaggtctcgcacacgatgaccttggcccgcatgctcttcccggcgcctggtggtccatgcaggagcactgggtgtgtcagcggcagcttgacgccctcccggagctcctgcttctgcgcctcgcaaccattgatgtcgtcgtacatgacgcccggcttgtcggtgtccgccatgatcggaaccgtggtgccgagcagccggcgatgtcggagggaaccacgccgacgagtgcgagcgatagacggtgcagcttgacattcaccgagggcttgaggaggtcgtggtggagagaaatgggaaaaaaagagaagacgatgaatctgacaggtgggcccacgtgcagatgaggaagaagactgaaaacatgacgtcgatagtatggttcccattttgtaaaatttaagtggcacggttacgaataaatgaattataatgatatttatctgaatagacacatttgtaatgacacggatcaaattaacccttttcagtttgagctagagactcaagtctttttttctcaaaaattatgtgtattattccatgtaggtcctttttccacatgagttttgttgtgcgtcctctgttttgcctatacaaattaggcattacttttgcactttttaaaaccgagacttttaagcacatataggggccagttttagacaaaaactggtacatatagtattagtatttttttaaaaataatacctataatatattatagctggtgttttttttaaaaaaaataaccaacatatgtaccactacgagccaagcttgccacgtggggagcaaaaaaaaaatgttgtgttgtgtgcgagccaaatatctcagcttctccctcacctaattcgctccctctctataggtctccctctccctctcccgatccccacttttccagctctccctctccaccgatgcctctcattggcagccaacggttcgccttggccccctccctggtgcaaggcggccagtggcccatctctccccagccccctaatttagatttggggattttaatttggatttgggacagcgaggagcaattcgatccatcggtttgattcgagccgatttttttttacctcgcgtgcatcacaaaggtgtcgatggtggaactgacattaatgacttggagtcatctgttccacctctgtggtgccggttgggaaatccggcacctacgaaggtgtcccaaccatcaccgatggcactttctgtggtagtagtgtggctatttgggaaatcatgatgttatatcatgcaagtatttacaatttacatggtgaacacgcattgaaatgcgttcaccccagttcattcatcagtcgggagaaaataacttcaagcattcatgcatgtagaaaataactgccatatactcgagacatatctacatcagtatgcacctttcactttacatagctaggcttagtgcttttttagcatttttcattgttttttattagaaaacagtttcgaatatgcgtaatttactagtcttaggaagcatcgggaatataaggtcaacgatcatcgtcctcatgatagaaattatggtagacacgtgtaaaaaaatatacatgtcggaacatgagagtttggttgttctgtgggacaggacacatcagcaccttatgtttagattcttgacttacacctgccggtggaatattggtggtaccttccaccatggtgcatcaagatgcaagatgtggacaaatatggcatttgcatagtttgcttaagaaccagaggcagatttaaaagtcactaggaatatggtagatgtgcttcctttattagtccttccttgaatactagctttactttgtggtttcttctcttttcttcgaccatcacatttgtttctctatgacatgattagtaagcatcaggaacgaaaggtcaaccttctcagtgaacgctcgatatcaatcattgcacacatattggagatgaccaggatttccttaggtgaattctggcaaggaggaatgatcacacacataaccccagcttcaaccgatggaagaagacccgaaacacaaccaatgtaaatactaatgtaaatcaaccgtgtgtacatttaatcatactactagaatactaacactacgtgcaggggttgaggcaagatttcaccgagagtaggaccaagctatgctgtttcaaaattttcaccgagtttctatctaaattttggtatatattttgccattgaaattctttgtcacgtgtggggcccaagcccaagctgcctcacacgtggcttcgtccctgactacttagtggaatgtactgtaaaagctcccacaatccttaaaacaagagataataccttctaatagcttagagcttcagtgtacaactcgaggttgggctgtggcggtgcagttgggctagtagcaaagcaaggtcgagggttgggtgaagcatcgctcgcacaaacgcatctagctagctaccgttccgacaccacttgtggaaggagctcatgtgcatagggatcccacatgcatgcctttcactttttctgtgatattttcattcccgagtaagatgtgttcgctcttcaagctcacgccacgcatttttggcccaactaattaagcagcgtattgcccccaaaaaactggattgttctcctgtctaaacctgcgttgaatcaatataccaaaatgagtagggcactacgttcgcttgctagatggtgcaaagacagaatcgaaggtgaaattgttaagaaaaaatggagagagatgagtagaaataaccaccgagagaaagtcttcctaaaagctggtaacaaatacttcctctgttttaacatttgagcaaatttatagaaaaatataataaaatttgcaacacaaaacacacattgtcacttatatgggcctgggggtacctggctagggaaaagggaagcccttcctgtgcgacgcgcccagcaggcccaacgcccctcggaggaacgcgcgttcggccacgaagcggccgccctccccccccccccccccccgcggggggcttggggtaccttgtcatacccctcgggcccgaggggctgaaccgcccccaaggccctcgctcggccgccacgtggcagccatgtggggacttgagcgggcgagagcgccgtccaccaggcgcatttatgggcagcgctccaaccgccccagtcgcatttaatgcaacgtggcaggtcgtgcgccgcccactgatggacgtgcgccgggcgaccactttttgactggtccgtgacccggcgatggatggatgggacaggcggcagcacacccacgtcccacttcatgtcagacggcgtgggggccggtatgtcccgtcccatcatgtgcagggaaaggacgtgcaggtcgccacctcccacgcgtgtgtgcccacgaagtcgccaagcatttaatagggaatgacgggggacgtcccccgtgtcaggcgaaagacttcggtgggggccacccaaaggtagcatggatcgcttccagcccaaggcatgggacgcttttttgtataggcagtgtgggcccctcttttaagaggagagcgtaggggcagtgtatatggtatcccctttatctataaaaggaggatctcgccctgcgagcaaggggacgactcctggtagactagattttggttagaagctgtccaagccctaatttgtacgcccaggatccgaactctctgtaaccacgcgaagatcattacacacacaaaagtagggtattatgctccatagcggcctaaacctgtataatctccctctctcatttcctcgccatccacctcgcaagcctaatccccgcggatccgcctcgctttcgcgaggatacgtccctaagcattgtgcctggtcccctagccgaactcacaaaggggggcctcacaatctcccgctagacagtatcaccctctgacacacatgttatcaaaatacattcactgttcaatttaataaaactaatttggtgtgtgtatgttgctattttttttttataaaccttgtcaaacctaaagatgtttcaacaaaaaaaaggtaaaaacgacttgtaatatgaaactgagaaagtaacaacaacattatccattaaaaaatgtattgaatgtgagtatcaattatgaggagattactatggggttaaatacactaggattcaatttgtgaaactcaataggaggctgcgatagttaaactaggtgaaaccccgcccattgctatgggagtttactatgataataataaatagaaataatgtgtaagatagctagacgacagaaacttgcatatagtgatgtggtttatgataatttaaataatatagaatgatgatccaaatgtaaaagtaatatcatgtgactttatgatagaagaaaatgagggagaatataattccgaccatagattaatcatttgatggctaaaaacaatttgaggtgatatggcttaatgagagaagagagaaataacattgactaagtgaggatgaattgtataggtatatagatattaaacaaaatgatggagagatatattgaaatattttgagaattatttggaatgatgatttgacatgcttggattttaaaagctctaaaatttaagtgagggtgaactgtataggcatatagaatattataaaaagtgatggagagatatattgaaatattatgtgaattatgcgtaatgataattcaattaacatgcttgcaatttaaagctctaaaacttaataaattagcatgcttgcatgaggtttgagatgcaataattgttaatggatgatgtggcatctttgcatgttgaagtttaggatttagtgtaccttaacattatagaaagataggatatgtgaaccagcatgtacgtaaacatggacatgatagaaatgtcactggtgcatactgcctcaaattagattttcgcgagattcacatatttatctctatatgcatccatgttttatgcttatgtgtaagttaaatttatgccccatccatgtaatcctaaaaataattatatatgtgcctatgcaaatggcattacgtacggggattcccattagctagaaaaatgtaaatgggatggcaataatcatagaaaccatttactatatttcctttgtttccacctacatatataaagtcatcatcttgactgtactcatctcctcacagtggttacatatagtcatcttattgggcgcccttctctatatcgtatggattgatgttccatccaccagccagtattgtttcttaggtgcataaagcctagcaagtaggtttaggaggcgatgggaacttacgattcggttcgtgaggcaaatggagtacttttgcaccttatgttcagattgtagactattggtatattggtaccttcctccatagtgcatcaagatgtgtacaagtatggcatttgcatttcgagcataggagcaaaagctaggcaagatgatagctggataggaaaatgggtctggagtggatatcttaatcaagggctatggttacatatcgtttaacgcggaacaatattatgttgctttacggagcattatgtgcatgctattattttttagataaccgcatgttattaaattgtgtgactgtgtacattttgttttgagcctgaactatcccatcttcagtacattcatctgacaaaaaaaaaagaaaagaggagcggatcggacaataaatttatccagcactagtattacagaaaactagaagaaaacatattacaatacaacatgcaaagcactaggaaccattttgggagtataagatttactctgtgcgcaccactatacacatgcagtgtcctgcgcaaaaccttgttcctcttctaccggtgttcagtaatcagtaggcttgtttaagttgtttatttgcttagtactgtacaccctattttttatgtgatacgtggtaagtttagatagtattcagaatacatggaagacttaaatctcagtgcagagaatcaggtgcatgtgcacagtctttaaaagaaagtgtgagtttcataaaacctattaggctgtgctcgggaggtgaggttgggaactcacctctcgcgcacgcaaaatagagtgacgtattttcttgtgattaattaagtacttttttgaaaaatagattaatatggttttttataaaacaacattcgtatagaatttttttttgaaaaaaaacgtatcgtttagtagtttgaaaagcgtacgcacggaaaacgagggaagtgatctagattgaaaagttggggaaagaactcagtctcagtccttttatgaagtatgaacgctagctcactttgtagtttcttcttccttggatcatcagatttctttaattttatggggtatccgctctgtcagagaaaatggaaggagaaactaatgagcagaaataacaaggaaaagatagcctatgtaaagcctggcaacaagcactactaaaaaaaggggcataggtgccggttggaa

SEQ ID NO: 6495 - DNA, 24872 bp, Oryza sativa
cttgttttgactctacggaggagggaaaagcattataggtgccagtttagctgttccggcacctatagtgccgatctctatgaggttttttttttactagtgaagagcattatccataaaaaaaaatctgtattgagtagttcaaaataaacttttattccaatgattacatggctatggggttaaacacaccgggcttcaatttgtgaaactcaatcagtagaggacatggttaaatatgtgaattatacttgattccaatacttgaagtgccaatgtcactggtgcgtactgattcaaactggatttttctgagattcacatatttatctatggcatccaagttttatttatgtcttacatgcctatcatcctaaaagttgttatcatatataaaaaccatttagtacttcctttgtttcagcctgcatatatgaagtcatcacgacattggtcatcatgacattaattcactactggagaaaccatctttggtcgatcagccaaatttcacaatagttccggttctaataaaaaccgggactaaaaaatatctttaggaccggtttaaaagctcaggagtacttctgatctttagtcctggttcaaaaaatggtaggcagtgtcagacccctatattttctttaatcccggttggtgatctatttttagtcctgcttagtaacaccacccgggaaaaagatcagcatacacggagatcgaggcttgtgcgtggatcgaatcgagataactatctcctcctccctcccagctctacttctatctcctttcctcctctcctcacttacaccctatctcttcctctccttctcctcccccctcccccctcctccccacttctggcacgcggcggcggccgggtggcggagggccgggcggccggcgcggagggcagcgcagctggcggcggccggcagccggcggaaagcagtggcctgcacggcagggcgcggccggttgcgccttgtgttgttttttttctagaatttgtggtttggatctgagatatatttgatttgtgtgtgatgtgaatatgtgacgtttttgtaatgaattttgtagaacttgtgatgtatctttttaagattttgtgatgtacctggagatgaacgatttgaggatttggaggtgattatcgatttgggattttactattcggggaggattgatttgggatttcacgatttggggacgggggatggagtgaaatcaatatactaaaaacaatgaagaaaataaaaaaaataaaggactaactagaccttgcctgggactaaatctttagtcccgggactaaaaatggatttttactccgggttatttcaaccagtctttagtcctagatttgtagtcccgattggaaatccaggactatatagggttatcaaccgggagtaaaaagcatttctccacaagtgattgcttacatatagtcattggcactactacgaaaaccatttttcgtggcggccattttggatttttgttggcggaatttgcagccaccacaaagcaaaggccagtgaatatcaagatcttcgctagcggttattgacagccagcaaaaattcattttcgctggcggtcatcttaagccagccgccagcaaaaatacattttcgctggcgttggcttaagacggccggcagcgaaaatccattttcgctggcggctgtgttaaatcagccgcctgcgaaaatggattttgggaaaaaaaaaacacgcatgcagctgccagccgtcagcgaaaatacccatgctgccgcccattgattcattaatttcaaatttcaaatccacatctagattcgctgctcatttccaaattcaaacacgaaatacaaaatcatcattagcacagatcaaacatcatttacacaatcaaacatgatttacacagatccaaacatgtgcatcatctggaacaacatgcaaaaagaaaaagaaaaaaaatcaaatctagctgaaggcggagcaaggtcgacggtggcggatccggcctccccgctgcccagcggcggcggatcccgccaccccacggcctggcggcggcggatccgcctcctagcggcctggccgctgcggatcctgcctccccgcagtccgccggactccccgcgggctgccgcccgctcctgagcgccgccgcgcccgcgcccgagctcgccgcgccacctcccgccaccgtcgcccacccgcctaccgtcgccgccgcgcacccgcctcgcgtcgtcgtcggtggagaagagagggaggagagagggagagaagggaggggagctggagagagggggcgggtgggtggtggactggtggtggtggtggtgggccgcgtggtcaatattaatagatggtggtccatctatgcaagcggtccttctaccgccagcgaaaatctggcggttgcttaagtgggccgccagaaaaaataattgtattttccctaccggtctgtatgacacaaccgccagcgaaaattatctatctttgctggcggcgcacctaagtgaccatcagcgaaaatagacatatcttcgctggcggctggtataatgcgaccgccagcgaagatccattttcgctggcggtcggtgtcctttaccccctcgttacaattttgctggtagttttggcatttctccgccagcgaaaattataaaccaatgccatgaaaaatcgtttttctagtagtgtggtctttctctacgtctacaagtatggatgttgcatccacctgctagagttggttcctaggtgcataaagcctagcatgtaggtgatgagaacttaggattcagtaactgtcacatcggattgttgaatactttctctgaccagtagagcactgtgtgggagtgcatgcgagaggtgacggcttagtatgacataattcagatgacaacgcttcggcaagcaacgatggctctaacttatagagaaaggggtatcagcgtacaactgcagttggctgtgatgcaaagatagatccttgcatcctaatgtggctgtgttttttttttcttttgcacctatgtatcggacaacaataaggttatagcgataatcagataaaaatttctccaaccttcacatacaaaacttgtgactagtatataaccactctgttaagtgatctctaaaagcaacctattgataaaaaaaccggctgatgctaaattgaacatttgtactgtgaatgccattgaaactatctaggaacatgatattagatgatcacaggcaaggaaacaagttgcaaccgcaacaccaatcacagcagaatattcatggccatcataaaatttgttcaacttgtgtgtcatttatttgagcctttataagctaccgacgattcacctaccactaataatagtctcatttgtccgaccatactccctacatttacataacatacattatttcttttatttttcctataatgtttatagtgtaagattttaataatttatatcattccttttagaaaatgatttttaactcgaggtgaatttatcggggcgtgacagaactcacctatatgttctctcttttttgcatgagtgatctgctaccctgctcccaatactaatatatgcatgcatctcagtattcttgatccaaatccatctcacaatgtcttttgctaatatggataagtaaatttacaactataggctgttgtccgtgcatttgtttgcaagtcttgtttcttagtcgtatacatatagtaaagtatccaaacataagttctagaccaaagataatattttgtctttgacctttatgtatggagagtgggttcgtagagatgtcttccaaattctgctagccaggtgaggagcacaatatatgtcagatttcaacccttggagatactgcacacttagggttctacaatggaatttgaaattccttaattagtgcaaaactgtgaattactacattattccagtgatatcttagttagacattggagatggatatcttaggggctggaggagtaacgtgggatagactgtatagtaggtaagaatactacatgcatgatgtggcacttcaaagcagaaacactactagaaaaggcattttctccgacattggatctttttctttttgcgggcgggtatggccatcggagcgaaaaccccgccggcgaaaatgagtatagggaggagttggaagtccgcctgcaaagataggttatcgcaggcggaccacataaggcaccacctgcgaaaatgatctgacggtctgactgggtgactctgtgagatagtcggtttcgtgttgttttcttgaaatttctagattgcttcatgtttacgacttctagatggtttctatccgtatgtgatactattgtgtgctgatttgagtcaagttcgtgcgaacttgtacttagatatggagtttctttgttgttaatgtgcaggtgttattttaggccatgggagtatagccggtgatggatctaggctaggctttattcttgtgtttgatcctattaaatggtattagagccatgcttgctctttttaatcttttccgattacgagattttgtgacaagcctactagtatgtctccttcgtcgtcttgtggttgtttgggtgataataataggaaccctaaacttctgaagaacaaaaagtattcatcgatcaagcatgctctaattcacgaggtgttggataattttgataatgacaatgatcatatacttttagttgattttctctcaaatcaaggtaagtcttgtgacatttgtgatttattgcttgaggagaataagtggttgaagaatgtagtaaaatgtttagaatatcaagttgaattcttatcaaaacattgttcacatttcaagaattcttgtgttgatttgaccgttcagaataatttcaattattgctttaaatgatgaactataatattctatttcatgtttaacttttgaaattgatgttttaaagtgcaatgcttctatgccatgtgaatcttgtgttgctttgcaagatgagctattgagcttgctagtgctagaagtaagataagtgatctcaagtctttagatgaaatacactctgattcttgcactaacttggctgttgaaaatgagaagataaatttggcttatgcttcatattttgatcaattagaaaagattagagctgaaattgatgagtttaaagcgtagctttgctgcagattatgatacaaagatagtttgattttcattgtagaacttctaagaacaatttcaagtatattttaaatttatcttcatgatagctaggtgccaggagtgatgaagagaagcactaaattaaattacataatcaaattctaaattttggaatcggctttatagattataatccaaacttacctcattagagcgtataaagtctggatgacatcttgtctcaaactctcaatggcatttgatcagtacatatgtatgacacaaagtctttcaatttacacagtcttctagtatttgtattagccattggttttggatgtcataacgtagtcttaggaggcatagggaatgtaaggtgaacaatattgggattgtcatgatagaatctgtcagaagaatgtacaaaacaatacatctaatctagtgagactcgagagctttggatattcggcatatatatgatgcgataaaattggcatctgtcatatgtatgtttagcattagaactagaggcagatcatggaaggttagagagcacaagagacgatggtgcaggtcaggatattggccgatgaaggcgatgtttttggctggatcaagctagtttatgttacattgttcaacggggaatatgaggtgatggacttgacaaatagcggtgaaaaaactcacctcgattggtgacggtgttacatttgaagtaaaaaaacagagaggtcggatgtggaaccaataatcattttgattcaactggcagccaacgccataacatttgtatctgattctagttatttgattttcaagccattactttggacaaaaatggagtgttaaataaaaccttggatggccattcaatccaaacatcaacaattctcttttggaatataatgttgctttactgagcattatattcatgtgattcgtttgtctgtgtgtacattttgctttgagccacaattcttcctttttcagttcattcatgaacccaaaaaaagagagcagctagtggacaattaatttatctggtactagtatttctgaaaactgtgtttttccataagaaacatattactgtacaccatgcaaagcatacgtgactctgttatacttgagttgaaattttgtgatgttcatagatctatctcccttctcttatgtccatgtgtgttatgcctatttaagaggaatgactcacagaagtttagatgtgggataatgtgtatgtgcttatgcgtcttctctctaatctcaaaaaatagctacattgatggcaaatattgaaaccatttattttatttttctattttggcctacatagagccagcaagactttgctcgtcttctcccattgctcacaaagtcatctcattgctctactctaagcctacaagaatgtctgttctatttaggcttaggcttaggaggcaacggggatttagatatcagagaatgaagaagataaagtattgaactgttatgtattttctctccatgccaatggtggcaatgtgtgagaggcatgaaaaattggcatttgcgcaaataagaaagcctccgtggacaatatcggctatatcagtcaagtgttgcccgatgggagcagacaaacacatcatttttttaaataaattgtcctttaattcctaattcaatctaaatgtgtgcatcacacggtgcagaggcttcatatattcatatatatgaacttagtgcgcgtaggaggcatcagagaaatttagattagaggggtatgttagtatcagattatagcatttgctacagatgccccccaactctcctacagctatggggcagtggatgatggttcacctgaccagaagcaaagtaggagaaggatggaaagctagttatcaaagatagttgtgttttggggtacaacgatgaaatatcagttctccggtagtgctagcacggagtcctttacggttcttgcctgctattagggtacttccaacaaatgtaagaaagtaactattttcctcctaaaatttgatggtaaaatgtaagaaaggttggattattctctcaaatgaagaattccgctccaatctgctgttttattgtgggacaaaccatcttcatgtctcttatgtgtggaggcaaatttccaaggttccgatattaggaacaaagtcagaagacgactgagacgtactggccatttgggaaatcacgatgttatatcatgatgttatatcatgcaagtatttacatggtgaacatgcattttgttatgttgaataactgtaatacgtttcattgatcaagtttcttgctagtttgttcatcacgtactggaaagaaaacagaaattcagtcatttactttggccagtactaagtccaaactcaagaatcgttatcttttgttgtgacatctcatacattagttagagattgatatctttgcaaaacttaggtgtattggcaggaatcttatacgttgtgtgcactatgatgcagaaaaaatagttgtaaaacatttttctattataacaactaggaagatagcccacgcttagcgcgggcatgggtcgtatgctaagattgagacgcttataagatgaaaatattaaccggtgaacatctaccacgatttctccgtaaattcttttcatcaacattaatttcttttataattttctaacctattagctttatattatatcatatttaagtaatatcaataaacaattatttataatcttcttcatcatttgaaaagaaggtagacttattttccctagaaaacatgtcaacgaagagtaagtgcaaagtaaaactaaggtatttttctttttttaattgcatatatattatcatggtttcttcgaggattaattgggtgggacatgaagctccactaaatatatgggtttatatagcctaatatgattgatgtgatttgagagccgatccatctatgaacatttaatgtagagtgggtcagaagtaccacgcaagctaatgtgaaagccaaatataattgcacaataatattttaaatgtgatgtaccatgtatacacatttgtttttcttatataagatagctctaactgttagaaataatgattccaccggtttaaagggcataggagtattccagaaatgtagtttaaaaattatggttgttttaatattcaacattactacgaagtaaacgttggttgtgatggaattttcccactcgtgttcatgtcccagaattaaaattctttcagtagtaggtgacgtacccgtcgaaagcgagacgtacgtagtgacttcgtccatctcaaaatatgtcatcctagtctatcagaagtactcatgggggtatgtgcatgtgtgtgttcacataggtgagtgcgcgcacgttgtaagcactcgcgtttgtactttgtttctaaaataatatcaaacatattttttgtttctcttttaatttaataaataaaacaatagggagggggtgacagggttgtgtagatgtgagagtgaggaggaggtggagattttatttttctaatttttctaaatgatttaagtgagagccgatgacagggtgtttcattttttctaagaatttccaaggtcatttatccgttttttataggacgtgagacatgataacttaagattttatttttaaaaaatagatctaatagataaaatattggatacgtcaatttaattgatcaaatttaatctagcacctcgtatgtccagccacgtgtcgctcggtgatttgtagtcagtgttcgttatgttctttttttttctattcgtgggaaaaaggctgttggttactccctgtgtcaaaaaatttagatataaatatggacaaattcacatttatccatatcttaactacttataaaaaatagtaactttccaatcgtcacaatatttttttgtccgtcaatccgaccaagcggtaccctctatccacacacacgcaattacatcccatacgatatccaaagaaaaaaaaagagtttgattcaaaatcagctaaaaattaaaccaacagactctgaatcgaacttaataaaatcagctgggatgatccacaggagtgaaagctggaaaccaacggaatcgagcaaatcacaaagcaatacgtaatatctgaccggcgacaagctcatcgtccgaagagagatggcaggtgacggacgaagatggagaggagagacaagctccagcggctcaagacacgccgtcgccgagggcgctccgtcaacccgcaggacatttctgcagccggatccacccatcggaagtagcggatggcgccgctgcggcggattgcggtggggtaggccacaaccgccgccgctcacggtgggcgaggcggcggcgacgctctgtgttaggggcaatctcaccatttcaaaaaatttctcacctgttttgactcgaaatataaaatattgcctccggtgtcctatagccaattacataatttttatagtttccattagccatgtcacgtttttacggtgtctcccagccaattacacatttttgggtgtcctgtatcaaattttgcttttttttcttataattttaggacatattatatggtgatttatgagcgctctagagcgttttaattgatttttgttaggtatagtgatttagtatcgcataatacatattatgttcgattaatttttcgttgttatttagttgccattcaaacgatagggtctaccatcaaataatgtattttaactttttatagtaaaatatagctaatgttatcttgatttatttatttaattataaataaaacaatagttatattatgttagttaaaaaaaagaagaggagataattgaattggtgaggagaggatggatgagtcatctttttttttgctttatcatcttttatcgttagtagatgtttttttttcttccgcctaacagtgggaagctttatttgtttttttttcaattatacttacgtacggacatttagttttatttccttttcccagccaccagttgcatattttttaggaaaaactatcacctttttaataatagatctaatctaatgttctaaattaacgggtccatcaatttaagtgaaaatcgacggtgagattagatagtgccacatggcaatccacatggcggtccaggagtgtttgtagaagcgccacttggcgactcgagagcgtttataggaagtttaatgtacttttagtatataatagaatagaatggatagataagtaagagcaatggcttgcagatcactctaaaaatactaataacctggactagaaacaatagagcaatggccgcagccacaactacaaactctgcgtgtcctgtggaaattatttcctaaattataacctggacctcattagagtgatatttattaaggttaattggattcatgccactgcaaatatgccgattcacaaagatgccaataaaattcgtctattcatatctatgccattgaaattcacataaaattagaaccatgccatcaccgtcacattttccgtcactgccgtctagttttccgtcacattttctttcttcaattccttcttcccttttcttcccctatttggtgggtggcagggacagaagtggtgcgtggtcgacggggaggaccatcctgcagcggtgtctgtcgccccaccaagcacgacgcgggcaagccaagccggcatgctggactgacgatatcatgctgtgagcattggccatgccgtgcaggtgcactgggctgagccaatccggccacgccaaagccgcggaagcgcctcgccggctccggcgtgtgggcacagcagccaaataagaacagaagaaaaatagaaaaaaggaagcaaacagcatcgcctgtgtctcaccgcctgcgctacgtcaacggcaaacaaggaagagcaagaagaagaagaagaagaagagaaaaaggaaagcagcgacggccgtgcctgtggaagccgcaacgacgacgccgagctcgcccaccaagcaatgcccgaacctccgagcagctcgcattttggtccgcaccggctgcatgctcggtcacgccatcccgcaccgggatatatgcccgttgctccgtcgtcggttcccatcttagatgggtcatgccaccgccggtgttgagtgaggggatggcatgggcggcggcgaggggtggtgagcggcaggacgacaaggccgtacctggggggtcaatgaggatgctgcccactctggtggtggattggaaggagagagaagagagagaacgtcaataagagagagaaaggggataataagatagaaattgacagtgatgacagaaaactgtacagcagtgccatgtttatgatttcataaaattttactaacatctagccgatatcgcgaatagtaatggtatttttctaatatggtaaatttgtaatagcatgtataaagtctgaatgacatctattctcaatctctcaattgtatatgctctagacattaagacatatgtacaacacagagtctttcactttacatggctacgcctggagcctttgtgaattttccattatttctatcagacaccggtcttggatgtgcataacatagtcttaggaggcatagggaatgtaagctcaacgatcttgggattgccataataaaacctaccaaggggatgtacaaaacaattatctagtgagactacttgagagtttggatgtccagcatgtgataatgcaacaatagtgagttttatgtgtgtttagcataagaactatatgcaaattttggaaggttggagagcacaagcgataagcagggagggcaggatatataggctgatgtgggtgaaatttgtcgctagatgaaggctttaggttacattgttcaacgagagtaggaggtggtggaggtgacctgatatgaatagtggtgagaaagctcaatttgattgtcaaatgtggtatgtggagtaagcaaaatagaggttggttgtgcaaccgcgatcattttggctcaaccgccaaccaaatgcaacagtaacatttgtgtcgatctgattctagttatgtgattttggagccaatactttggagaaaagatgagtattaaaaaaaactttgcatgcacattcaatctgacgtcaacatttcgcttttggaatataatgttgctttactgagcattatatttgtgtgaatcgtttgtgttattgtgtacattttgctttgagcctaaattcttccgttttagttcattgatgaaccccaaaaaagagagcagctactggacaattaatttatcaagtactagtattacggaactgctattttcaaacatattactgtataccatgctaagcatacgtgcctctgttatactagagttgaaagtttgtgatgttcatagatctacctcccatctctgatgtccatgtaaaccgggactaacgtggttttgcaccacccagcaaagatcagttctccggtagcgatgtgtgttatacctattttaagagggatgactcacagaagtttagatgtgtgataatgtatgagcttatgcgtcttccctgtaatctcaaaaaaacagctatattgatggcaaatattgaaaccatttattttatttttctattttggcctacgtaaagccaacaagactttgctcgtcttctcccgttgctcacaatgtctgttctatttagccttaggcttaggaggcaacgggaatttaggcatcatagaaggaaaaagatgagaacttaactgtaatgtattttctcttcatatccttatggaccttatccctgtcaaacaatggtggcaatgtgtgagaggcacgaaataattggcacttacacaaataagaaagctgccgtggataacataacacctcgatcactagaagaaagtattggctatatctgtcaagtgttgcccgacgggaacaagacaaacacattatttttttaaaataaattgtactctaattcataattcaatcaaaatgtgtgcatcaaatggtgcagaggcttgatataaacttagtgcgcctaggaggcatcacagagatttccattagattagaggggtctgttagtatcagattacaacatttgctgcagatgcccccaccagtacaaaaagggtttttctagacggacctaaacctatgtttgcatgtggaagcctggcctgtcaggccaaaatggtctgcgaaaatccaatttttacgtacgggtaacgcacctgcacacgaaaatcagattttcgcgtgcgggttatgtcaacggcacaaaaaaataaaatttcaaaaaattcaaaaccctagcaatcctagcggtggcgacggcggataggtccatcgtggggccggcggcgccactcccagccgcctcgtcgtccttgtccgatattctattcaagttgatacaagctttgcctatcatatatattgattctatctttaattgcatcattgtttagagtcgtatgggctaagttagaactttttcagttaggttgatattctaactaagttggtatttctctactgttgttttagattgatcaatatatccatcacgtctatgtagatatatcggctaaatatgtttttctcattatcgtcaatttttcgtttaggtccgatctattagattattgctaataagttttatattagtaagccgataggtttttctgcaatgtttcatcgttcatcgggatgtatcagctaactaggcaatatatatgtgaatctacttgcatcagatctctagcaaatgtatgcttttaccttcggacttacacttaccacactatatcagtattagctaactagtttattggttcagttctttctattattcttgttagtagcaggatcaaactaactggcacgtccaaacctcatcaagatttagggcctatactggagctaagcagatgtctcgggccttcgattgttgtgacgcattgtccatcaacgatacgaaagggggtgtggagttggtagctatatcaaggttttttttttagaatttgatcaagggttattgttacattgtttaaggacggataactttatgttgcttttcctgagcattacgcatatttgtgtgattgtgtacattttgtttcgtgcctgaactgttccatcttcagctcattcatcagcaaaaaaaaaaagagcaaacaatagatttatgaaggatcaatattacagaagattaatttccaaaaaaaaaaatcaactgtacactacgcaaagaactagttaccagtgtgtgcattgagggtggggggttacaagatacactctctataaaaaaaatcaacttcttaggattaacctagaaatatacttgtcgagatttgttcctagaaattctttttttttaagacagagggggtgactttatgtgcacatagccttttaatgaaagtgcgagttctataaaacctgttgacatcactaacacataacctcaacccttttttttacaggatgggatgttctttgtctttagcaacacaacaatttattgtgtgcttgtgtatatatgcatatctctgctggttgctacaactacaatgtccatggccagattagtccttcctcgaagactagcctagtttgtactttcttctcttttcttagaccattagatttctttgatttatggggtatcctctctatgataggtttagtaggcatcaggaacgctgggttgagctcggaagtgaatgcttgatatcaatcattcctcacaggttggagatgactataatttctttaggtgaattctgacgaggcgaatgatcacatatcaccctcgcttcaaccgatggaaagaagagctgaagctaaaccaacacgaaaaaatggggccttcaatatttcagcggaaccccaaccaacacgatgggtgtggatcccctggagttacatccaaatccactgggtggatttcactaaacccaagccgtccctttaatttcgatggctttgtttaagccatctcttcttccaccatagttatcttgtagagtctattttcttttaaaaaaaatattgtacagcttataaaaaacattatctcgtagagaacatgttatcttcgaattttctaacatcaattagagaagaacaaacaagacacgaacattgcaccgacaaaagcttgaggatgaattagttcaatgagggcctcgatgccgttaatttcataatagctcggttaagaaaagtttacagataatttcctatccagaatgctcttccgagacgctagatccaaatggacagacttcgcaagaaaaaataaaaagagaaaagaactggctatttctgtcgtaaatgtgtaactaggaagaggtgacatggccacatctagcttgtagaaacaaagtaaggggtcagatcggcccaaatccaccagggtggagttggaaggcaactccagggggtctacgccccaacgtacctattgtttacacttctgtctacattttttttcttttgatgtgcacaataaagtagtaggaacttagacttgagggcatcgagaatttaatgttgagtttatcctctccatcgctatatataagattttggtacaaatatgctaggccatttatctggttaagtatgtattatcctaatgagaataatggaccattaagaactgatggggcagagtcagagtcaatgctacttgaatcaccagagcggagtatgaccttgcattttattcccctaaatgaaatccgcacagtggaaatctaaggcctttcacagtgctcctacgtggagcattacctccttgtgtcagctaggaaagcgccgacgtgtcgagccggaccacgtcctacctgagtcgcttgcccccacacaagcagacgcgattctcgctcgcgcgagatcacacgcggcggagagaacacctggatcctgcgctgtagagggcatgcctccgacttgccgtcccttcgggccctcccgctcctgtgccgctaacctcatcaccgtctctcgctccgcgtcaccaacctcgtcgtcgtccccgcgctccgaagacaccgctgccatggccccgaagatgccgctgtttgccagagacggccccaaggacgtcgccgccactcggcgttggggcgggcggcgcttcccggagacgagcacggggatgccgtcgccgcttcactccggatccacgcaccgccgccgtcgacggtcagtcttctcatcaccggccaagagaggagggacgaggcggattggggaagaagtgccgcggcggatttgggggagaagcggcgcagtggatggcgaggagaagcggccggcggatttggggggagaagcgcgcggtggatggggaggagaagtagcagattttttttttcatttgtgcgtgaggataaaaacgaaggggtaggtggctgtggggtcaaggattcttttgttgggtcacgagcacagtgaggtgcgtggctttcgggccaatttcatcgcagaaatgggccagaggcacgcatagcatgccttgcactgccactgccctaagcatgacttaacataaccaactgagaaatgttagtgccaagagtgtcgaggaattaatggtgagaagaaagtacacaacataaagcggttctttagaatgactctgcttcttctacttattgagaatggtgccaagactatgcatgactctgttggtctctagttctaaaatgttcatggcctctttatccctttcaaggctacttagctacattgtttcgtctattttctcttttcttggatgaatctattggcatttgagcatgtctcatggcctattagatttctttcttaagtgctatcatagtattataataggcttagtaggtatcaggaatagaagaccgagcacattcaggcatggtaggatcaaactctggtacaattgttcaacatggaaaccactgtctcaggcaaagtctatatgtttctccagaagacgagaatgggtattagaagatgttcaacagctaaagaacttaagaacacaaagacaggacagtattgagggattaattgggcaggttttttttactgtattgtacagcaacaatgcagctaagtatgctgatggtagtcctgccagtaagagttagcagccttttttatggccatcatggaactcacctatacatttggcttgagcgatctcccaccctgctcctgatactaacatgcgtctcagtgttcttgatttaaatccatttcactgtgtatttttacgcacatgtgcacaaaaatttcaattttacatgtataggctattattcgggcatttgtttacaagtcttgtttcttagttgtacatatagtataagtaggcttgggatgtcttggatacaaacataaattatattcaaagacaatatttgggtttacactcttatacaatatttgagagatttgaatgctggaataacgtgtgataggctgataggtagcaattctacataatatggcacttcaatgcagaaaactcacatagacaacagtaatgctaaaatattttcctgttattaaacaaaagaatcttatgcacaacgaatactcacatagacaacagcaatagttgtaagagaataacaattcaatgtgattatcaagatgccaaagccttttgtttgttgcttgagagaaaaaaggtccagactctcaattgatcgcagcagaaaacaatattaggacgaggtagtgagattttatttaagataatagattgaaaccaagcctctacgttaacaagggtgtatacagccacaagtattcccaagcacaagaactcggtccttaccctcatgttcagagccgaaaggcacacaaagggtcaagcatcttacaaagtactgaaaggagcacaaaggctccaatacctttcaaggcaaacagatgaaccaaactaaaaccgcgaccaaatacaaattacttttttctcctctttcctagattgcaaccaactttagcaaacaattgcataaccaccatctccaacaatttgcaatcttccatcatcacaacaccatcctcttcttttaacaacagtacagattaagacagtcatttttctttcaaatcttcgtgttactttatatattacatcattgatgaagcaaattgtgtcagttctagttacagatgaatgtgttgcaacaataaaaataatcgtcatttattatattttctagtgcaatactcctatcacgctaaatattgattaggtcaaggattcacttacagaagtgttcatatatagctgtcatgtacccctgcttagctttgctgctgattataatccaaaaatattattctgattttcacagcttgctttgaagaataactttaggtagtttttttttactttccttcgtggaaagagaaccggtcaaagaaagtaatgaagaaagagctcaaattaaattatggatataactaaattataaatttgaaaatgagcttcgaattatgatctggatctcactcgagctatctattgtttacatatatatagtctggatgacatcaagtctggagctctcaattgtcatatgctctgaacacatgtatgacagagttagtctctcactttacttgctttggcctagagcctcttagagtttccttgtttctattagacattagccattggaggcatcaggaatgtaatgtctccaataccttgggttcctcgagatagaaactatggaactcatgtgcaaaataatatacctatattgagacttgagagttggattttgtgggcacaccgtacctgcacatcatgttgagattcctgacttgcatcggcgagatcgttagcacctttcaccatggtgcatctagatgtgacaaaagtggcaattgcgtgtttagcttgagaattggaggcagatcttggatggatggagagctagatcatgggttatggttgaagtgaccagatgggagaggggagctgcaggccaacagcgaagaagcacaaatcgagttggtgattgtgacgatccacctgaaatatttggatctaacaggggagaaagaggaagaacaaggaagaacagagacagagttggcttgggagagagacagatagtttctgtgcgtgatggattagttcccaccccacactaacgaacactggagtttttccctgggtgcatgcatcaagtttagtaggcttaggaggctatgggaattcagcctttacattatggatgctttcgagtttcgaattgtcatatactttccctagaaatgattggtcaggaggagcggtgagtataaggcatgtgaggtacggtatgaccggcagtcacgcagacaagtaagttgtcgagtagtaaatgggaaaggataggattaaggtattgcaaatttgttgttgaaagtgaaacacatgcaactcatcttaagaacgtgtggtctatactagacaagtgttccacaatgggaatatgagaagcatgatatttttttaaaaaactatctttaagttctaatttcatagacatatgttcaattgaagtaaattttacagtttgaatccagcccaaatctgaccatatactttattgagaattacaatgacacaaaaagtgttcttgtttggatttgttagttttgtttataacgtaatgttgtagtctttcagttaattcatcgaccacaaagagaaatgctttatgagatgttggcatagattttgcactatggtttatatatatcagcctcacgcatgcacgttcatatcgtttcgtactataatacggggaaatttgcgtagacatgtgttctattgagatgcgtttgtggttgtaatgatcaggttgatgaggattccattaactgcatcatgtgaaatcggttggataagcatctgcatttgcggctacagagaagtgttcgcaattttgtcaattcttttctctcaattcaatccctgaatttcattcagttacatacctagcaaggcgtataatactgcgaatgcatttcatctcgagtgtaaaagtagtaggcttaaaaaaaacccagaattgatgtatgatacattgtctgaaagacagaaagttgccttgaattagattactcaactcatatatattcagaaccagactatgaaatcttggcgataaccggccatttaccattcctaagagagagtgaccggtaaccattaccagcccgaataatttaaatatagcttgatagaatgtctcagggactcaaaggtcccctttttttctccaacgagagttggatcaagattaacattttcgtggcacgtttttcaaactgctaaacggtgcgttttgtgtaaaaactttctatataaaagttgctctaaaatatcatattaatctatttttcaagtttgtaataattaaaactcaatcaatataatcatacgttaataccacctcgttttgtgtaaaaaacttaatcttcatcttcatcttcaggagaaaagaacaccacctttgacggcgtagtattagtatattgattgcctctacaggtaatcgccaatgattaggataaatttaaaatttcatgatcaacagctgatcataaatattcactaggtgattccccgtactttgctgcgggaattactaagcgattcttttttctgatagtcaagctagaagtaaaaaggacaaaaataacgaaacatcagggtttatcagtacttatcgtgaaacaaacaaattttaccatactttaatgtgaaacatattgataagaatatgctaaatattataaaataatagatagatttgttaaaatattgtgcaaatgatgtgaggggtgatgattggatatgcttgcatgttgattcatagaattaagtaaattgtagatgatgttgtatgcttgcatgaggttaaatacgtaatttattctaatggatgattatgtggcatggttgcaggttgagtttttttagttagtgggttataacttaaaatataggtactcaccatcaatatttactgttcctattcattcatcctatccgatgatccctatttataaactcttttgcttttctctttaatttcacctttcaatttttcagctcgattaagatttttagcatatatgtgccttgtgtttctctgacaactatagtgcaatgggcgtaggagttgtcgggattgcaacattcacctctgcgctctatccttcttctgcttgacagtacaaagcataaatatttgacggcatgcatgaaacataattccttgctagtttgcccaccttctccgaacgagttagtattatgtataaattgtctgattaactgacatgccatttaatctctaagttaattaatagttggacaacgtacattaattagtatctttttatgggtaccttatgttgacataattagaggcatgtacaaacgtacagtctgatatggtctcttagttaatacatatcacttagagatcatacttatacaatagttgagacaacaaaacatttgagccattaatgcactaacataattttttattacccttattttcttatattatcaccatacaacaaattttttctttaataaatgctaagagccgactctgagccgttgtcatgcctaacaaaaatgtttcccttttcaccctcttctcttttccatgttatcaagtttatacttgaatgccaacggaaatagcacgttaattaacaccgttgtacatgccctaagcaatcaaccgatggtgtgcctgatcccaaggaccctagaaagcttcgttgcaatgagattcttgtccagctgttgggtggtggggatggtagtggtacatatgtcactgtgtaaagctgtagagatgagaatgctaaggtttttgacctgaaggatgggaggaaggaagaaagtcgttattgtttttgccaagagacccatgttttaatagacgattttgtaaaatcaaaggtgtttttgattattattttctgatgaacaattgggcattgtagattattggttttgttatttggaatttattcacgaagtggtttcggagatgattgggtttcacaggtgaatctacaggttatcattttatgtggtccggtcagactgggctctggtagccggtcagaccggcgcagtccgcggtctgactggccgacactgtgtcggtttcggtttcgggttgtttatttggatatccgagtttatttcatgattatggtttctagatggatactatacgtatgtaatactattgtttgctgctaatgagtcaagttggagatagcttggtctcggaatatggtttctttgtttgttccatgtgtaggtaactcgatgtctcgggagagtatttgcggtgatggaccgggagtcggcttggggataagacgacgtccggggtggtcagagatcatgcgggatacttatgctagagttgatgcacatggttaatggagattccatatggcatacgatggagctattgtgtgcacatgggatgcggagtcaaatttggaaggagtccaaatttggtatgtttggttatgtaaagtttctttcttgtactagagggtttcctaaggtgtttaggactcctagtatgagtttggttcatggctttagactgcctacctcatgtataaatagagggggagcgtgaggcttcccggtatcgcttttcagagcaatagagttgagttttgagttagggttttgagtttagtcgaaatttttgtaaggagtgctgttggtgcactttgtaaacacagagagaatcaataaagtcgtcatccactttaagagttcttcgatttgtgtttcactgggtttcgacggtctaaccggcaactcaccggcggtcagaccggcggcggcgacaggcgcggcaggcgatctcggcggtcagaccggagattcaacaccggtcagaccggcggcatccactcggtcagaccggcagatcaatctcggtcagaccgcgatccgtcaattttgagggtaacatttatttccgctaaaagttttcagtttttgggtataccaaccattcaccccccctctggttggcttagttcttgtgattcgatcctacaagtggtatcagagccttgttttcttctttggatttttattgatctagagtttttgccatggctactcccgctaggttttcaactaagccccatgttttcgatggaacggatttttctcattggtgtagtaggatgcaatcttatattatggctgaagattatgatatttggagaaaagtttctcatgcttatgtgattcttgaagctattaatactgctgctgaaaaaactgtttttgaacaaaattgcaaagctcgcaacattcttttgagtggtatttctcgttcggattctgatcgtgttgctcatcttcaaactactcatgagatttgggttgctttgagcaattttcatcaaggaacaaataacattaaagagcttcgtcgagatctttttaaaaaggagtacattaaatttgagatgaaacctggagaagctttgaatgactatctttctcggtttaataaaattttgattgatcttagatctgttgattcttcttatgatgctaattatccacaatctgagatttctcgtcactttttgaatggtcttgacatgtctatttgggagatgaaagttatatctattcaggagtctgttaacatgtctactttgactttggattcactttatacaaaattgaaaacacatgagatgaatgttctttctcgaaaagctgattctaagtctagtgctttggtttcttcttcctcgtctttggatgttgatgcttcttcatctaagtcttcttttcttgctgtttttaatgccacatccgatgatcaactcgaacagatcgaggaggaggatttggctttggttgctaaccgtattgctcgagctatgaataatgccaggaacaggaaaagaggtggtccaaatcgttgctttgaatgtggttcaattgatcatcttcgttcgcattgtcctaagcttggggaggcaaaagagaagacaaagatggtgagaagacaaacaacaacaagcccaacaacaacaagtcgaagggttcttaccaagggaggaagatggagaatcttaggaaggcttttcaacaagtttgcgccgccttcgagccactaagtgatgtagatggtgaaagtggagatgatgacaagggaaagaacgtctccgatgtttgcttcatggcgcatggtgaatctgacacagagtatgaagataatgaggtgagtacttttgaggaagctattaatattttgagtgcaaaaaataagaagtgtgagaagatgtatagaaaacaggaatttatcattgaatctcttaaatctgaaattgataggttaaaatctcttattcctaatgatgatgattgtgaaaattgtgaggttttaatgaatgagatttcaaaaattagagatgttaatgctgcacatgatttgaaaaatagatcttctcttgcttgtagttttgctttgcacacactcactttggatgagttgtgtttaactaaaaagttgttgcaaaaat

SEQ ID NO: 6496 - DNA, 28043 bp, Oryza sativa
ctttgaaggtttatttgtctctagcatagcttgtatgtattctgatctttacatgagatttagattttgcttttaagggagatgatgcatgacacttaaattctatacttgaattaagaaaatatgcaatgttgatgctagcatatggtttgatttgtaaatgctctatatatatgctttattgacttgttattcctcaaatagctttaattgctcattgtgaaaaagagaataaaaatatgaaaaaaatgaataccgaatccttggaaacagtcttgacgacaaggacgtattcgatgtgagcaaaataatgggtgccaaatccctagaaacaatcttgacgacagggacgtacccggaataaaagagaaaaatatgagcacaaaggctcaagaaaagaaaaggttataaaaaaaattctcttggttattttgtgctaaagtttatttgagaaagagtgataaatgcaataggtatatgtgtttagtgtttattcttcaacctatgtgcttgttaagatgttgcattctaaatcgtatgaaatcatgaattttgattgttgattcaaacttaattgtaaaatctttggttcatggttatactttaatgcatgcttcttttgttatagatgggttcatcttctttttattgcaacacatgacttgatatgctatatgtatgctaagctcttgaacattaatgaacataattcctatgcttgatgaaatcattgtcaaaatggggagaagtaatgtgaaaatttttggatttttggagaagcaaggtgaatttttggaaagttgttgagtagagcatgtttttggttcaattgggaatttctttcttttaaaaagggggggaagttttcttttggatttttcgaacacttgtacgaagtgtgctttttaccacttttgtttttatttttccaaacaccaaaacattttttatgagtttgccaatgtgttcatcaagggggagattgtaaaatcaaaggtgtttttgattattatttgtgatgaacaattaggcattggagattattggttttgttatttagaatttattcacgaagtggttttggagatgattgggtttcacaggtgaatctacaggttatcattttatgtggtccggtcagactgggctctggtagccagtcagaccggcgcagcccgcggtccgaccggccgacactgtgtcggtttcggtttcgggttgtttatttggatatccgagtttatttcatgattttggtttctacatggatactacacgtatgaaatactattgtttgcctgctatgaatccagttggagatagcttggtctcggaaatggtttctttgtttgttccatgtgtaggtaactcgatgtctcgggagagtatttgcggtgatggaccgggagtcggcttggggataagacgacgtccgtggtggtcagagatcatgcgggatacttaggctagagttgatgcacgtagttgatggagattccatatggcatacaatgaagttattgtgtgcgtatgggattaggagtcaaatttggaaggagtccaaatttggtacgtttggttatgtaaagtttctttcttgtactaaagggtttcctaaggtgtttagaactcctagtatgagtttggttcatggctttatgctgcctacctcatgtataaatagagagggagcgtgaggcttcccggtatcgcttttcagagcaatagagttgagttttgagttagggtttcaagtttagtcgaaatttttgtaaggagcgctgttggtacactttgtaaacacagagagaatcaataaagtcgtcatccactttaagagttcttcgatttgtgtttcaccgggtttcggcggtcttaccggcaactcaccggcggtcagaccggcggcatagcggcggtcagactggtgggagcacagcggtcagaccggcggcggcgacaggcgcgacaggcgatctcggcggtcagaccggagattcaacatcggtcagaccggcggcatccactcggtcagaccggtagatcaatctcggtcagaccgcgatccgtcgatttcgagggtaacttttatttccgctaaaagttttcggtttttgggtataccaaccattcaccccccctctggttggcttagttcttgtgattcgatcctacagatttatcttgcatcagaatgagctgtccattagaccacagaatgtaagaaaatattgtatcagtgtgcttggccacaactgggtcattcaagagggaatgggtcaggtctggacggaagtagtagagaaatcccacaaaaattatcttcactggttttttttgtgagattcattgatttatcactgacattatatatgcatgtgttaattcttctgtctataatgttacatcttccatgaaatccatagaaaccatttatttatccctcaatccagtggaattggcatctggtgatgcgtgaaaggtggagcaatgtggctcaggagggacgtggaaatatattgaagaaaggtattgcacatatggctgtattattgttaagggatcatgagttcaaaagcgacattactatttattatgtttccatgtgaatcagggaatggggttaaggataatcgtatatacctttctccactctccatatacaaaattaacaaattacaagcatataaccagctcgatatatattggacagaaggcactgtgctcatgaggacgatgatctgctttgtgtgatggcccaagagaaactttactggatctgttcttttcgtgtccgtttagcaggagctgctgggatcgtcttcgaattagatggaattcaaatttgggaatttatcaaatgttggtactggcaaagattgcagtttagaaggaagggtttccttgagatcgtgtcctttgcttgctattgttggtaaattgtaagatcaaagtgtgttttgattcttattctgtgatgaacaattggcgtctgtgattattggttttgatatttggagattatcgtcgaactggttttgaagataatcaattttcaggtgatgaacagggtttgctgttttgtcgggaccggtcagaccgggcggaggttgccggtcagaccggcgctatgtgtgcggtcagaccggccaggcccgcggtctgaccggccgacgctgtgtcggtttcggtttcgggtagtttctttggatatccatgattgtttcatggttatggcttctagatggatactatacgtatgtaatactgttgtttgctaacaatgagttaagttggggatagcttggtctcggaatatggtttctttatttgtttcatgtgtaggtgactcgatgcctcgggagagtatttgcggtgatggaccgggagtcggcttggtggtaagacgatgtccgtggtggtcagatatcatgcgggatactaaggctagagttgatgcacgtggttgatggagattccatatcgcatacgatgaagttattgtgtgcgtatgggatgcggagtcaaatttggaaggagtccaaatttggtacgattggttatgtaaagtttctttcttgtactagagggtttcctaaagtgtttaggactcttagtatgagtttggttcgtggctttaggctgcctacctcatgtataaatagagggggagcgtgaggcttcccggtatcgctttgtatcgcttttgtatagcttttgagagctagtttagttagggtttcgagtttagtcgagatttttgtaaggagtgctattggcgcactttgtaaacacagatagaagcaataaagttgtaatctactttgagagttcttcgatttgtgtttcaccgggtttcggcagtctaaccggcatctcagcggcggtcagaccggcggcatcgcagcggtccgaccggcggcgtaagggcggtcagactgacggcggcaacagcaagcgggagctgatcaggcggtcagaccggagttccaatctcggtcagaccagtggctttcagacggtcagaccggcacgactacctcggtcagaccgcgatccatcgaattcgagggtaacttttatttccgctaaaagttttggtttttgggtatatcaaccattcaccccccttctggttggcttagttcttgtgattcgatcctacagtaaaggcatatatggaggcaaagaaatacgaaggtttttgataatgtgctaccaagtgaagatagttgatttgttgcttttaaaaatgagattctcttacatgtttgtgggatgaatgaagtccttagctcttctgtcctcagctggttacaacttcttgtaatttaaggctttctttctttgttctcctgtacaatgttgtaaatactctttcttttgatatataacttctaggctaggcctggtagtattttaaataaaaaagaaccttcaaaataatattaacccccattagtagatctgacttaatgatgagaccatgcatttttatagacaggatgcaaccctttctcaatcaagtacggccaaagtaacgtgctttattcatgagaggatgcatttttatagacataatgcaaccctttatcaatcaagaacgccagaacaaatcatcttcaaattaatctcgtcgcgccaccgggcagccattctgtcccatcgctgcaccaacgacaaaaatatccgtggccattcaacttgtcaccgatggcctatcgatctgccgcgtcgaattggctgagaagggaaggattcgtcgacttttttgtgcccgagttccattgaacgtcctggaatggaggtgatttggatgggtatctgggagctgcagatcgctgctattaggggtggcggatggagtttatgtgtgtagtgacgaaattgctaatgcgcaaccactcccccccccccccggtggacacgtggcgcgtgcagagagggccccgcggagaggtgaggggctgacacgtcgctggattttccttttttttttgttttctcttttcccttttttgcggttttctgtttcgtttttttctttctggttttttacacttcgggtacgtatacaaagtttgtatacgtgtataaaactttatatacatgtattttttttgtttttaaatgtacatataccaattttatacatatatacaaagtttgtatacacatatataaagtttgtatacgtgtatacaaagtttgtatacgcgtatgtaaagtttgtatacgcatatatatacatatgtagactagtaatagtaatacatactactagtagtagtagtactagtactagtagtagtactagtactactagtagtagtactgtagctgaggcgccgcgcgcaccgggggacgcgcgactggtcgcgcattagcggccaccgtgtagtgatttgggctcctcatgtgcttctttcacaattgttgtattagagcaggtacaatagcaagctataagcctgatataaccacatatcgagaagaaaagaaaagagagataagaaaacggactacagatttatagtcggctgcaacatggactctaagacgttatgtgtgtatgagaggtgggaccgtgtattaatggtgtagtatatttttataggtaactattgtattaatggactattagattagctatagatgatttggagctagcagttggctatgctattgaacttgctcttaagagcaggtataatagcagactataagccagctataaacacatatcgaggagataaaagaggagagagaagagcagcgggctacagatttgtagctagctacagcacggactccaagagataatgtgtgtatgacaggtgagaccatatattaatagtgtagtatatgtttataagtaaatattatatgaattggctattaagttgactataggtgatttggaactagtagttagctatactactaaacttgctctaagagcgagtacaatagcaggctacaagtcagctgtaagcacacgtggaggagagaagagaagagaagagagagaaggaaagggggctatagatttgtagccagctgcagcacggactccaatacgttatgtgtgtatgagaggtgggaccatatattaataatttatatataactattgtataaatgagctattagattggctatagatgaattagagttagtacttggctatactattaaacttgctctaggtagtttccgccgtgattatcgaaggggcagctctttgccttctcaacgcatggagtgatctggaaagttcacacggccttctgggttttaggaaatatttctgctcgcgcgaccatgaatggaatgatgctccatcctctctaccacatggcagattttcagatgagtacacttgatttctaggatgccacgtgggccaatcaggtaccagggatggtaccctgaaatcggtatttgagaagctctacacacggtgccatgtgccccaatcaaaaatcggggtttaaaccctgaaatcggtattagagatttaccctgtttcgaaaaaaataactaaaaaattataaggcgcgcatgtgtttttatgcatccatatgttacgggcaaagattatgtggagaagaatcaacatgaatagggatagattggatttagtagatgaaataagaacgtgactataacacgcacggtatcgcgttagcgctaaccagcgatgccctcaatttccaaaaatggaaccgcgttcttttccccacgcgcgcttagaatttccgaaaaaggtactgcagcccacaacaacaccttcgcccctgaacccgtggacagcataatgaagaatcaaacggaaaaaactcacgaacagctgaaggtggagagaaaaatcaagaacaagttgagaagaactaggtcccatgccctaatccaatgtagaaaacaaacccagacctatccaaatcacaaactttgtaagaagtttacatcccacaaatttataatgctatgtcaaattcataaaataaaaagagcacaaacaagcatatcaacttggaattcatgcactaatctgcagttcttttctctcagaccccaaaatccaacaagttactttgaaacatataaaaatgaaatacatgtaaaagttgtaaaagttacttcctactaacatgcaagttacttttaaaatttgtgcgctcattttggatctcttacatgatatattttgttaagcgattttaggtccattgctgccgtcactgcagcggcggcctgatagaacggacccttttggaactttaccatcgacagcgacagatgaaatgagacacattcttcatttaatcaaacaagttcaggctttcagagattctttctttcataaggaaatggatgaatcatcatttgcagaaaagctaaatacaaccatgaatcagttctgaatccatccatccattcacacgtgcatgatcgatgcagaattggattatacagggacacagattgcgcatgcatggagaagatagacatatattactaacattactgcatatacatattccttcttctagctagtgaaggagagggggccaaatgaacaacatgaggagaggaggcattgctaatgctaatagtgtctcatggcattattgaaatatgccaaaacaataaattgacagaccctccctaggggccacttttggctagctttcagttagtagatgttactttccctagctgagaaacaaacttacatgatcatatttggcttcttggttatatgtaagttacttttgaaacatatagaagttacttttaaaatataaaagttgcttcccagtaatacttaagtttcttttagttttattgatcactttttcatacttgcaggggcatatctaaagtgggtacttttagtaataatttggataaaattaagcttccatacccaaatccttttaattagaaagttatgtataatccatcgcaaagcttagtacctgaaatagttatacagaaagttacttttaaaatatataaaagttacttcctagtaatacgtaagttacttttagttttgttgatcacttgtttatacttgcaggcacatatctaaagtgggtacttttagtaataatttggataaaattaagcttccatacccaaatccttttagtaagaaagttgagtataatccatcacaaagcttagtacttgaaacagctatacaagctatacagaaatttacttttaaaacatatgaaagttacttcctattaacacgtaagttactttttaaaatatgttgaatttatgctcatttttcatcttttaattgattacctgtttatactagcaaacacaaattggaaccttaagtttcccaaaggatcattgtttttgttgtggatatacgttggtctgtacagaaccaataatatcccctagaccaaacaacaaagaaaaactaattgctctagtgagtcagccgtgctcatcatgttcaatcatactaatgtcaggttcgaaactgatgagttaggacagatagattaaactagtgttgcatgcctgcatatagttagtaaaaacagtaatctatcattctatcctgaatcaattgatgaacatggatgaagagtgatcgagccttggagaacgagatgacagtgaaataatcaaagttaattaggaaaaagggaagaaaattaccagtcaacaaatgaattggaaatcactgtactactgatcccgtttccatccatgacagtatgacacatgtattttttttttcgagcaaccgacgacaggagtttctcctgccggaatttatagaagaagagaattgacctagttaataagggaaacagggcccgaaaaccgaacaagcacggttaattagacaggaaaccggcaaaacctatacataaaaggaaaagaaagcaactattgagacctcacagaagtcgtcattgccgagcttaccaaaggcaagcagctttgacaacataacacgaggtctccagaactaccaaacgtctactagtggagcagaaaccttctaagcagagcctctaacaagggaacaacatcaaggatgctatcaatgctcattccgaaaggaaccgggttttcacctgaaggaagagagagctagcatgacgatacctccaaggagaaaacggtgcccacaggcgtcgatatcgtcagcctaggaaagcactaggcaaggttttcacccgaggctctctcaaaatgctccacctccaacccctcgcctcgttgccgggacgtttgttgagggtcatcgttgccgagcttgcaacgacaagcagctccgactccgcctcaatagacaatcccactgcagctcgaccagagaccacctcacatccagtaacccagctgcaacaaaacctatggcacggccgatgaccagagagaagatgtcagaaaacaactccgcacgccacccctaacgagccaaggagctacccggcatcgactggaagcagcctagcctaagaagggaggagcgcctaagaagaggggagcggtcgccgcaccgccagtgagcacaggaagaacaaccactgaagaaggggagaaccggatctgagaaagaaacaggagggagggagatggatgcgccatcttcgttgccagcaaccgcaccagaccggctgcccccggctagcagatgcaaccgccgccgccagacgaccaccggggtgccgccgccgccattccccagcacaccgggtgccgcccgccggggcgccaccgccagatccaggcgcggatctggcggcctcttcctctgccaccagcgcctccaagctctgccgcctgttaacgatgaaatttggtaaatcatgcatcggatttggagttaaggccgaagcggatctgagaggaaatcgataatggaaacaaggtatgaatcggcttcagaaccgcatcgactacagtgtgcattggcagttaccgaatcggacaaggcaagccgttgtaaccgattccggcaaggtggtaatggagtcattgtcagattgagttgacgtgcttcatgatgattgccacgtacggatcgagtccgaagaaggcagttgtaactattaattaggaatagtttgttagtttcctttttatccttaggaaagtgtgtttagtgtccgattatgactttatgttttccttttatctttaggaaagtttctttcttgtcctacaaggactagtatctacccatgggtataaatatgtacacccgtggtcattgtaatctatcgctacgatcaatacaattcggcgcatcgccaccctttttacttctacttttgtttttacgttccggcagaacttggcacccgacgcggggctgcatcgtcttcgatctccggcgaagggataagtctaatgttccaccggtccaggcaattgtatcgtctacgtcggcatcgttcaaggctgcatcagtacattcgacctcttggattactctggtttggataatatatttgcctagctatttatcatatgtctatgttaatctagtcctagcatctcaatttagctctatcggctgtctctcgctttagggtttctgccggtatcggctaaatcgccttgctagattagattagcctaggcatctaccaccctgaaaatcagtcaacggcttgattgtctagatattgtgtttcttttcatacttagtgctgcatcagttaagtttgatctactaagtcgtgcttagaaccataatctctagcctgcttcttgattgccaataagggtttcatcggggtttcagctaatgagttatctggacgttgtatcggcttacaaggattgcatacatattggatttagccgatcgcaacaaaggttttactgtttaatctaatcttgtggattttatgatatcggaccaccagccgatgtatgctttaaccttcagatcagtgcttattatatcttgtttctagccaattggtttctactcgactatattgttattacatcatcaacagccgattgcatttatatcattatctacattggacatatagccgattgcttaaaccctatcactatcggctggtatcggcgtcggctggaatcactacatcggcttgtcagccgatcggctgttttatctgttgtttacatatattgtcagttgcaggatcaaactgactggcacacccgcatctcatcaatctttggacctgcacaggagttaagcagatctcccaggctggtgttttcgatttttttcgtcaacaccgccaccgccgccatccccgccactcccatcagaacgccgccgccccaatgcacaaccctgccgccagcttcctcccctccggccagccagagcggatctgggcggccgccgcctcccgtcgccgagcagcccgcgaagcgtagccccgccgccgctatccttgtggccgtgcggctttgccgacggctgctcgggcggcggcgaggcggaggaggaggaagggagaggcgggcgatggcgggctggttgcctcccgtgtcgcccgagggtaggcgacacggagggaatacataatgaagttatgacacatgtatgcatcgatcgggcatcgcttcaactattgacacgaataggtgcccattttgctgcttacctgcctactcccactgcaaattagcatccaccgcccagatggggattgggaacaagaaggatctactattgacgtcgtcctcagactcgaacaactcctcttcctcatcatcttctctgtccttgtcgctgatgcagatggcttcatcgaacaactagagaaccccacaccggaattgctgccgccattaaggagaacgagggcctcgccaccacgtcgctggagcacttccgccacttggcaccaggggcgccggataggatggcgggcaccttgcacttccccttcaccgccatggggagggaattgggaaagcgagtgaattgggaggagtggagaatggagatggagaagagagagaggagagggccacgctagcccaatcgcatcggcaatcagacaggcgtgttgtcgatcacatggatcaccatctatcggacggccccgtacagcgtcgcgcgaaagcgcaaaaacgagagcgatctcgatttagattttgcgatgaaataacaaggaacggtcctgaacctaaacaacgcgacgctctccgtcgcactgagaaggcaggctgatgggcactaagataaatctttatctaatgcctaactgacctaggatagtatccctccttatatagatggatgactccttaatctaatcctaacaaaccttatctaatcgtaacaaaccctaatcctatccaatgggcctaggacgtccgacccaaagcccatggcattactcccccccccctttttgagaaggtcgtcctcgagctgcaccacaccctgctagacttcaaacgaaacaccataacctaaactaaaactcttaagccttttgcatctcggcttttatgaaaaaacagaaataaaaaacaatttatgcataggaggaccttagcctaaggcactgaaggagaggaaaagcccattccatgatccaaatcgaaaggcccagaccaaaattgcttggctcaaaatatgagaatgatccacctttgcgtcataggccaacgtggaaaccacccagcccaactgagagagggtagaaaccctatctcctttcctttcaggagaccacgccgctaggagcgacgcagccgtggttgatccgccaacttcgcaaaccagtgtgtggggccggtgcgatctgcgccatagcgacgcgtgaatgccacgcccacctgtcgcacctacgaattacaccacacgcacgccgccaagctctgatccaaccatcaccggtatgtgcgcctccacctgtggaaacaaagccgcatcgctggaaaatagcgcctgaaaatcagatgcctgtaccgagttgtatcgctgtcgaagtggaaatcgccatcgtcttctccgccaccgttgagggcgccaatggcaacggcgccatcgccagtcccagcggcgaggtcgaagatgcactgccactcccggacttggcaccgccggaagaggaaacatgagcgcctcgccacgagtcacgccgtccccgcgtggttgcagcgtcaccactgaatgttgcccccatccgtgctgcttgaagacacgccctcgcggacgcaaggtcaccgcatgccggtataatggttcggcctcctcaaggaaagccgttggatcggctaactgagccgccaaggcccggagttgcgccgccaagtccatcatcttctttgagatctcggcaaggccttcactgatgttgggaaccgcagcgatctcagcacccatgggcacggaaccgaagctctgataccaagttgtcacaggcaaggattatgtggagaagaatcgggatgaatggggatagattggattatagtagataaaataacaaggaacggtcctaaacctaaacggcgcgacgctctccgttgcactgagaaggcacgccgatggacactaagataaatcttgatctaatgcctaactgacctgggatagtatccctccttatatagatagaggactccttaatctaatcctaacaaaccatgatcctatccaatgggcctaggacgcccgacccaaagcccatgacaccatgcatgtattgtgtatgtcatatgcctcccttctaattaaaatagaagttcacttttggtctcagcaatgggtagttacaaacatgcagccgatttatctatgctacgtgttgtgatagtaaatttctcaggtaccattattatacaccaaccatgcatgcaaataacttctttgcaaccgatttataggaagctcaagtgagcacttccattttccatcgcacactcactagtctggtgctaataaatttctttttttttttgagaaacacagtacaaacgcaggcgctcacaacgtgcgcacactcacccctatatttacatgaatttgcacattttcatatttacaaccttttatgttaattatatagtaggcttatgaggtatctggaatacaacagaagcatgaagccaatatgattgataggccaagcaggcgagaagttctgggagacgggcaagcccttacaaggaaatccaagaccctgtaattaacagcccactaatacatataccaaaggtgctagtgaggggccgtttggtagaaatgcatctagagttctctagaggtgtttatatcaccacccaataccctggtttccacccaaatccagctaattaacatcaagtccatgttttatctgttcttcatggagcaaacaacttttttttactgagatggagcaaacaactttgttgttgctgtccagaatgttaattttcatgctgcctcaagaggctttctgcatcattgctattgcttgtacttactatgtgttatcttaatgcatatgtgaatagtacaatgttttagtttgaagcaagtttgctccttggctttgtcaagcttcgacatcgttctttcatcgatgtaacttgcaacctcttattcccttcaatcttaatgaaattgtttggcctccttcgatagtcctggcaataatcagaatgtatataatatactccttgcttcacaagtacggattgaattttatgttcttatgtcatctatgccacaagacttgaacttctaccaacttgatgcactcactactaaagaaacacacaaaagagatgacactataggtgatggaaatgctaaaattggtacatgtaatgcttttcccacctacaaaagatgaaaatatagaacaggcacctttaagcaactatagatgtcggttttagagaaaaactggcatcaatactataggctaggcggcagaacgagcagcggcggcctccccttcctctcttgtgcattctttgatttggtttttgaataaacttattgatgaatgcttggttctatgatgcgaacttatcgatgaatatttgattctacgatctatgaactagatgattctctgatatgaacaagaacttgtctcattttttgtggctttgaggcatcggcttgaagtcaccagagtcaagtcgcctttttttcaaaccatatacctcaaaagtgtcggttcttaaaccagcaccattgatgaatcctcattagtgccgcctgctagttgctggttgccaaatccggcacccatgtggggttggcaaccggcatctaaagggtttttttagtagtgagtaatcttaaagtaattgggcaaattaagctaacattacatttattgctctcatgaatgccaatttagtcaatttagtcaactccaacagggataaaatactagcaataactcttaacagtgttatatgttttgcagtacgtataaatcgatggacatcaagcgcatttgtggtgtgctgtactagtaatagacgaacattatgtatgaatatgtagctaataataaaaatcttattagattgaatgttttttatcaccatctctattgtacatatcccaaatgtttttctacatcgatgtatttcacagttgtgtgttccataataggattaaagcatcctgtagagaaattccctctggactattttggctgccaaccttttcaaaactactagctactgtttggatttttcgtgtggaggtaacatttctagatttgtcaccaaaagtactttcatgtaattatgtttttcatatttatactgaagtaaatttgaaatagtgatgatcaaagcattgactggaaaatgtctcaatgtctaaaataactacagatgtaattatcaatttgttgtcccatgggctctactttcagtggtttcttcagcccatgctcaattttgctagagtctctcaggaacctgcgtagatgcatcttgtatagtgtcaagaagttcatatatgaaatgaattttgcataacgttttctgcaagaccgcaagttcctgacattttctatatatgtgtcatattcatggatcaaacgaatgattctggttgagaactctcttgttgattccatttatttgtaaagttctagaccaaacgcatcatgtttgcatgacccatctcatttcaaatttaattatggataattttaaactatatatattcatacataagcattgtacagcacactgagtacactgaaaattcatttaattttcattaatttaaaatattattgacattgatcacaattcctccttgctaattactttcaaacagcagagaagtggttgagatatgaatttatacaaaatcatacaacctatgcatgtgatttggttgtgcaacaattgtcaatcatcaaatcaacatcgccggctttaggctccatattgtcaacttgtttggtggcaccggtttattgttttaccggatgaatgaaattggtggctgatactcactcattttaatgtgctagggttgatcagtgttgtggttgcgctcctctgctagaatctcttgtggtaattgaagatatggaacccttttgttttcacttatataacaacagggatctagtttcttttattttttaatatattctaccctttttcacaaaaataaaaaacttatatgtgggtgcatgtgttttcccttgtgtataagttcggcctcataattgaaacaaaagttcactatgggtcacaactcacaataatgggcagtgacaaccaatttatctcatacaatggggctggcataacgaatttctctcaggtaccgttattgtaaaccaaccacgcatgcaaaattgcttctctacaagtaccattgtaggatattaaaaagggggggtgctggtgtggtcggccacatttgcggagataaaataaggggtttaacaactcaagtgaacacctcgattgatctgtagctctgctcccaatgcaaacacactatatttgtgctaattttatttcaagtagctatgaatttacacctagtcgtgcaccttttcgggtgcatgagatatgataggtttaggaggcatcaggattaatacatcaggaggcatagggactaatacatcagaagttggattagcatgtacaacagttatgtgtttcctctgtttcggactacataaagttagcatgagactttgcacatgttctcctacttctctcaatatctcattggtctttctttaacctatagggcatgcctttcgcatctaccagagagatttgtttcttaggttcatcttagcttacattgcttatatacattcatcttaattacagtctacaagcatgcatggctgttccatccacctgccatagttggttcctaggtgatataaagcctagtaagcttaggaggcaaacggaccttagaattgagcttttgcgaaagtgtggaagttgtcaccatagcttataggagtttatggtgtcagaggaatgatctaattttcagcaatgttaatccaaatttcattttaaggagaaatttgctatacatttgtatagagcaagaggagataaaacagcctggacattatggtttgatgacaacctttcatagatttttttaaaaaaaaagtattttttccttgtatgtatttataacttgtaaatattattcttttttaatataagcatctcctactattttcgggtaaataagttattgaatactttctttagctagtacttcctctgtttcacaatgtaagttattctagcattttccgcatttatattgatgttataaatgcggaaaatgctagaatgacttatattgtgaaacggaggaagtagaacattgtgtggcagtgcgtgcaagaggtgattgttaagcatgcatgactcatttctgcgattagaacgctagcgatgatgagaaaacgtgtatcgaatgcacatgtgaagttcattggcttgtgtggatatcccttgcatccaaaagtggctgcaatttcttttgcacatgtatggatctagctatggtgttatagatcatagatggtcagataaagatttctccgacctctacagacaaaagtcttgactagaagccattgccactacataacatcgtatagttacatgacatcaaagaaaacaaccctaatgagactaagtatggtagtgcacctcaatatagttttcctctgatattgtcggtatgtcaatgatgtctatgcagttgtactatttgttggccacaaacacatggatgtgtattatcttaagacaattaatgcgataacattatccttgtctctacacgccatgctcttcctaactactacaattttgtagcatttctatgttataggttatgaaacgatatcggattcataaaaataaaaaatatcacaagcctaagatatagattacaatttacattaacacttgtttgtaatgtacatggtttttccgtgtgtatgtctcccttataatcaaaataaaacttcactatttttcacagcaatgtgccctgacactgaatttatccaggactacagggttgagatactgaatttcttcaggcagtattattgtaaaccaaccattcattaaaatagctagcttctttgcaagtaccattgcggcctatatgagtatcagtgcactcatcctcatttgtgctgaacaaactgaatcatgcatggttcagcggaccccttccagtgaacacctctcctcttcaaattgctcactcacttagagtctctagactcatgctattttcttttcctgaacctctgaactcacacctagttaatacatttccgggtttaggctgtgttctccccccaccccccccccccaaaaaaaaaaaatcccaatccacctctctcgttttctacacgcatgctttttcaaactgttaaacggtgtgatttatgcaaaaaatgaaagttgttttaaaaaatcatattaatctattttttaaaaaaaaataagttaatacttaattaatcatacaataatacgagcttcgttttacgtgccggggaggaggggttcccaatccatcctctcgaacacagcctaaggctatgaaaaaactttctatatgaaagttgtttaggaggcatcacgattaatacatcataagcataaattcaatgcggttagaaaattgaaggctatggactggattcggtggacaaggatgatctcttggttgtagtgggctgtcttttgtatctagtcgtggtgtactgtgtcccagagcatatcatgcctcagattgcactgtgagaacaagaagaatagattcctctggcctatgagggtgcagccgactacggatccggcggggcgacgacagcgggtgcctcggggggggggcggcgacggcgtgcggcgtggatgcgggcggcagtggcgggctagggtttgggattttttggattttatttttcttcgtttgctgaatttattttcgcatgcggccggtataagcgaccgcttgtgaaaatcccatcttcacatgcggatgcgtcggccgcatgcaaaaagggtgtttttacagacgatttcgtccatgcggttggggcaatcgtatgaaaaatgcatcccaaatacatggaaagacccttttttagtagtgcgttgcacccgtcgtcatcgtggtgcccggcaactccgccagaaacgagaggcaccagatcagatcattaattagtgagtaatgcaaatgtgctagtatcaattactactagagttttctgcagtgaggcattactgtgcaattgaggtatatatatgctcccacatctacaaatgatcagttccacgaactagaaaagttagagaatttagatccaagagcttggattagcactagcaaatcctagcgacgaatgattcgtgctgcagggtggtggcgatgcagagggtatagacaccctccctcgacacgattgaggtcgaggggttgccaacatccgcactaacagttgagaattgagattggtttttgagttttggggcactggtgtgaacaagctgagcgaatacagtactacggtagaacctggctgaggtggtgtttggatccagagacttaactttagtgtctatatttagacattaatttagagtattaaatatagactatttataaaactaattacataaataaaagctaattcgcaagacaaattttttaagcctaattaatccataattagagaatgtttactgtagcatcacataagctaatcatggattaattaggctcaatagattcgtctcacgtattattccaaaattatggatgggttttattaatagtctacgtttaatatttataattagtgtcaaacatccaatgtgatagggtcttaaaagttttagtcccatctaaacagggtccaggtctgaggacggacttgtcgggcgggccatcgtggttgtaactagaggacatacgggcagccctagcaggtggggatgtcgagatggagagtttgcttgccatcgtcaaccatgtatatacagtggaaactacggtatcatcaatagtatatacgtatgagatttagctatatcatcaatagtaaatgttttagtcccagattcaattgtaaaacttttaatatcaatgatgtgatcaaatatcatgtgtccttttttttaatccaacaatatttctatgtttttattatatatatggtttgcgctatatatattcccactttagagtcactaacatgtaagtccacagcaaaaggagcccatatgtttagtgactcaaagtcatgtgagtcgcaatcttgcaatccaatgtgggggatagaagagatgaagagagagatacagaggaggggacactgacatctgctgagtcagccactgacatctgctgagtcagccagttggaccatatcaataagcctcgtcaacaattaccgttgtaattactgtcttggaagtcaaattagactggttttaatagttttagggtattacggttaaggtatataaattatatcgaacataaatttgagcgactcaagttggacttatttcttcagaaatttggttcataaatgtaaaagaaatgtgtaatgaggcccattgctgcagcccaagcatgaacaagcccaacaaatcagtgccatccattccatccaaattggacatctactatacataagaatggtttagctagaactattattaaaacgggcttcactagaataccattgtcaacagagtgcagtttgatattttgctatttttatcattttgggttaatgatgaaaaagattttgctctcttttagaaccttttgtgccgaaactgcccctagttttttctttcgtcctctctctatccaaaccgagcggcatctttttttaacgcacgttttttctctcgcgtctcttctgtcgacggtcgaccacctgtttttgtcgctcgctgaaggactgagccgaccgagtggcgctggaggcggaggtgcgagcaccaggcgctcgcagtggctacgagcgcaggtggcagcgggatcgggggtggcagggagcggcgaggttgggggtggcggtgaggaatggggagatgtggcgcgccggccgacaaagcggtggtgggcggtgaggttgggggtgagcgccgaggataggagtggcggtggggagaggtggcgcacaggccggcagagtggtggtgagcggcagcggcgtcgccgcgccccttctctcgcctattatgtttcctctctcacgattcaacaagttgacctagggatataatcatctgagaaaatgtgtaatttacaaaaaaaaaatgaaataccatcgacaagcaccctaatcctaaaaatgtcattgacaaaggcaactttctataaataccattgcacaagtctctttctcccaaaaataccattaccgtcaactccacaccattacaaccgttaatttttttatagtgaccattttgcccacagtgcaaaatatacccaattttcactgtcaaagaaaaagatagatgaaacaaaatttataaccctaaccctaccaatcctgatcctagcgaggaggtccatggcggcggcgcggtagggtgtggcggtggagcggcaacacgcgacgaggaggtccgcggtaaaggtggcacggggcgcggcgaggaggccgcaagcgacggcacggcggttgcaggctgcggtgcgggggctgtaggcgccggcgaggagaggcccgcaggcgtcggtgatgagggggaggagaggcccacagccgcagtcgcgaggtcgccgtgcaggaggaggctgcagtcctaacacgtggcgcaattttttcccttttgtttgttttcattcggcgtcgccgaaggggtggaacaagccatggcgatggccgccgaggtaggcgtcccagaggtggtcggcgacgttcttggccgacctgggcatggggagggagtactggtcaccttcaccaccaatggagaggagcacggtgacattcttggcgtgctggtagtgcttgatgtcggcgccgacgctggcgacggggtggccggagaggtcggcccagtagcggccatggccgaagacgctgaggaaggagatgatgacaatgttgtggaagctgttccacgcaccatttgttcaagaggatgaggagcactataacaacaaatgagagcagcagacatttttaatttagttatgtgtcgatcgttatctgcaccgcagacattttttgttgactaaagacaaatgttgtgtacgcgtaagtatacagaagttgcttgcaatgacaaaaccgaaagatgtctcctgatgaacaaatggttgtctagggataagattgtcttttcatataacttaacggagagatgttttttttttaggtttaacagagagatgttaatagcagtttgatggtgatagtatttttgagagaaagaggcttgtacaatggtatttctaaaaagttatctttatcgatgatatttctcggattagtatgcttatcgatggaattttatggattttcttttttataatggtattctatcgaagcgatgcttataccatgctagaaatgccattttctaattcacgaggctccaaccgcgagaaaggcgagacagaatgaatcctcgccggcgacgaggcgccgacacctccctccggcgactgggtctccgacctcgtcgccggtggccggacggggcagcctcgccgcacggggagccccatcgcctccgactccgtctcggagtcggattcccgccctccttatgggaaaaagaaaatatctcaccccgattcgatcgcgacgaaccctcgcactccgactccgattccaattccaactccaatgtcggtggattttatccctcgacgataaaaagggcgccacatcctccacccgagatcaccaaatctctcaattcccaaaatcaattcgcgcaccaaacctcccaaatccctctcccaccagttcttggattcgccgaggagctcttgtccttccatccatggcggcggggtggcgcgagacgcccgccgcctccgcggccttcccggtggcctacaccgccgtcctcgcgctctacctcctcctcggcgtcttcccgcgcccgcgtggcgccccgccgtgcgaggcgctgctgtgggagctcgccgactgggcggccgtggccgtctgcctcgccgccgacgcctacttcatctactgcatcgcctcctcccgccgccgccccgacgtcccacccgcggctgccgccccctcccccgcagatggatctctgctagggtttagggcagggcctcgccgtctcgacatcgtcagggagtgtccttaacccttcttttctcatcatgctgctactgttattttcttcagttaattaggaaggtttctttctggtgtagtttagttgttagcaacagcccttgaactgaaaccatggttagaatttggaagattaatgctgtagtctagtgtcaacaacgcttccttgtgctgctttaatgagcttctgcatcacaattgctacttctgctactagtcattgtgtgattaccttttgtcttgcaagtttctacacttattaggaagaattctgatgctcttagaatattgattagtcattagaatctagttttgttagatgtgtcgatgtagaaatagtcgattgcgttcgtgttcctttgataagccttctttccaaacttcaatcttgtttttgtaatgcatatgatcctccacatataaggatcaaatagtatattctattgtcatctgctctgcaagtcttgaactttggtttttatcatactgcaaaacacccctaatagtactttctgcagttactttttgtcacctgttctgctagtattactttctgcagttaggatgatttctgttgtactgtagttgttagcaacagtcttgaactgaaaccttggttagctagctgtgaaagtgtctcagccaattttctctcctttcttaatgaaacaacagagttcctgctttagtataaaaaaataccaaaaaaaaatggttagaattaggaagatttccaatgtagtgtagtgtccacaatgttcttcatgctgcttcaaaatcgctacttttactacagtcattatgtgattaccttttgtcttgcaagtttctgcacttaagtaggaagatttctgatgatattagtcattagaatctagttctattacatatatcaatgtcggaatagcatgtgccatgtttgtgttcatatgctcctacacatatagatcaaattgtatattctactatcatctgttctgcaagtcttgaacttcggtttttatcatagagcaaaacaccccaataatttccttttgggaaaacggttgagtgatcatgaggtcgagagttcgagcctctgtcaccccaaatattgagtgatgaggaaatgctcctgtgacaatcgggttcgtcacattcatctgaccatcagatattaagagctagtctgaactcaattaacttgaatcttctttttgtaatgcatatactgtactccacacatgtcgatcaaattgtatattctattttcatctgtgctgcaagtcttaaactttggtttttatcatagtgaaaataccccaataatttccttctgggaaaacctaactgccaactagatgcactagtctaaatatacagttaagggctggatatcaccattgacttggtctcttggttgatttattgctctgatgactaccaattcaggtcgcattattttgcacttgtgcctgcccccacatatttattggtcaatttagttggctccaaaagggtataaaatactagcagttactctaacatagttctgtgttttgcagtataaatccaggcacaccaagtggacacaaatatatagaatacatcatgacttttcaccatatcattcagtatgaatatgtaactagtaataaaaatgttattgatttgaatgttttcaatcaccatctatattttacctatctcagtaaacttcttagttgtatttgaccccatgtcctttagaattgcatattccttaacaaagggagcagttgatgagtgatcctttctaaaacagttatttggatttgtcttattgtagtaatattacttgatttgtcaccaaaagcacttccatgtgtaatatctttatactgaataaaatcgaaatagtaatgatcaaagcatttactgaagattgtgtcaatggtctaagacgacaatagatgtaattcaattaggtatgcctgcattctattttcaatggtttcttaatcttgtgcttaactttgctgcagccaaacactgtcgtagatgaagtggtcaagattgtctggaaggagcaaaacatgaagtcaattgctctccagaagacaaggtcaatcactgctgtgctgccaaacaaatcagttgttctccagagcgccaggtcaatcactgttgagttcgagaacttgagcgaaaactgaagttcgtgtatgcttggagctgcagtgttgagagcttactaacttcgtggctcactcatctgaactgagaagttacaaaacccagtggtggaaaccaaactacacaggtgtaaacctggagtagcagtagcactaaagtaattctggtctaacataagttacttgtatcattagctgtactgaatcattgtagagctaatactaatatatgaatggtatatataaactaatacgtgtactaagctgtaccaaacgatgcacctatactgttgagaagttcatatatgcaatgaatgttggttgacattgcttaatgttatctgcaaattcttggctttctctatgtaccatacacatggatcgaacgagtgattcaggtcgagaattcccttcttgattcgttctgtttgtagttctgaaccaaatgaaccgtattggaaacttggaatgtgaatatcacatcccatttcaaaattaattatggacaaactgtcacaactataatcaacctccatttctcttatcagatggacagtagtcaaccacaaattcattcatgaatatgtgcaccggactaagtacaccgaaaattttcaggtagttttcatcaataaaagagggcattgactttgatctcaagaactcctcactaatcactttcaaacagcaggggaaggaagtagttgagatatggatttgtacaaaaaaaattatccaacttgtgcatttggtttgattcgacttgccggtgagggccgtccaagtgacatgtgggagtttcgcctttactgcaatcgggccctaccccgccaggtgttcgaccagtgccccgaccgccgcggcgccacgagcctaactgtcgcgccgcggcggcgtggccatcgcttcggtgttcgccacggatgacgatgtcgatgggagcgacgccaggtccggggtggcggtggatgatgacgtcgaggcctctgatcggtcggcgccgccgcctcgtgcggtatagtcggcgagcatggccttgagctcggcgagcacctcgcccatcgcggggcgctcgtgcttgtatgggcgcacgcaccggcacgcgagcgcgaacacggcgcgcacggtgggcctgtcccagtcggcgccgaggcgctcgtccaccatggactccgcggcggcgccggcctcgccgccggcctgggcgacggcccagtgcgcggcgtgcacgatggactcggcgccgcccgacggcgtgggcacgacggcgcgcatccccgtggcgagctcgagcagcacgacgccgaagctgtagacgtcgccggcctccgagacgtgccccgccgagaagctctccgggtcgacgtacccgcgcgtgccgcgcacctccgtcgacacgtgcgtcccgccctcgggcacgatccgcgacaccccgaagtccgacagcttcgccgcgccggactccgacagcagcacgttcgtcggcttcacgtcgcggtgcaccacggcgccctcccggaacccgtgcaggtaggccagcccctccgcgacgtccaccgccacctccagccgccgccgccacgccagctcgccctggaacagcgcgcgccacaggttgccgccgccgaggtactcgtacaccagcgcgtggtggtcgccgccgaggcagtagcccaccagcgtcgtcaggttccggtgccggagcttggcgagcacggccacctccgcgtagaactccgacaccttcttcgacctgtagatcttcttgatggccactcgctgccccgacgggagccgccccaggtacaccttgccggcgccgccgctgcccagcagaagcttctcgtcgtagccattggtggcctgcttcagctccgacttggtgaagatgtacaggccctcgcgcggcagcggcggcagcgacgccaccgactcgtcgtcgctgacgtcacctgccgtcgtcgtcgacctacgccggcgacggattgttacgattgccagcgcggcggaggcgaccgccacgacggcc

SEQ ID NO: 6497 - DNA, 3923 bp, Oryza sativa
tgcaagttcagattacctccaaggtagttctgaggaggatgttgtatgttatatatctgctgtacagaaacaaactgggctccaacctaactgggctccaaccggctgatgttgttgattaactggtgttctctacccagtcagtatcggctgaactatttgctgcccaatcggctggaccacatgctgcctgattggtgtatgctgaattggttcaacaatctgctgagttggcccaaacattgccgcaatctgctcttgagtcagcctattaatattctgcccagcatgctgaggctgctctctagtcaagacatgaggattaaccacctgtctttgtgccgatgatgaagcaccaggtgctggagccgaaactgatgccatcggctagaccagtggtgcattggatacgggttgctggttaccagtcaccaaactcctatactgtggaaatacgccatttggtagaaagactggtaccgtgttttgatgctcaactatcgtgccatcaaccacagacttaaccatattcgttaaagtattgacaaggacccctgattggttgatcaaagcatgttgaaagcatagtcaacatgatcttggaaattattgaatttcaagggctcttgctcctcatcaccatcttcatccacatcctcaacctcaccatctcgaggttcctcaccttttcacctgagccatctgcagcacctttagtccctttagctttaccacctttggatgagcttgttccaggttcatcggcagcaaccaccttcaccttgtacttttgaataacttttccctggcggtttccccgaatgaattcatgaattgctcctaagcactcttcatcatttgttcaaactccttcctttgttctagtgataatttgtctatagtgaccgggacgatgttcccttcattaacctcagacggttgctcgggcggtggcttagtgaacggaggtttagttttgcctcccgttgctggtgactgtggtggattctctgccatgaggaaacgttgtcgcaacttgagtcccaccggacgtgccaaaagcgtgttgatgcgaaaaacgcacactggcctggaagatctgcttaacttctgtgcaggtccaaaatcttgcttttaggttcgtgagcgtgccagttgatttgatcctacaatcaacaagaaagaaaaacaagaaaaaccgtggttaaattcataaatgatagctgatcggctagttgccgatgacatatcatttatctttgagccgatgtcatattggaatcgatcggtagtcatgaataaataaaataaaactaaatctactcaatcggctgtagatattaatgacatataatccttccttcgatatatatttaaactaagtgattgggatagatcggtcgctatgccgagacagtataaatcacttaagtcgaaatatatattaaagcaatgattatatagacgtttatagcatagccgattaaatagatccagtatgtatcggctaatactctgataccactttaaactaggatattagaacaggcagaatatatcaaacaggagcctaatatacttgatgcatagacttattaaagcaattagttataatcaagctgtgagaataaagaacagatcaggtagatcggtgaaaccccatctatatcttcgatgatataaacagccagatttatagtatagattactaatagatcgactcaaccgatgcacattaagcgtaatataaatataggatctaggcagagatgaaacctataagagatggtagatacacgatataatctaaataataacaaaacataactctatcggtactttctaaccgatgacaagttatagatcgcaactagcggagattacaacgtgtatatgataacttgacgaatcacataaacaagattagagtgtcataaagatggaagcactaatcccgagaacgcaaggcgccatgacaagtttacctctagttgaagatcgtaatcgatgcagctcaacccgaaagtaagaactcgtcgaaatagaacgaaagtaaaaagggtggtgatgcactgaaagtgttactgaactgttgttgttgattacattgagttcgggtcatatttatacccaagatacaaaatatgtccttgccggacacgactcttatctctaacaaactctaagatatcataagtctttgcggcagacttttgcccaaacatatctctaagaaaattacacgaaatatcctaattaatagatacaattgccttgttcagagctctatctctatcgtggcaatcctcatgaagcacattgatcgattctagaaacagccccgaagccatctttatcagaatcggctgtaccgaccccatcggctttatcagttatcctctgtccgatccatctctgccgatgcaaacgccaacaaatgccttcgcaaccgatgcatactctgttcttcgagtctatttcttcgccgaatccgcttcgattccaatgtcgaacctggttcatatcttaccaaatttggtcgttaacacggaggtattaaagatgtgggcgaagtgctcgcaccacagtgctccgggcgttttcggggcgacgtgctcaattccgctgatgtccacatcatccggcgctggtcctggaaattttgcaaaaacgtcctcgcttaacttgacaatctttcttaagtccctcaatgtaagtttactgtcttatgtattcttacgtaacggccatctgtgtcctagtatatcctacgtgaaggagacgaaattcctaatataggaccgcactctcagaaaatgaaaagaaagggttttttttttgaaaaagataacatccctatcccctcggttcgccgaaccctagccgccactgttccccaccctattctctcctccttccccttgcatgacggcgccacatcgtcttccctccttcctcgcttctcctcgccaacgacggtctccaatcgcgctctccccgcccccccatcttctacccctcttccgaatcaagcaggggaaagagaacccacacactcctcttctcagcttctcttaccttaagagcagtggcatgagcgagtcaacttaatctcaagagggaggcaagcaatctgtgctagggagtggatcaaagagggagaccgtcagtgggcagggaggggcgacgaagtcgcgagccgccataacggggacatggagggaagggtgctagtatgctacagagctcgcctatgtcactctttcatccttttcttgtcaaacatttgtagactaaaaaataaaaaaaacactgcattatttttacgtctaatatatacgaatctttggatcacctctagatcgaacaattatttaggcacaccatggataacaatcataaaagaaaaggcagaactcatagaagtttaaaataaaatgcaattcttcaaattttgtatattatgttaagtgcctcttgagaaaaataaaagacgagcctaaatacctgcagttaaagtaaataggacagcattgttttgcattcctatcagatgcatgataatacgttatgtatatgtgtcttagtttggccatatcacctaaaggatcctcgtttagcttatcttactagaaataagcaaatcctataccctacagttttataagtagtggacttagaatacatcgcaatatagtcatctagtttacttcaacatctaattaatggatggcttaatctggcacatactctggtaactggtaagtacagtatacttccttgattatataaaggttgttccattatgcaagaaaggaggcaaaacaaataaatacatagacttgcaattcctaaatatagttgaacaaatcaaagtgccttcataaaaggcagaaacatccaagacaacttcctatttgtaa

SEQ ID NO: 6498 - DNA, 29542 bp, Oryza sativa
  unsure (1)..(29542): unsure at all n locations
ggtagtggcatcagagggtgtgtaaatttggaccaatatatggcatataagggaagagccaattttcagtggcatataagggatcagaccaattttcagtggcataagagattctctctttattttttgattaaacaactgcagcttcttaaaataaaaaaaaatagactgattgagaaaacttttacttttgattctggggaaaaactacgactatatcagaagctcctagatagagctagccaccttctcgtactctaggttgggttttccagtttttatattctattttattttttgaattatatatttgcaaattagaatcgaatctacattgtgcaaaggagaagccgcagcgagtaaaactccccaaacaaggccaccacagacttcggtcggttgactgctattaataacctttaagtcttgacaaattaaacttcactctgaatagtcttcagtaggaaagaagttgacccaaagggcttggataggcttggaccaacttttttgtttgtacgttcaaaaaaagttgaacaattttcataaaacgtgttttgattttaattagtaagttaaggttcaaatattttgaccaacaatttattaagttaacatacgagtatgtttatgtataaaaattacaccattagattcatacttcaaggtagtgggtccagaaaattggttagttgttggacgtgcttatcaatgttatagcattgctaattatacgcagatcatagtgttatacgatgtcatcgtcaaacatcatatttgcaaacgaaaaataatttgtgaataaaacttatatatacgtgttcttaacgatctaaaagcaaatactgaaaaataaactatgagaaaaaaaattctaaatcaactctaaatttaaggttaaaaattcaaattttagcttataagcataattataagcgaaatgatgaggctgataataaatgaataagtaattctgctataggttttatcaaaagtcgatggtgtcacctacctacactaacacaatagaactgctcctgcttccaagtaattccactcaatattgatttttatacaagttagaaatatattataagagagaaactaacgtcaaaatttagttataaggactttctaaaatgaaagtacgccttataaagtgaacatagagaacatagcgagtagttggtaaggtggctgcaaagcaattctgatttaattttactcgtggctatttgttggaaatgtcactctttttttataattgaagtaactatattggaagtgaaaaaaaaatttaaataaaattcttcccatctactctgaatttttatttttattttcatatcatctcttatctaaatccttggacttttgaagctagctggggtgagtcgtcgttgatggtgccaccgtcatattggacttcatagtggtggtagtggagctggctaaaaggctgtttttctattgccttttctccaactatcgtatctgtcgctgatttttaaggggtttgaggattacgataatctcgtttggtgtaatgtaatagctttttgatatttagctgtcgggcaaattacttttaatttatgttacaaaatattatattattgggcccattagtaaatgttaaaaatatgacacaattggaaaagacatgacagccagatagcatattttacccatctaatatgtgtttgatgagtttttgtgcaaaaaaaaattgggcatttaattttgtacgaaaatattatctgccacctaactttattaaatatatacgagacgtgtctatatgacatgtgagcccagaaattttaaatatcacggtgtccgaatatattcgatattggactcgttttgttgtataattcgaatagaaagtaatggttcaaatggattttaaacccgatgtacgattcaaaaagattgaagctattaaaacaaaataaataagcaagtgctattgttactatgagcatgcatggtcattggctgtggcgattaaacatatggggctcactgtcattagacatgttaatcacataattatctccagacggcagtacacgtcgatggatctgctcatctctgcgtcggcttatcgcgaagattagcacggggcgctggaaattcggaagccgtttccgccaccgctgcctatataaggagtagaccccatcaggagccggggacgctgacgacgctaaaggagacacccaaccaccattttcattcatcccattcctcttagtagattaggaaaatcaagagaggagattgaagccggccggtgatagcaaaccggcgccgctgcggagagaattaaacaccgcagccggcatccttcatcaagtcgattcatttatcgacaacatgccgccattcaggatatttgcgctggatggtgagcacattgaataaatattaattttctagattaaacacaatagatgttcggtctttattggtgatcggaacatctgcgtgttcttaatctatcttgatctttatgattaaagccagatcgatgagagccgaaacacggttatcatcaaactccatttatacaatcaatggtataaggctggtccggtcctcattggcgatcggattatccgaatactatttgatattttctacgctcaaaactagatgtccgaccctcattggagattggacaatctaagcggtgtttttacaaaatatattttgctaccatgcacacgcatgggagctattcgtgatctttggaagataaaaattatggccgagtatttacgaggccggtgtcatgatattattaacatgtccaaacagataggaacggatacacattactaggttccgacgaggcaaaagtaatgatatatccacatctaataaaggccggcatatatgactgggtaccgacgaggcaaaagtcatcccctttattatgatacctgattcatgtatggacatggtgataatatattgtgaccaggtttcggcaaaacaaagccaccaatatcacagttatcattaaatctctgcaccaacctcaaccttcggcgagcgattaattttgaagacgacgatgacaagcgcagcttaatcgaaggtattccataggctcgtcccatggatgtaattaaccggccgcctcattgctaggcactgggaatcagcggactacacgcaatctccagtcagcatacctttccattaagtattcctcgcgaaggcaaaaggcgaactcctacgggagccctcatgtatttgtaaatattcatgttaatgaatcgtgattaataaaatacagggttttcctattttcttgtgcgttcgttgttttgttttcatcaaacaatatgcaaacaagctaaaatgattataagtttttttttattttcacaataacttaaacaataagcacaaagcaacaatggcaaacaaaggcagcctttaggatgtccaataaatgtaagcccgcactgttatgtcctgcctttgcaaaatgattttgttctgcttaatttcaacaaaaatagtgtctcgaactttggttttaaaactaactttgttccttggatttttagacataggggagagaaggaccaatttacaattaaatccacgcattgaatttacaaaatgatacatcagggcgatcaattcagttgcagtgtacaaatggaggaagtgcatttacagagaattgtttcagaagatttacaaggaaggcccttgcttgggccaaaaaagaacattttctgcagaaaatgtgtttttgcagggaaatgaatggctctacagctacagtttcaagtatatgcctttcatgtggaggaaacaagcagccaggcaccagaagatgatctccaagacgacgaacgccaaggttccccagcgtttggagtggaagattgtctgaagcagagattcagtcaaatccacctgaaataaaaaggagaattttccgcgctatgaatcaagtctctagaggtagtagagctttgcaagatcattttctgttagctaacatgtaaggttattgctccaggaaaagaggaatttggtattcttgagtaaatattgcatctatgaaagaatccaccccatatatggtaggatgcacagcacagcaagttgcttaccaggttgttttcaggtgatctccaatagaacccttgcacaagtgtagggaagatctcacaagcagcaagaacatacactataagcgcgttcatgcccatccactggaataggatgaacggcttcttgatattgatgacatcaacctgcatgacaaaaagaggctctgtgaatcagaatccactaatgaggtaatattatctgccttcataacagtttgttcgaacagaaaaggtaaagcttccacaaactaacatgggtacatcaaccgtcattaagattacatatatagtgataccatactatcccacagtacggtttccagagattgttcgagcactcaaacttacaatgtagtatagcaacaacagcaggaatccagataccccaccggttagtagcatgtagctcaccgtgtacaaaggcttgctgaaaggcatgcctaatgaccaaaacatgcatgaatcagattgaggaatggaagctctgattaaaacaacaaattgctgaatgccagcagtctcacgaaacacataattacctaataactgaagtagaaatcctgagactgttaacacagtggaagctagtagccataatagcattcgaggtgaatgatcctgtggtagaagcaaaggttagagaagtctggaaatatcattgtgtttttaaattccattttgctcaaggttcaagagattctaaaagggaggtatgcagttcatgggcactaccttgcaatgaaccaaaacatgtccaaaatgcaatccaacaaagcaagtcactgcagccatcaatgtactgtaaaaaccaataagggaggttattttctggtttgcctacaggaaatgggaaggttcaattgataaacattggtcaggtcaattgaggattgaatcggttgtacaattattttaagaaccaaataataaaaataaaagatataaataaccaccttagcaaaccctcgggatcaaatggagccaggcaccagtctggtgcatttggaggaagtggtccataatcaggagagttaacactgcattcctatggagcaaataaaaggaatttaatcttgcatatttttcaaattggtatcctataagaacatggctatttgatatccaagtgaatcgggaaaagatcaatatcatgtgtttgcttaaggaaaaaaagaccttagtccttttatagactgggttcttgtacaggtgattttcaccaagtaaaactcgatctacaaatccaactgcattgcaaggtggcccaagactacctctaactccacactggatctgaaacaccaaaaacaaaaccagcaaaacaggttagtaactgcaacgatgtagatatgatgattaggaccacaaaaagctgtaaaggaacccacagccacaggtaaagactccacagcaattagctttcaaacactggatgaattgaccagttattcaacctaggtttcatatccaccagtaacttatggagttttggttccagaaatactttatgaataaggatatacaaaatccgatattttcttaggttagtaactgcaacaaggtagatatggtgattaggaccacaaaatgctgtaaaggaacccacaagtaaaaactccacgacacctagctctcaacactggataagctgacttatctgatctgaacataaggtttcatatccaccagtaacttctggagttctggttctagaagtactgtacgaatcaggatttacaaaatctgatattttcttaatatacatactaaattcaattcaattttgaattcctgaatccagggtaaccaactaggaaccttcttcaattaaaattcggttgaagttgagttttagttagcaaccgttcaggaattcttttccccagtctttgccaggaagcagtactggcctgatccagtattttttttatcaagacttgggttattcctggtaaatcaattctggataagcatctgagaacgaaacaatgggacaaatatgatggccgtgaattcatgtatcttaaaatgtcaccaaacatatcaactagttttgaaaaatataactgtgtaaatacgaaaagggtctgtcacccaatcaaaacatttttgtcaaaaggaaaatagtcagcataaatggggtcaaagtatatttactgaataaagctcagttagacatgattgaaatattgcattccagcaacttgagtaggtttcatccaaccaaatatatcactacagatacagaatcatgatgtgcttcaagtattgaaacaaaatcacatgaaaagcaaacaaatggtacatctagcaatccgattcttgagcacacaggataccatccaaatagaataaagtgtttagattaaacaggatattctcttcttaccattttcattccaatttcgttgcccggagttggaattgtaaggattgaattgctagtttgaactttaaattcccaatttgaaacataaaggccgagtagcaagccaacataaagtgctgaaatcattacggccacgatccttcaaacgataaacaaatgtcagaaatggtatggccatattagtatatcttccatgtcttgagttcagaataattctcagttataatctcatatgaagcacagccaaactacaaatattgcaatttttttaactgtacagaaaaaagttacctaaccctctagcagatgaacagatcgagcaatcaaaatgaccagaattaccaaaactcccccaaattcaggactattaatcaactaatgcagataacattctttagatggacaactaaacatgttatttcatatcatggaacgtttgtagagcaaataccactttacatgaacatagaatgtaatcagcatgtataaacaatgattggattacataattccaaatgctgaacaaaaactgaaactttccatagtaaattgttacacttattaactaaccactccatgaagtatttcttcacaaatgatatagctgaatccactgaaatattgttgacaagccaaatctctgaaattgccgctagaaagtatccaatagctatcctctaccagaagtataacaacaagttaacgtttcgaacattcagtaagccgaagaggaaatgtgataaagcttctccttttgtttttaaacactacctgcagcacacctagccatcgaatatgatccaaatcaatgccataagttaaattgtgtctgccatgaatatatcctcctacaggtaagatataattttaaaaaggaaaaactccgaccaaaagaaatggcaaaatatggagctaaatgttgctggtatagttggcaaggaaacacagggataagtataaccttgcaaaattacacccaagatgaaaagtttgatggccctgattgcagccttcttagttgccactgttttgtttggtgttttctgttgtgcatcatccacaatagtcagatgttattctataactaagcagccagtggtttaagtcacgcagtgagcaccaacatcatgagtaatcacacacattccaagtgatggagcacaatgacataggcattaaattttgttatatgcttacatcacttggcagattggaacagaagttggaaacaaaaaaaggtataccagatttaaagtagaaaaggtaaccaggataaaaagattgtggcataaaggtttgcagaatttttttggcattgcaatcaggtagcctattatattctcacaaagtttcagaagatttgcacagcagatatgctcattacctcattggcttaacaactgagtattcacaaatcctctgaaacttagtcagcaatagggtatctcaacaaattccccaaaccaaaattacctaggttcaacacacacgggccaatttttacaagtcacaggcacatcaaagttcctttgatttgcttgatactccctatgtttcagattataagtcgctttgactttggtcaaagtcaaactactccaattttaactgagtttgaaaacaaatatagtaatatttacaacaccaaattagtttcattaaatcaatagttgaatatattttcataatatatttgttttgggttgaaaatgttattacttttttctacaaacttgatcaaacctgtagcaaagtcaagacgacttataatctgaaacggatggagtactacatatcaaagctttttcttgaagtagcagaattcgggtttgggcgtcaggtaagcaggagagggcactagggttgggggtgtataccttgaagacgagggcggcggagacgccgatgatgaagaggaaggcgggcatgacgaagtcggccaccgtcaccccgagccacggcgagtggttcatccccggccacgccccgccggcgtcgtccaccagtatcatcatctgcgcccccaaccaaaaaaaccaaacccccagtcaccacgagaatgagaggatccccgaccacgccgtcgggagaaatccggtcgaggaaggaggctcacggcgacggtgaggccgcggaacacgtcgagcgaggcgacccgccgcggcttccgctcagcccccgccgggtgctgcggcgaaggggatgatgcggggtaggggcggatctcgtcgtcgtcgtcggcggaggcgaggagaggacggcggtggccggcgtcggcgtccccgtcgccggcgatggcgacgacggcggcgtccatttttgggtcgtttgctcgtgccgtgtacagagtagaccagttagtagtaaagtatgtcgcgaatttgtattatattgaaatacgtgaaatattcggtcggttagctctnnnnnnnnnnnnnnnnnnnnnnnncgtttagtaagcgggaggtcttgagttcgactctcaacgagagcaatatcttttttataaaaaaaaaattatacaactaaatttttaaacctgcgctccatttaattttattagggctaaaattttaattccggctattttaatttgtttcaaaatttggaggctgtaatatgagaacatgaacttcgcttggatcatcttacatttatttcagctaatgtattttactttagaaccttttattacatttttattttttattttggattattttacattgctgccatacccaaatcttcaaataggccgaaaacatcatgggtgcattagggtgtcttaacttggcttgttatctcgacaaagcttaactagcccatttaaaccaagctcatgataaggccatgcggttggttcggtcgatcaagaattaacagttacatctatcatgtagcaaatgaaaaagaagcaaatcttgcctttagagcatactactatgtccaaaaaaagactaatcctaacaacgaatctagacacatatgtgttttggctctcccttatcaacacgtattttcttgtgtaggtggaaattagccgcacaagctaaagaagctatctaacacttcacattgtcaaactatgctaacttttgaggaagatccaaatgcgtctattgtccttgacgcggcaagaggattgtggatagggagaagatcgtgatgacacatcaagtctaagcttgaggaaaagtataaaggatagttcatcgtgaagaaaaagaaaaggcaatcctaacttttcttgtaaaaatatgagtctaaagagtaaatttagaaatttgataaaaatattaagttttttaaaatgaattactaccagatcttacctaatagttgtacattaattaattagaagaattaacatatacaaacaaaatagaactacatggtttataaccaatcaaaaataccaaaaagatctaaaacattcgaatttagagtctcattaatctcaagacagctagcatacatcaacgataagaaacacacatttcctatttttgtttttgtccgtgtgaactaaccttatagatcgacacatctcgtccacgcttagtcatcaatatagcaatataaaattaagagataccatataaaacatcccaaagaataaccatcccacataaaactcaaaatcacctactaatcgatttgaatttagaaaaaaaaagtcatagtattaatctccaagacaagcttaataaagccttaaacacccttaaacacaaccaaaaaagcatcccaaaacaccgaagttaccatttcccacccgttcgataccgtgtgcaagccacccccctcccccacaccccaatcctcctatataaacccccaccctgcctcctctcccccacccccgccccgttccccaattcgtttcgaaatcgaattccaaatcgaaatcgaaatcgaatcgattcgtccgtgcgtgcgtgcgtgcgcgactcgctctcacacacttcgcctccaccgacctctctctctctcactcgctagggtttcgaggcgacgacgatgtcgctgcggccgagcgagcgggcggaggtgcggcggagcaggtacaaggtggcggtggacgcggacgaggggcggaggcggagggaggacaacatggtggagatccgcaagagccggcgcgaggagagcctcctgaagaagcgccgcgacggcctccccgccgccgccgcggccgccgcggcggcgtccccgctgctcgcccactcctccgcgctccagcagaaggtttgtatatgtcccgatctggcccggttttttggtttggggggcgggctctcgatctggcggttccggatctggttttctgaccccctgtgtgggtgtgtgtgcagttggaggggttgccggcgatggtgcaggcggtgcagtccgacgacagcgccgtgcagctggaggccaccacgcagttccggaagctgctctccatcggtgaggtttcgatctcctctctcgggaccgcgagatttggatggatgtttgttgtatcactcgttgacgttctattatacgggattaatattattgaggactaggccagctctagattcgtttgtggatgaccacgacatgcttgtatgataatttactttgcagattgggagagaatgagagatacaaatccatcgcggtgtttcgagattgggaactttgttagcactgtctagtacacttttgattgaacaatcatggttccaatgggatacttgtttcggtagttataaagatggtgtttgcttgttagtttacacatgatctcttcttttacttttaatcgaactgctttatttcgttttaaggtagctttttgggtaaagtccagtgaaatataactgattgcatgattctactcctataaacagactgttaaaaggtgccactttgtaatgatttgtttaaatgtttgtagagcggagtcctccaattgaggaggtgatcaacacaggggtggtgcctcgctttattgccttcctccaacgtgaggattatccccaactccaggtgtgtcaacagtcacagtgatttaatttactaatagtgttaactaggaaccatttgctaaagctaaccatcccccatgggttttcttgcgcagtttgaggctgcatgggcactcactaacattgcatcaggcacatcagataacaccaaagtggtagttgagtctggtgctgtgcccatctttgtcaaactgcttagctcccccagtgaggatgtccgtgagcaggtatgtcaacagttaacagaagaattataatttccctgagggacctgtactgcatgatgtttagattgttacatttctctctctttttttttaaatcttcgcaggctgtatgggctctgggaaatgtggctggtgactcaccaaaatgccgtgacctggtgcttgcaagtggtgggttatacccattgttgcaacagcttaatgagcacgccaagctctcaatgctcaggaatgccacatggacactgtcaaacttctgccgtgggaagcctcagcctaattttgagcaggtttaattctgggctaccttctactttgatgcactgacctaagtttttatcattaggatggttttgttgattttttgtgttcgagcaggtcaaaccagcgctttctgcactgcagcgcctcatccattctcaggacgaggaggtcctgactgatgcctgctgggctctttcttatttgtctgatggaactaatgataagatccaagctgtgatagaatcaggagtgttcccaaggcttgtggaacttctcatgtaagtgcctccttttctcttcatgtaacccttgcgctatgctgaagtctgaatttcataacaaattgttgaagtctgaactgctgttgcttaattcaggcatccttcggcttcagtgctcattccagctttgcgcacggtgggtaacatcgtcactggggatgacatgcagactcaggtaaacatattaattcatttggttcatttctatttatacattattcttttgtgaacaaacatgaaagctgtaattcctagttgctgcagcgattaaagagcaatgtctccagaaattgattttgccatctgtttgcttcatgcgcgtgttctcctttattgggatgattaactctgtagctaatagctgcagtactcttctgtaatgtcaagttatggcaaagcttctctgatcctactagatccatgagcatgctgaatggtgaaggtgtttggattgtacggggagcatgccctatagatattcttctgttttctcccctaatatttttatggctaattgattatttagtgttgagaatatttacagctcatttattatattagcttgatcatttcctctttaattctttttatgcgaagtgtggcaaaattttcaactaggatgtatcctttttagctattcacatatacataattcggctagttagaatattatgtagcatgaaaaataaagcaagaccaccatgtatgtcaaattgtgcattctttgttatataccaaattctgaatgagttggaacacagtatgtatgataatctaagttgggaggatgaaatagttctgttcacctgataactggtactgtgtcgtactgtgcaatgttattgttgaagcaggacatcattttagaaacattttaagattatctccatcgattagtgattcaaaatgaacaatacctatggtttagtgcctccatggatgctcatatttccctctttttgatatgcatatattgtaaggatggtttgttagtgcattgttgtactggcagttgctacatttctgtacattttgcatgagattgatcatggggagtatttgctaggccaacgatatcgtgttgacattattgactccattctcaagagagaactggcatttcatatttcacttgacctgatttttatgtgctatcaatgtttattgttcatctctctcaattgctgcttgactacgttctcaagaaagaattgacataagatttttatatgttatctgggttcattgttcatctctcaattgctgctgcagtgtgtcatcgatcatcaagctcttccatgtctcttgaacctcttgaccaacaatcataagaaaagcatcaagaaagaagcatgctggactatctcaaacatcactgctggcaatagggaacagattcaggttggtgtgatttgaagctagaattatcatattgatattgcttacaacattgctaaaatactattgtccgtctacaggctgtgatcaatgcaaacataattgctcctctagtacatctgctgcaaactgctgaatttgacatcaagaaagaggctgcgtgggcaatctcaaatgccacttctggtggaacacatgatcagattaagtatgccttttttttttctttgcattacttgtgtataatatttatagaatttttcattgtcattatggtttgctcacaacatatgaaatgtcgaccaggtaccttgttgcccagggttgcatcaagccactctgtgatctgcttgtttgcccagatcccaggatcgtgacagtttgcttggaaggtcttgagaacatcttgaaggttggagaggcagaaaagaaccttggggcaggggatgtcaattcctatgctcagatgattgatgatgctgagggactggagaagattgagaaccttcagagccatgacaacactgaaatatatgagaaggcagttaaaatgctcgagtcctactggttggaggaggaagatgatgccatgccctcaggtgacaacgctcaaaacggcttcaactttggaaaccagcagcccaatgttccatcgggtggattcaactttggctgaaggtatgctatctttagcagttaaactaagtaggattgtggttgatcatggggatggtgttttctgatcgatataaatattgtttatgcagatacctatctggaatgatgtaccactgttccttagctacttgcttggggctagtcagagttgggggagtcttgtcgttggagtcttggttgggtcctggcggtctggtctcaggcagtcgtaatgtcagtcccagtccttgggcttgcatcatcgccagtggtgcagcttggtcagtggtcagtcttgaaggtcatccagttggatttacttgggctctgtctcacctgtggtgggagcatgggggagagggcgtccagagccgcaggtgttgtcgggagagagttaccagttggcttttgcctcctatatagcatgaatgaattatattatcatctgttttgaggtaaaaagaaccttgaaagatagggtttattcatggttgtgtcagtttttgtcaagtctctatgtgctgtattaacatgtcagaagagtattggcacaacttataaacatcaaatagcaactgggtttttggtggagtcccatgctggtctgtctattcattggtttgttgttgtaatgtttttaatgtcatggttttgtcgcgtcaaagtttgtcggtggttgtttgcgtacttgctgttgttgttgtcgttgtcgttttgagattcatgttgttatgtctgtcttctgtctagaaaactgaaaactcaggagaaccgcctagggaaaaagaccgcctattttggcgatgagttttggttgagttcttggtgtcatgtgtggagtgtaaaagggaagatgatggttcctagttttaccccctggaacccggtttatgattgtatgattattacgttatgaaccatatgcacatgataaaaggaagagaagggagctgtcccacttcatatttccctatggagatgatttgcactggtactgtgagacttgttcttttgtttagtcatgcgattttgatcttactagatgtgcctgtgctgcttactacatgtctcgtgggttggccgccgatgattgcagctcaatcccaatgcaatcatgaaagcagaaagcaggagcagcaaggcagccactatgtcctaataattggaaaccatgtgggcaggcggctgacggtttgggcgccgtggagtagtttggaagcggtttctgctgatcttgtgctgggcgttccatgatgattgattgatgactagctgtggcttttctagtcttttttcttttattatcgtgtactgggttgcattgcagattagcgcggctgggaaggagatttggtgtgttgggttagtcatccccaggtccctggctcctggaatcttgttcctcttggatgtgatctttcaagtgttgctcttcccttatgcttcctgcacaactttcatgttcactccaaatttaactttgacctgaaaaattaagttgtatgcgtacaaaatacaatgtgttaacactagcacgacacatcgaatgtgattaccgattaacctcagtgcaatcattcctatgcagattgggtacaagagttgatgctctatgtacgagtaagtgtttaattaatagtagacacgtcatctctaatagtctacttgtacacatatacgttaatacctcacagcgtaatatttttcttcactctactcttctctacctatgttatctacagccttatcttttcagttatactcatacttatcaatttttagtcttaaatttagagttgattttggtttttttattgaactttatttttcagtgtttgtttttaatcactaataacacgtataaaaaagttttattcacaaattattttttgtttgtaaatatactatttggggccgctaatgtgttaatttttgaagcctgcttatgtcatttattgtattcgcactaaatggctgtgcttcatatcacgcaggttagtagtactttcttatttaatactccctccatttatttttgatagtcatatttcatattggcacacagatcaatgataaataattctacttatcattcatttaaacatgctactagttatttctcgtaaacaagcgattcattaatatttacatttctcgatgcccatgtagccaatcatgtgtggaagaatgaagagtcacgcattaaatcggagaaaatcattaagatgataggttgttagattgaaatatgcctatcaaaaatagatttctcagatttgaaaatatgactatcaaaagtagatagagggagtagtatttattatacttcacatgaagtgtcaagaaaacggtggtgtgaatcgcttcatcccagaggagaaaagcggacggcgcaatgcagcaaaacactccatagtggagagggagaggagatgaagggcagggagggacaaaccctagtgctctcctttccacagcatcaatgacacgagttgatgaagttgactaaagctgtgattaagccacacagatcaggagagctcatcagggaatctcatgctgggacaatgatagggagagaggccctgcctttgcattgcatttctgtgttctctgcttttgtccccatcttttcatgactgttccctctgttctgttgcaacagtgctaatgctttgcttcttttctttcttttcttttctttttttccttttcaatgttggtatttttttcatcttaactacaaaactgaaattgtattataggccttacaattgatgggggttgatgatgcatatgcctagctgttccatggagtgtacaattaaatagggatatacaaaaggattagatggctagaactttccattgtttctagttggatgtcctttcttagttttttcattgttctcttgctagtacagtaccttcttatggttgtactttgctagtaatttaaagtcagtaaaaatgattgtggactagggcaagaggttaggtgctagtatttttcttctttagggcttgtttaattatagacaatactaagccacatagttggacttttcaacaatcagtatcacctttctctaattttttttgtacagcatttctatgtatttattctctaaagcttgttagtacttgaatcattaaatttcaaataaaaatttggaaatcgtactggctttgcggttgacatgatttttgaacaagctcactttctcctcctttcctgactgtaaagaagcaacccgtttattcagctgttccttgtctccagactccaaagcgactcatctatatttggctggaccttttctttctttcatttcatttcattttcctttttctttttggtcttcctgtcctaattctctccctctcttcggctccttgtttgacacattttcctcgtttatttcaatcatctttagttcatgttgagttaggtcttctcttactactcaactatgtgttgtggatacaggtaggtgtaggttggatatgtatccatttaccatgtgcatatgtaatgtatactgttcgttttcttttttccatgataaataatgtgtttctactaaatatctagatggagcatataaatgcactatggcgaaaacttgcagagtatttgattaatagattccaaaaaaacaaattgcaataataaaattggtggtagaattaatcaggtagaatttcccacattccccactaggtctcagtgcaaaatatctcgtacattagtatcatcactttcttttctttccctttccaagtgtttcgccttaaactcttttatctgcatgattggaactagaataaaaacggtcagaaacgatgaaatctctctgaaaacaatatgctccgttggtcaagaatttatcccacaagagatttggtgattacatgactgcagctcaaatggtcacaatatatctataatcatcgtatctaaattcaagtgctaagatttactaccccaattactccatactcatataaatgttaatgaatctaaacatatatatatatatatctagattcattaacatatatattaatacggacaatgatagaaagtcttgcagtatgaaacgaatggagtattatattaggataatggataatgggatgacatataatggttaacttacacactctgcatcagtgatcctggtcccacaaggaagacactgatgcccggttttcagcagataaggcagagggcaccactactagagatagatagggctacctgcccccatcagggcccacacgtcagcctcacacccccatatccccatctctccctctcttttatacaccacgtttgctggcttggcttccttccacactcctactgctgctggatagtatagatcgtctctttttctttctttctttccttcctccacaactactccctcctcttctctcctcttctcctccctttcgctccaagaaacgcagccaagctccgcttcgcttgcctccacgccaccatctgcgcgcgccactccgatcgatcgatcgatcgatcgatgggttcttccgatcagaaggtgggtgatcggcgcagtgatcgtctctgttctctgatcagaagaagaacaagaagaagggaaggtttgatgttttcgttgctgttcttgcaggtgatcgggatcgccgcggcggcagcggcggcggcggaggaggctgggaggcggtgctgcgtcgaatgcggcgccaccaccacgcccatgtggcgcggcggcccgaccggccccagggtgcgttcttgttcttcttcttcatcatcgatgcctttctgaatttttatcagtgctgttgttgatcgtgatcatgatcatgatcatcagtgaccttctagatttgataaccttcggttcaattcttggacttaatggagtgatcttgtaaaacagtaaaaagaagagagtttgttggtggtatttagtgaccttctagatgagttttactacatgaaaattgcggttatttagtgttttttagatttgaaattctaagttttttgacttattctaagtatgagtttacttggtttagtggcacaagatgattaagttgatgatttatttggattaagctgtgagggagaaagatatggtgatgattgtcgtaatcatatattgagtagctgccctgtggaacatttcaggatctttaattcagtttgattccattttggtggttaggtgagctgttccttgcaacagtactaacctccaatccaaattccaaagtgtgaactgcttaaaaaaagggcagctttctttggttccatccaagctcctaatcccatttttaattgctcgggtcaattctctaatggcatccttatcaccatacctgtttctctgtcctggtaatagcatcaagccataatatagttcagagaactgaataaaatagattgccccaaaaaattgatatgatattgcttgtgcttattagcaccatagtttgacttgggctattattgagtggaggattgttgctgcggattatctaccattaaatatttcgacaaataaatctaataaatagcttaaaacaagtagtctaagcaatgcagtagaaaaaagctttttgagaaaaaaaaagtatagagtaaataatccatttcaataattcggtgaaaaatctgaaaagaactaagcctctggatgagcactgaactattctttttttggtttgattgcagtcgctttgcaatgcgtgcgggatccggtacaggaagaagaggaggcaagagctaggcctagacaagaagcagcaacaagaacatcatcctcatcatcatcaacaacagcagcagcagtatcagcggcagcaacagcaacagcaacaagaagatcacagtgatgcagcaagttcagtaaaagacagtagcagcagcagtagcaacaaaagcagcagcctccaagtggtgaagaaaaggagggtcctgatgggagtggaggaggctgcaatcttgctcatggccttgtcctcatcttcacccacactactacatggctagctaagaacctcacaccattgatgcacaattgtacatacagtgatacaacacaaacacacaaaacacagaccacccaatggttccaagccaatcagatgactgtcttagattatcatcaggatgagatgagataggagggggaagaggccattttcagggtgatgttgatgtcaaggggggactggatttggttcttggatccatcctgccttttgtgcaaccttagatctctgaaatcgtcatatcgcgatccaaatccgattgcgaaggcgcgatggagggaaattgtgtgcccttgaagagggtaagaagctggtccctgtccagttgtcctgtctattgttgatcatggaaggctccttgtaattagttagaggtcattttacacctctcatatcccctttttctgttcatgtcttttgtttttatgtgttttgaatgatgatgttcttttcaacttgagaaggatggtgaccaaaagaagacaccagccttcttgacttcatgtgtgcaataaggatgaagtgaataaaaatgatttgtttgtttttatttcagttagtgcaacaagtagattttctactatcatctactgggattacagaaagctgccaatgtgttgctgtttcttgtgccaatcagatgggattacagaaagctgccaatgtgttgctgtttcttgtgccaatcagagttctgacaatggaaaacaacagctgtgacattttgcatatcatcagaataataggcagaggctgtggcattgagtccaagaccagaataatagacagataaaaagactatcaaattccaactttattagcatatcactcttgcaggtgcagatgcaaagaaagcatcatatacgattatatgaagtaggaagatataagcaaaccaccaccatgaattacactcattatgctgtagtaatcactgatcagctctgcttagataagaaaggctcggcatatacaaggattagataaaagcagtgatcaactcactgtatcactttatttaagccctattgcaactgatatttgtgtaggctagttaacgctgcctctacaatctatgaaagtatgcttcttcgctgttgcatacatcaggttcaaaattacagctctctattcgtggtgaaaactttgaactagtcctgatctcaaaacaaagaaagtgactatggtttttgaaggattgattttcacaaacaacgatgcaaagtttccctcgacatgtgaagatgttgagatttggccgtaaagaaaagtcattccaactggccagtcagttcagcttcctcgtcaccatcaagttcttgctctactcctttcacctgccaaagaagtgtgaaatatcaaatttcgctagatcaaaggataaattactgctttaagcagtctgaacaaactaataggaattgcaacttctttcaacattttacttatcagataaaacaccttatataatgagccaaaaggagtggaggttttgaggaaacagaaataaagcacagaagagatacctcagggacataatgcatgagcatgttttctatcccagacttcaatgtgactgacgaacttggacatccactgcaggcaccttgcatttttagcttaactatccctgtttctctgaaaagatatcatcatagtgagaccatgcaattaaaattcttaaaatcagcactgcacatgaacatgagagagatagactaacggatcaaatcctcgatattcaatgtcaccaccatcatcttgaacagctggtcgaatgcgagtctccagcaactcttttatcattgcaactatttctgaatcatcctatggcatagaggaaaaatatgtgaaaatacttagggtgtgtttgaggaggaggggattgaggagattaggaagatacgcaaaacgaggtgagccattagctcgtgattaattgattattaactattttaaatttcaaaaatggattaatgtgattttttaaaagaactttcctatagaaaatttttgtaaaaaacgcaccatttagtagtttgggaagcgtgcacgcggaaaacgatgtgctttcttcctcaaacttactggaacgaacgctgccttaacatctcaagcagacactcttaccaacatgacaacagttttttaattgataacaatatgtgatgttacttctaccttgcataacttcttggttcaagaggaatttacagcattaacatttcaataattggtagaagtacatattcatcaacttagcagcattattcaggagcactttagaagatatcttagcgaatatctatattgtatcatcacaacaccaccacatgtaagcagtaactactagttacacgtgcaatgaacacattcaaatttaaacagataagcaattttccctagaaccaaatcaaatggtaatcagggctccatttgaatcctttttaggctacttttcgtttactgctgaatataacttatccatagagacacagattcgcaaataataaaagatagatctgcctgtcataattttggtactaatcactgacaattagaacttacctaataccagtatcctaaatacaatgcatatgctgcaatgggtctgacagatggccactttgcgcagtatcactaggaacagctaaaagttatactaatggaatgtaagatctacactaaagttgtctgggatacctcatgaattgcggtgtccatagaagctgcagtacttgagtccagaaagagtgattgcccagatgagtaaaagtccattatcacagcaaaaacctcaggcttaagatagtcccaagaagtttcctctgattttgtaacagttacaaaatcggatccaaagaatactctggtaactcctgcatgtagtcaccagtcaacataatgtcaaagtaaataaaacaaatgaacactcatgacaaatttgaagaagttgttctagaaatatttactgctacgagaatatcttctgactcttagcatgattttgctgttatggcttcaaaaaggtactttatatagttaatggaaaacatggcaggataaaattatgtgttacaggccatcatgataccactaagccttaaacacttgtggtggtgtgttattttggatgattaaacaacgaaatgttgcacgttcatagcaaatgtgaaacattatgggaattaacaaccagcagcttcagatatatcatttcatccagaattaaagatattaagattattgcttttggtttgagtttcttttgccttcagacaattccaccaatgtcatcttctcacagtatggtttgccacatctttatcatttacacagctcaatgctagcattaaacgaccaagtttgcttggctctgggctctaagcaactacatttttaaggagtctctaagcaactacgttggttacttaagcaagcattttggtaacccatgtcagtgcacattgctttgtaaggcacatttcagttgcatctcacaaaagttatctacaacagctaactttgttttaataacaaaatatcaacaagaactgaaaaaggcaaatagaacacaagttaaacagaaggaatacaatatagttaaataccaactcacagaataaagttacttatagtttgtaccaaaaatggaagatgatatagcttatttgtataaagagtgtcctaggaagactcgatacattgaaagagttggccagtaagagtggtaactaatcatatatattaagaggacaaccagaggattttacaaggaaacatataaccgagatattcaaggaagctgagatggtgaattgattaacaccaacaggtaactagcggaacaggaaagaaataccgtcgattgcaaacagcgccttggccaaaggagatgtcatcgcggtccgagcattcgggaaatcagagctcccaacctccataaccggctttccaggatagaacatgagcgactgcgggttcggggtcgactgcgtctggatgaacatgcccctcttctgccctgcccatcacatcaattccaaacaaaaccacatgagttaagcaagcattagacagagaattcaaaataaaatcccatttcagccaccaaaaccatcacatcatttcctgtcatctaaaagaagtactaaaatcctgcaggacagtaactaggctagataacctcaggtcctaaaaacatcaatcctaatccaccgcaaatatgatcaagcaagctacgcaaacaaatcgttacttcgatcaagaacacaaatcttgcgctaaactagttgggtaaaaaagatccgcatctttaatcatcccacatccctaacgaagaattccacgatagaaaaaaaaataaagaaggaagaggtagaccctgacctccgaagcggctccatggggaaagagcagggctcccgtgccgcgccgccgtgcgcgcgaagggcggcgacctgaggcggtcgagggggccagaagccgccgccgccgcggatgagaggaaccgcggcgggggtctccgcatgagcagctgcctccgcaggagctgggacgcgagcgccgcgaccctccgcctcgccatggccacctcctcctctcctcgtcgtcggcgtcggcggcggcgagaggaaggctgggtctccaatggcgagagcgaggggccgaggaggaggttgtaacttgcaaggccgtggtcggcccatggatgccagtagtaggttaattgggctaaaaagcccactatgacagattctgtattttctctctttctttttctttagagggtacaactattttctctcttctaacaagacatccactatgattgtgattaattaattattaatatttttttaaaaaaataaattaatataatttctaaaataacttccttatatatttttttatataaaaggcattgttgagtactcgaagaaaacgagagagcagtggatgggaggagtgagaaacaaatacagcttaaggatgaaaacggttagaaaagatgtatttttttattagttttatgagaatggtattgagatgttttgattttttttatttatgaaaagttttgtttagtagcaatattatgcagatagaaattagaaaaaataaatcttatggtcagaaacaattgaaaactatatcttttttttacagaagctgtatcggtactatcggaaaatatccgtaccgtttttatccctagctgtattttggattataatccgctgcagattttaattttaaaattggtctactagttttctggaaaccctattgaaaagaccctgcttagctttatatcagattataattccgcagaagattttaattttactagaatttgatttactagttttctcaaaatacctttagaaaaccactttgattatacaggttctgtatttttctagaaaaagttttctttgctactgggattgcttagctgtacatcggattataatccgcagcggatttagtttcttctttttctttttccgtctcgctctctcttttcacgattgctaactggacatataaagtggtaacataaaatattcttaaagaaatcaaacttagaacttcaatatcatcgttggattatcatccagcgtcatgccgagtatatattaacaactgaattatatcacttatttacatatggattttaaaccctacaaaacggcacggaaacaaaatgataatgggatagcgatgaaaacaaaatataataaacgagtttatttaagattttttataaacactatacgaacacaggtacatctgagattgatgaaatcatcatgtgcgcaaagctatcgaaagaataattagctctaaatactagcacccgtgtctagaactttaacccaggtgaattgattccaccaaaagaaacatataaatatatcacttcattgtttaagtattatttttgtgttatgttggtacttttgctggacgttgtagatgttgaacctctagatccacactaaaaacgttagtggttggctcaccgaggcaaataccatgtttttcacgctgtagtgtgtacacagaactgcaaacgctcatagtttgctagacggtgcctagcagcgatcatttttaatgcccttaacaatatttaatcacactttgaaaacacatacactcgccgttttagaaaagcgtcctaattttatttatttacttatacagaggaagtacttctatatgttcatgtgaagatattaaagcggtataggtctaagtgtactcttcggaaaattattagctcctcccacaaattactacaataccctaatttcttttaggtgtgattaacaagctctctagttaataatacttatcgaataaagctgaggttaaaattttaaaatatttgactatgaataatttctaaaatatttatcttaaaaggtatataggttagtcttaaaaatatacttaaaaataatattttattgatatttttatttatattataataaaaaataaatgttaaattgttttttaagaccgcgtccttgtcaagaatgataaatgttgttagcccggagagagcacggacaattttgccttctagaactgattgagtttcttcatcatttcatcactcggtttggtttacatcgctgaaaacaaatgcttaatgtcttatctaaatatcttttcccttttttcatgtatcctggcttaaaagttaccaaaaaaatgcctagccttgttcgatttgaaagattcgtataggaaatctcaatttatcttgaatacacactattcatgtatttggttcataggattcaaatgaaaattttctattaaaatcatataccaatcctccaagacctttctaaaacgtaccgattccatagaagtgaaaacatccattctcttttttttagctcatggaatgaaaaaaattcatgtccatcttttatttttgcacgtgtatttatatgttattttttgtgtttttcccatcatgtgatttggaatccggaaccgaagaggctcaaaatgagtatcattttcctgggttccatacatgttttgaatctttttaatccaaaatctttcctgtaaaataatgttggcatctcagattcaccactttctgtgccatgtgccctaaacagctaaacctaaagtttagtacttctaagtaaaattagtaagaaaaggagctggtttttaataaattcaaaaattgtaatttttttcacacaatcagagaggttctgggagacacgtggaaatcacaggcaagcaattgatgtgagaatgggtcaaaaaagcaacgacctttctctctctgtttagcctttaggtcgagtaaactccaaacgtctctctcacatgtccatgcattaagcaggtgcaatgcatccagtccccactgtcaccttcatccgagatagcctaatcctccactaaaaaaatgattctctgtcgcaccaattaacaaatctaatgataaccatccatgcattggttatagtctaatactctctccgtctatggattttgagtatttgtttattctgtttgattactcgtcttatttaaaaaatttgtgcaaatataaaaaaataaaaagttgcgcttaaagtactttggataataaagtaagtcacaaaaaagtaaataataatttcaaatttttttgaataagacgagtggtcaaacggtgcaagcaaaaacttaaaattccttatattatgagacggagggagtacagtaactatactagtgaggatgatatgatagcaagaaaaaaaaagaaaaaaattgtcatatctgaattttatgtcatcagtaattcagagccaaattgcataattttatgccatgttcttttctaattcttactagttatgattttttttcctttccaagcttagacttctaaacgattatttcgtgcagaaacttcttatatgaagttttcccaaaatatttttctaaaatatttttctttactttatataagttaatttattcatttatactcttactttatctatcacaaaatcagattatctaatcaatttcgactattttagacaggaccatatacgtagtatattctaactaacaaagtagtagtgcgcccatacgcacatgcctattcccatatgcaacttgaaacaaatcgaatttcgggccctttgaatcgtaggaataaaaaaacgtaggattttgataggaatacagatgtaaaacagataggaatacagatgtaaaacagagtaatatacatgaaaaatacagaaatgaccgtttaattagaccacatgaaaaacgtaggaatcagatgagagagataaactatgattttttacaagtggttggacctcttgctaactttcctccaaaatctctataggattagccattccataggaattttaaaggatagtatatgattcaatcctttattttaaaggttttcataggaattttttctataggattgaaattctttaaatttcttacacttttcctacgaatgaaagtggcccttctttcttgaaaaatcttacaagtgctgactcgtttgattctttttctaagctgagagagagaaaggcattagtttttctgttcctgattagcggcggagtgtgccgtcctcgctttcacatccaatcaataccaagaaaaaataagagctttttttttaacgctaataatccgaagcactccctgaatccaacccatccgcggctgctgctgctgcagcagagatgacaaatcagatcgagccgggagctctggttgttcgtctctcggttcaggtcaacacctcgggagttcttgcttcggtttgaagcgaggagctctgttcttttccccgtttcttggtactggtgattcttggcttcgccgtgctggaatcggtgcagctttagggggggatttgggggaggttttgatgcgattcagagagtaaagctacatcatttcttgcatttcgcgtggttcttgggggtggattctttgcgtggttctgtcgaggtcgagctatttcgacgcgtactccagtctgaaccttctcagagatccaggttagtgtttcttggta

SEQ ID NO: 6499 - DNA, 9643 bp, Oryza sativa
ttgtcgacggcggtccattcctgccaaagccagcggagtcttaaagagcgcccaaaaagttcgaggtttgttataccaaggcctcccatgtttttttggtctacagaccctcttccagttaactaggcagtgtcccccctgtgcctgttctgaccctgtccagaggaagcccctacgaattttgtcgatctttttttcagcccattttttaagggggaaaacagtgaggtgataggtcgggagggcggagagggtagactttatcagaaccgtccgaccagtcttgtttagtaactttcctttccatgttgggagcctagctgagaacctatcgatgagaggttgaacatctgattttctgagtttcctgatgtggagtggaaatcctagataggtacaagggaagtgtttcatctgtgccgggaagggggagagaatatcctataagtcgagggtgtcacatctaatggcatagacttcgcttttggataaattggtcaccatgcctgtcgcgaggccaaaattttgaagaatcatttggaccgtatggagttcctgtttatctggtctaaggaacactacagcgtcatctgcatataaggccatattgaaacgagcagtccgcctgtggagcggttggaggagacctgcttcctgtgctgcggcaaggagcttttgcaggggatcaatcgcaagaatgaagagcatgggtgatagagggtctccctgacgtaatcctcgtccatgcaagaagctgtttcctgccttcccatttaggaggatctttgatgaggacgttgctagaatggaaataatccatccaatccatctgtctccgaattccaaatatctgagtttgtctagaagataaggccagctgatcgagtcgaaagcttttgcaatgtcgagttttagcagaatcgtgggggttttggacgattggaactcacgcaccatgttgtttacaaataggaagttgtcttggatgtttctgccttttatgaaggcactttgatttgttcaactatatttaggaattgcaagtctatgtatttatttgttttgcctcctttcttgcataatggaacaacctttatataatcaaggaagtatactgtacttaccagttaccagagtatgtgccagattaagccatccattaattagatgttgaagtaaactagatgactatattgcgatgtattctaagtccactacttataaaactgtagggtataggatttgcttatttctagtaagataagctaaacgaggatcctttaggtgatatggccaaactaagacacatatacataacgtattatcatgcatctgataggaatgcaaaacaatgctgtcctatttactttaactgcaggtatttaggctcgtcttttatttttctcaagaggcacttaacataatatacaaaatttgaagaattgcattttattttaaacttctatgagttctgccttttcttttatgattgttatccatggtgtgcctaaataattgttcgatctagaggtgatccaaagattcgtatatattagacgtaaaaataatgcagtgttttttttattttttagtctacaaatgtttgacaagaaaaggatgaaagagtgacataggcgagctctgtagcatactagcacccttccctccatgtccccgttatggcggctcgcgacttcgtcgcccctccctgcccactgacggtctccctctttgatccactccctagcacagattgcttgcctccctcttgagattaagttgactcgctcatgccactgctcttaaggtaagagaagctgagaagaggagtgtgtgggttctctttcccctgcttgattcggaagaggggtagaagatgggggggcggggagagcgcgattggagaccgtcgttggcgaggagaagcgaggaaggagggaagacgatgtggcgccgtcatgcaaggggaaggaggagagaatagggtggggaacagtggcggctagggttcggcgaaccgaggggatagggatgttatctttttcaaaaaaaaaaccctttcttttcattttctgagagtgcggtcctatattaggaatttcgtctccttcacgtaggatatactaggacacagatggccgttacgtaagaatacataagacagtaaacttacattgagggacttaagaaagattgtcaagttaagcgaggacgtttttgcaaaatttccaggaccagcgccggatgatgtggacatcagcggaattgagcacgtcgccccgaaaacgcccggagcactgtggtgcgagcacttcgcccacatctttaatacctccgtgttaacgaccaaatttggtaagatatgaaccaggttcgacattggaatcgaagcggattcggcgaagaaatagactcgaagaacagagtatgcatcggttgcgaaggcatttgttggcgtttgcatcggcagagatggatcggacagaggataactgataaagccgatggggtcggtacagccgattctgataaagatggcttcggggctgtttctagaatcgatcaatgtgcttcatgaggattgccacgatagagatagagctctgaacaaggcaattgtatctattaattaggatatttcgtgtaattttcttagagatatgtttgggcaaaagtctgccgcaaagacttatgatatcttagagtttgttagagataagagtcgtgtccggcaaggacatattttgtatcttgggtataaatatgacccgaactcaatgtaatcaacaacaacagttcagtaacactttcagtgcatcaccaccctttttactttcgttctatttcgacgagttcttactttcgggttgagctgcatcgattacgatcttcaactagaggtaaacttgtcatggcgccttgcgttctcgggattagtgcttccatctttatgacactctaatcttgtttatgtgattcgtcaagttatcatatacacgttgtaatctccgctagttgcgatctataacttgtcatcggttagaaagtaaccgatagagttatgttttgttattaatttagattatatcgtgtatctaccatctcttataggttttcatcatcttgcctagatcctatatttatatttacgcttaatgctgcatcggttgagttcgatctattaagtaatatctataactataatatctggcttgttttatgatcatcgagagatatagtatcggggtttcagccgatcttacctgatctagcttctttatatctcacatgcttgattgatatactagatctgccttttagattaagatcttattgcattcaagtatattaggctccttgtttgatatattctgcctgttctaatatcctagtttaaagtggtatcagagtattagccgatacatactggatctatttaatcggctatgctataaacgtctatataatcattgctttaatatatatttcgacttaagtgatttatactgtctcggcatagcgaccgatctatcccaatcacttagtttaaatatatatcgaaggaaggattatatgtcattaatatctacagccgattgagtagatttagttttattttatttattcatgactaccgatcgattccaatatgacatcggctcaaagataaatgatatgtcatcggcaactagccgatcagctatcatttatgaatttaaccacggtttttcttgtttttctttcttgttgattgtaggatcaaatcaactggcacgctcacgaacctaaaagcaagattttggacctgcacagaagttaagcagatcttccaggccagtgtgcgtttttcgcatcaacacgcttttggcacgtccggtgggactcaagttgcgacaacgtttcctcatggcagagaatccaccacagtcaccagcaacgggaggcaaaactaaacctccgttcactaagccaccgcccgagcaaccgtctgaggttaatgaagggaacatcgtcccggtcactatagacaaattatcactagaacaaaggaaggagtttgaacaaatgatgaagagtgcttaggagcaattcatgaattcattcggggaaacccgccagggaaaagttattcaaaagtacaaggtgaaggtggttgctgccgatgaacctggaacaagctcatccaaaggtggtaaagctaaagggactaaaggtgctgcagatggctcaggtgaaaaggtgaggaacctcgagatggtgaggttgaggatgtggatgaagatggtgatgaggagcaagagcccttgaaattcaataatttccaagatcatgttgactatgctttcaacatgctttgatcaaccaatcaggggtccttgtcaatactttaacgaatatggttaagtctgtggttgatggcacgatagttgagcatcaaaacacggtaccagtctttctaccaaatggcgtatttccacagtataggagtttggtgactggtaaccagcaacccgtatccaatgcaccactggtctagccgatggcatcagtttcggctccagcacctggtgcttcatcatcggcacaaagacaggtggttaatcctcatgtcttgactagagagcagcctcagcatgctgggcagaatattaataggctgactcaagagcagattgcggcaatgtttgggccaactcagcagattgttgaaccaattcagcatacaccaatcaggcagcatgtggtccagccgattgggcagcaaatagttcagccgatactgactgggtagagaacaccagttaatcaacaacatcagccggttggagcccagttaggttggagcccagtttgttactgtacagcagatatataacatacaacatcctcctcagaactaccttggaggtaatctgaacttgcagcatccacctcgctcacctcagattcaatatcaagaaggaggatcaccttagccccagtttctgccccaattcaatcaatttgatctagtacaacagtagatgcaaggagtaccccagcagaagccatgggctgatatgattgcagatgtcatgagggagcagtttggacttaagccgaaggacactggaaacttatatcggcacccttaccttgagtggtttgaaagagttccattgcctaaccgatataaggtccctgatttctcaaaaattttagggcaagataatgtgtcaacttacgagcacgtcagccgattcttggctcagtgtggagagacatcggctgttgatgctttgagggttagattgtttcctttgtctttatctggatcaacattcacatggttctccgcattgccctataattctgttcaaggttgggccgatttagaaaaacagtttcataattacttctacagtggaacctatgagatgaagctttctgatttgacaacggttagacagaggcatgatgaaactgtacaggattatattcagagattcggagagatgaggaatagatgttacagtttggctttgaatgactctcagctagccgatctcacttttcagcgtttgatagctccaatcaaggaaaaattttcatctcagcagtttgaaagcttgtctcaccttgcacagaaggtaaccttgcataagcaaaggtttgcaaatgctaagaaaaacttcaagaagattaatcatgtgtatccttataggtatgattctgaagaggaggataactccgaggtagcagcagccgagtgggccaggagcaaaaagatcatagcatgctcatgggtgaagagttctaggaaagaagaaaggtttgattttgataccactaaggctgacaagattttcgatttgctacttcgggagaagcagattcagcttcctgctggtcatgtgattccatcggctgacgagttagggaaaaggaagtattgcaagtggcataattctaattctcatgctaccaacgattgcaaggttttcaggcagcatatccaattggctattgaaggtggaaaaatcaaattcgatgactcgaagaagccgatgaaggttgatggcaatcatttccctatcaatattgtgcacacatatgggagagcagccaatggaggaaagaatcggagttctcgattgaattcagccaagattattaataaatatcaaatgaagcatgacaagcagcaggaaaagtactatgcagaagatgatggtgggtttgatcctcattgggattgtgaattcttcaggttctgctggaatgaggggatgaggctaccattgattgaagattgccctggatgcagtggcagggcagggagttcaagccgatcttacagtagaggaagtcggctgagtcagaagagggtttctgttcatcagaggttgggcccggtgcaccaggatcattatcaggatgaagatgaaggcaggaaatcgcagtggtgtccttctggtattttcaccaaaaatcagaagagaagggttcaaagaatgaggaacagagaacatttttaggaggtacaacaagagatcaaccatcggctgaagaagacaaaacccagacaggagtggcgtgctaagagcacagttacagcagccgatgaagatgaagctgacaaggcaagaagattgatcaagggtaaggctactgcatccacatcggtaaacatgatttttatgttacctgcagaattcgaagcaagacaagccgatgttgatgatgtggaagaggcctctgctagattaattttgtcaccagagccagcaatctttaagaagccaaaggggacataaaatcggcaccttaagccattgtatgtcaatggatttgtcaacgggaagccgatgtccaggatgatggttgacgatggggcttctgtgaatttgatgtcgtatgctacattcaggaagctgggtagaaatgcagacgatctcatcaagacaaacatgattctcaaagattttggtggcaatccatcggagaccaaaggagttttgaatgtggaattgacaatcgcagcaaaactgttcctaccacgttttttgtcatcgatgggaaggggtcctatagcctgttgcttggaagggattggattcatgcaaattgttgtattccttcaaccatgcaccagtgcttgattcaatggcaaggtgacaagattgagatcgtgccagccaacaggtcagttaacgatgctagcgctgatttacctctttgggagatagatggtattgattgtttgtctagaaagatttgggatggagattttctaaaagtgtccgattgtgatatacagccaattgaaaacggagagcccaaattattactttgagggcgtcgtggagggttcaaatgtctacaccaaggacacggtagatgatctcgataacaagcaagggcagggtttcatgtcggccgatgatttggaagaaatcgacataggtccaggagataggccaaggctgacattcattagtaagaatttaacagcagaattcagaaccaagttaatagagcttttgaaggaatatagagattgctttgcttgggagtattatgagatgccaggactcagccgatcaattgttgaacatcggcttcctattaaaccaggagttaaaccatatcagcaaccgcatagaagatgtaaagccgatatgtatgatgctatcaaggctgaagttacacgtgaagttacacgtttatatgatgctggttttattcggccatgtcgatatgccgagtgggtttccaacatagtcccggtcatcaagaagaatagcaagcttagggtgtgcattgattttcgcgatttaaataaagctactccataggatgaatacccaatgccgattgccaatcaattgattgatgcagcttcaggacataagattataagttttatggatagcaatgctggttacaatcagatttttatggccgaagaggatatccataagaccgctttcaggtgccctggtgcaatcggtttgtttgagtggattgtgatgtgtaacatcctgaaaattttgaatctggaatacggaatttaaaaattaagaataatcaaaaatctttttaaaaccttttttgcatgttgggatttattatgcatttgtgtgtatttaggttgtgtgccaaagatctcgattaaatcttatctcctagagggacgccctcagtccaacgtcctttccttccattatcttcacggtctgatttattaagtgcttcggtactaaacaaatcacagacctgaatatataacccgaaaatcttttcttatgtcgcaatgcgacatatctttctcaattcttaccgtccggttatttcaaaccttttattattccgactcgataattccctcgaatacctataaacgatcgacgtatttatttatcgcacgttgattcgaatatcctcaaatccattcctaccgcgatgactggatttgtatgccacacgtcacccctagaatcctcccttcgctatcatcgttcgttcgtgcgagcactctcaaataatcctacgacgacctataaatttgtttgtcgggcgttaagcctaaactcctttttggcatcacggtgcatccatccaaacaaatcaagtctcgtattacaatccatttatcccgcccttgtgcattctcggaatatctataccgacccaaatccagttattgtccaagctacaatacaccatataatccaatccacatttacagtccaagtatatttctagtccaaacacagagccaaaatcaatatccatactctacagtccaaatgcacagcacattatacagtcccatttacaagttccaagtacagactaccaaagtacaaatcccaggaaaatactaagaactcctattacaattgggccattttcctctctctcccagcccaacgaacaacccagcataagtctattttaccttcccagagacgtagcagcccacccctgttatctttctcaagccaacccactgaaagtctactttgcctcccctgctcaaaacaacaggcatgcatgcacaagaattgctcgatgaaatgcctacaagcccaacagtagtttgcaaccacttttgccgggcacacaacaggaaattgcaccaaccatcaaatgtctgggacccccctcaccaacatgcaaaaccaacacacatacacccatacccccattccacataacactctccaaacacatgcaaacacagtgaggagggctcacaccgaaaaataacaccaagttcacagaggggaactcaccttgcctcccatgcagacaaccacaacaccaacaaaaattttcacaatttgaccctttgcaaaaactatttttacaaatgaaccgtcaccaaaacttatttcaaaaataacacttggcgttgaatttagacacctcagcgccaaatagcgtggcgctgaatatgtgttggcacgctctccaaacacatgcaaacacagtgaggagggctcacaccgaaaaataacaccaagttcacagaggggaactcaccttgcctcccatgcagacaaccacaacaccagcaaaaaatttcacaatttgaccctttgcaaaaactatttttacaaaagaaccgtcaccaaaacttatttcaaaaataacc

SEQ ID NO: 6500 - DNA, 20440 bp, Oryza sativa
acaatactgacgagggacctccttttcattggttttgtaagctgaggggtgcgttgtatctggttttgcggtgcagggatgaatttcgaacttggtgacaaactgagggacctaaagtgaacttattccactaataaatactcctacagtaacaggcaaaagaaaagaaaaggaatccgactcgagcggtatgaggatctaaagaaaaccctagcggcggcgattggtgtggcgggaaggcggccatgtcccccaaacggaggaaatcggtggcggcctcgagcggcggtcccaaatcgtcgccggcggcgaggtcgactcggtccaaatcgaagccggattccgatctcgccgagcacgacgacagtcccagatcgtcgtccgggaggctgactcgctccagagcgaaggtgttggaggagtcggcgggagtgtcttcgagcaagaagaagagaaggatcgaggaggagtcgccggcggcgacgacgacgacttcgacgacggcgacgacgggtgtgatgcacagggaggggcatggcaccttggcgtcccggccactcccgccgatccacccgccgacgacaccccgcgtcagaaaaagctcccgcatcgtccggctcgaaggtttttagctctcgatccgtcgtcatcgatcctctccccaccactgttaatttcttcttcttgttttaatttcttgtatacctattattaaccatgttaatttctccccatttctgcttcttcttcagttgatcgacttcagaagctaactctctggcgcgataagaaagatgatccctccaccgcggccgccttgcctaccccctccgacaagaacatggtgttgggcatgtctcgctcaattgtccgcgtttcatccccaccttctggtaatttactccatccgtcccaaaaatatggtaacctatggacaacatcttagtacaagtttggaggcatattcagattttactgcctgaatctactgtatttactgctaacttagctactaagtgagccatgtgctaggctgctagcatgtcacgtgtggttaattgcgttgttttacgcattccctatctagcattacatgagaaaatcatgctgcatctccacatgggaattaccgtggattttgtgctaaactagctgcagatgttaagggaaaagccggtgatataaaagaaagctaccgagatagacatgtgtagtccaacaacaaatggaaatatgtgttgtttagtgtatttagtagcccgatacaaaatatgtatttatcggctcctagctatgtagctacctgctaatcaactgaatgtttttcagagggaaaattgatctctccgcgcaccggattcgtcatcagttgggatggagccaccaagcgtgctatgatcgtcacgctcttcacttacttcaagaagaagccgcatgagccccaacccgaggtgcatgacttagctaatccccatgttaccatcatctgagttccattactgttcttgttaagtaggggctaacccaattgctaaaaatgacttttcatgcatgctaatttctttaatttcttggtgcaagtgtagaacaccgatttccattaggcaatccccatgtttctatcaatccgagttccattaccatttttgataagtatagtatggtcaagtgattgctagccgtagctgggctgccgtgcatttgctttgtgtgaattttactgtgccctctgatttcaattctcaaacattatcattgtcaaattgatggccttttcttgtatatccttagcatgagttccgtctcttgtgcttaagatgagtaaccattaacctttctttttcttgcattgccttctctctctatctttcagctgcaggttcatcttccagataagtctattgtgcagggacggttgatattcatgaatcgccactacaatctctccatcttggagatcacgtctgacctaccattgcaggtccctgcttttgggtccgccccaaagtatggccagaaaattcttgccttgtctcgggatgaaaatatgtccctggtggcgaggcgtggagcaatcacgtggtcggatggttctttcatgtggagaaaccattacatgtttgtggattgtgatgttcctgaggtactgatacatttaccttttcttcacacttgctatttgttttaccttctacttagtggtatttatttattttttaattaatgcagggtggtgtaggagggcctgtggttgacagctgtggtagttccattgctatggtatacagagccggccctggtgcagttatcatttcaatctcaattatttgcacttctttgagatgtggaagcaattcaggtatatactatttttccatcagtattaaaatatactacagattgaatcaaaatcgagcaatttctatgtggcacgtaaacccactaatcacgatatattcttattaattgaatgtttatggataaatcttttatatctatgttattagcgattttaaaagccaatgctgaaaaaactacgaaaaaacacctaaaatcaacttaaaattaagttttaaaattcaatttgctaaataataaacatggcctacaaagtggttggtgcgccaacatgcacgctcattttctcctaatagactaagtcaatcttatctgtagcgctcattttctactatagactaaatccatcatatctgtatgctcattgtctactaattgactgaatccatcttatctgtagctgtgttgcccgccctgtgtttgacgtggatttaagaagtgtggaactagctggtgtgtcactccgggaggagctctctgtgaaacataacatcaatggtggctttattgttaaacgcatagctgatgattctgctcttgagcatctcggtgttagacggggtgacgtgatcttttttgagaacgagtgcgggactagtttgcctgaggtgaaatgaattctggtctcaagtaatagtttaatataaatcaatatttgtcaagaataatacaaatgtgttgtgatttctatttttaaaattctggaacagatcgaaggttatctcctttctcttggttggagatacctgcaggggatgaaaaagtcgatggttctcaaggtatggtattacacaataacaaaaatgccacttttttttttgaaaaaaattggtaaaaaataatcagcagaactgtcttccttgtgtagttggaagtacatgacattgaaggtccatgtgaggagacaattaccttacccttaaagttttctgtcgattcaggaaaggtatacttctctaaaccactgtacaattgtcctactttgcttgttttaatctctagattttaccccttaagcatcgacaaatgtgttgaatttaaggttgtccgctggaggatggcttgaagatgtacagcaagactagttagagcaaggtcaatagtatagcccaccgctgacggtaccaaatgccacgtcattttacagttagtgtaaagctaactaatacaatagattggctattgtgctaactacatagaagctattaaacaattaattttggatacacagtacgatcaagaatgtactccatctttgtagccatttgtgctgtcatgagcgtgagtagtctaccgatgaagaaaaagaaagagtttggtttttgctttcctagctcatctcccgcacagctttagattgaaatcaacaccagaaacagcaactaaaagaaaatgactggtggtttatccttttatccatctccattcacacggaagcaaaaatgagagaaaagaaaaaaaaacaagagaatagcaaagaagaaagatgggttttgcagctaggcaatggctgattcataccagagcaaaccgagcggtgggttatgtcgagtcacagattaaggagctccatccatacatcgattcgcttcagttcggaagggagggcgtcgaccccagcagcaagaactcgattttgaggtttgagaagcttgattcgtgccgagagaagatcgacccagcggcaagggcgtcggttcgcgtgcatgaggtcgatcagcgcgagctcgaaatcagctggtggagctctcgaactctcctggggtgaatcattgccggtgtagtgacgtgacgctggccaacattccggcgaggaaccaagcacatcggcgcacgccggagcggagaaggaaaaggcgaaaagcagaacataggtgggaacacaagtatgagacatgagatccgatgagtatagatagccaaagggcctgcccggcacggcccggcccaggcacggctgggcacggcccagcagtcatcgggccggcacgggctgataggcacttcgtgccgggccgtgccggcccatgggctgcacctcctgcccaggcacggcccaccagctgtcgggccgtgccgtgccggcccgaaggcataggtggcccatcgggcctttttaaattaagtctatttttgttcctcctctttgggctatttcatatgtatagctaaaataagtctattttccgtccctcctctttgggctgacatatgtatagctaaaataagtctattgtctgtccctcctcttcggctgacatatgtatagataaaaaaaagtctattttagatccctattctttcgttcatggcatataatatgtctatttttactcccctattttttctgtgtatcgggcctagctgccggcccatcgtgccggcccatcgtgccgggccggcccggccgggccgtgccgagccaacgtgccggtggaggggcccaggcacggcccagtggtcggcccgggccggcacgggcccgacctccgtcgggccatgccgtgcttgggccgagccaaaatatcgtgccatgggccgggccgtcgggcctcgagccttttggccatctataccgatgagggtggttgcgggacccacaaaatgtattttttatcgtgcgacacgtgctatcgccgggcgcttaaatagtcgcccacttcaatctctctcttcagttattctccttccacctaagaatatgctgacatggaatattttggagcctgctgactagacttattgtacctgctcttacctggggaagataatttagtgaatgctagggcatctccaatgtgcatgtaaaggtgtgtttataagcaataaatattagtacaactttgtgtatagaaatgtgtgtttagaagagaatattgttatggctaaccttaagcttagagctagccagaaggtaaacagaagaacttaaaccattgtaacattgactataattaagcaaaagatatgtgggttttatcttatggttattgtgtggctcaatattaaggatgcccttatgtaacttgagaaactgaaaaatgacttgtagagccaaactctgagccctgctttgatgagcttggaatttgtagttaggatagaaaataggagtactgaatttataagaattgagtatttggtcactgcagaagaaacatgtgatctcaataagtgcttgctcgacttaattacctttgtcttttggatattttcttggggaatttttccctagtgtcacctcaattttgctggattttgctaatatatacaccaatggtatatcggtataatgtacttagtgttactctctccatttcatactccacacaaagacattttgggtttggtctaaattaaatttattgacgtgagactcgaattttgggtttgataaagaaataatctggttacgcgagaggggtctacagacacgggagagatttgcaaaagtgtagtcgcagcaacacgagagatgagaacaaagactattgcaaaggagagggagagagagtgagagagagtgtgtgtgtccagtcttgcagagagtgtgtcgtcttgtagggagcagcttttgcatctttgctgtctgcacaatgctgggccccggtgatatctttgcgggccaagggctaatgtttggatgctagaattccggagagcttcccgtccgggcacagacagcaagcaccttgctcaggccatggaaatatgtttcggttttttccaagccctccatttttcgctccgtttgagatagtacgacgattgatggccaaactattttttgtgattgctatttatggatataaacagtggcgaatccagaatatgaattgaggtggtaaaaatatcagatgactaaaacaactagcttttgtcaactcgatattgttcctaagagacctatacgcatgtaatgaaaaaaacatattacttgacatataacaaaatttgtgaaaaatcgaggtatatggtgtacttatttttcttatttgcaactctgggcactagcatgaagcagtgagacagctagcgctctgtatccttgccatacaactagcttttgctaatcatgtttagtcattggtagctaacaagaggcaggggattatggaggtggggctggcgccccaaccagcccaaagagagaatccaagggctgttcactttgttgaaaaaaaaaaaccttaccaaaattttggtaactatgctaaaattttggtgacttgtcaaaattttgacaggatttcttatataggtaccaaaatttggcagcaaactaaatatagccactttttgggcaactttaccaaaatttggtaaggttgaaaatggcactaaagtgaacaggccccaaatataaataaataaattaattgtagttgtttagaaaagtgttcctataaaaattttacagggatgcaacactaaaagtttgacatcttgtaaagagaaaaaaaaatccaaagtccagaatcggaaaagagcagggtcatcataatgacaccaaatattatattttactttcaaacctttcaatttgtaaacattattagtaaaaagaaaaagatggcatgtgctaaagtatactccctaccagtgtagtggaaaaaagccgtatatatatactgtaacgacagcaaatccattcggttaatgtgatacgatccacatttgttattcatgaacgtcaaaactctgttttaatttagtgattaatcgaccatattctccgtttaatcgtccgaataatcacccgtatgttgtacttgatgatgacctaaagtagtcttttaggactttgtttagcgttttatttttaacatactctttagttttacttattcaatatgaccaaacatgtcaatgtttggtgtataaatgcgacgttggaagctactccctccgtactcgtaaaggaagtcgttttgaacagtaacacggtcaccaaaacataactttgacttcttgtttctataaaaatatttattgaaaagtgatatatgtatacttttacgaaagtagttttcaagacaaatctattcatataatttttacattttctaactcaacaacttgagagttattcatgatttatatttccaaggtttgacttaaacattattctaaacgacttctaatacgagtatggagggagtatatattttaagttaatgttaagttattcctgttcaattaaaaaacaacgtgaatatattcaatttatatagttatacacatttacatattcaaataagtgcataatattataaagtgtatacacatatttgcgaacgtcaaatttctacataattccaattaatcgatgaacggtaatttttggtctgacaaacgtaatttgtcttccataacatagctctctctgtatgttgataatactcgttgttttgcataggcctgatgtcacattttaaaatctttgactataaataatttctaaaatacctgttttagaaatggagaccatatggatagattagtctaaaaagtacttcaataaaatcatatattagttgatattttcatatattattattattattatagaaaatagtggttaaagttaagtattataaatccggagagagttataaattatggtaaatagataaaatttctaacttactcatgaattttcactcaatctctttcgtgtctatgaatttttcctcgtcctctatatgatactgagtttttattttgatcctctccatacccatactgttaattgcctacaagttgaccgtttgaattttcttaaaacgactaaattttgtgtgaattttctcttgtaaatatgtacataacaattttgttattttttcttaaaaaaaagggtatagccgcctagaccgagacgaacaaaaacgaagagaaggaaaaaatgacagcaaaagatcgaaaacacgacaaacacacccaagtaccctacgtgtagatagattgtgtttagggatatcttctccaatcccgtaatattttcgattattgttgtaatgacgcagcataaataagtataaatacgtggaagaaaaaaatatatatatagcgtgcatgtcgtcccgttcgcagtacatcgtcctgatcgatcgatatatcggccatacttctcttcgatgcctttccatgcacagatgcactctcaacagcttttggctcttggctaccccatatactcttgttttctcttcaaccttgacccgttgaccgcacctagaatatcccgaatttatggacgcgcttattttctttttctaccgaccgacccatacagaaatagaaatggtaaaccgacaaaaaaaacaaaaatggtaaaaaaatggaaatgatttgttgttttaccaaccgttttcatattcaaccatatttctatgcatggaaattaccatttttacaatactataattactgtgtttctgcggaaattaccatttctacaatattgtaattgccgtatttctaatacctatatggtcatgcatctgtttcacccaaagtgtaaaagtcaatcaactttttaaccaaattcctaatgtaattaattacacggctaaaacagagatataggttgtaatttattatgtggtgtaagttttaattaatttacagtcatattatatagttatggtgaactaaatatgtgatgattttgcagtttcatgttttcgacagcagttaccggttccgggttgataccgacacattttcatccgtatagttctatttctaattttctgatatttaatttcagtactaatttttttccagctctacgttatagattctgtatacgaaagatatatcgttatggaaatgggcgagactgttgtcagaccgtttacatgcatcccatgtaacagtataatagcatgtcctcagtaacaataagtagtcaatatcgattagttcgggcagttaggactatatatatagtgtcatcgcatctatttaattaacaccaaaacaactatctgctaacaaccaaatcgataataagccaaaaaatttcattttttttcgcgaacgcgcaaaatgattacacgtcaatatattagaagaatagacaaaagggcatgtagcctagtggttacagtgacctaagtagtaccctaaggtcctgagttcaaatctcctatggagcaaaattcagattgggttgtttgcggggctaagttctctatctcaatggccgtatatatctggttggacatagaggctgggtagaaaatacccttctccctaaggtcctgagttcaaatctcctatggagcaaaattcagattgggttgtttgcggggctaagttctctatctcaatggccgtatatatctggttggacatagaggctgggtagaaaatacccttctctaaaaaaaaattagaagaatagagttttgatacacgacgcactcagccagaccggcctataccaaggaaggaagaaaaacaaagaaaggaaaggaaaaaaaactcgaaacgacggtaactttactccaaaaaaattcattcggctaattgtttgactaataaccgaacaaaacctgtaccaaatttagctatcaacgcctagccagttcaaacttgaaagtaatactccccttatacactgtcgatacacacagtcatctactccccttatattgtttaattgacaattttaacaaaaagttcagctagtgactggctacatttcttttcatttcattattataggtggggctggtcagctagtgatcttgggtaaatatacgatggaaccttaacttaggtgaaaactattgtaaactctaacaaaaagttatctaaattcaacaaaaactcacacatatggataagatgatagttacataaccatgtaaatctcgtacaaactcgacctcatttctgagatataaaagcaacaaattttgaaaaaaaaatcattaggacaattttttggtttgaaatttgtttcttcaaatgaccaagacagttgcaaggtttcatattgatgaagcaagaaaatattataagattacaatcttagaaaattaattgtagccgaaaaaaaacaaacacacggccactgcaagctggtagctctttgcacatcctaggagaacaagctagcaccaagccaatcaccgctaaacctataaggtagtcgcaaacaacccaccgaacatcgactccacacagaagatcatcgatgagctctggattatcctcatgtagaggggttgaggagagggagagggcgagagagaaggagatccactcgtccctcactccaacctgatgagggcaatctataaccgttgacgaccaaaccgagagaagatgacaacggcgaggaacaaagaccttctaggcaatggctacagggaggtcatgacgtcatagatgccatcgttgcccgtcctaccggactaggttttcactcggagagtcctgctagagaggggaagtgtggccgctcgataacgccccaaggagagtcacgacgcccgaagaagtcgttgttgtcggctcaggaaaccctccaagctagacttttgcctacagcacccactcttgcacccgtcgccaccacttcaaagctccaccattgccagccacgctgccctccttgtcgtcgccgcacccgcagtcaccggccgtggcgacatcccgccgctcctagcgaaatccggagcgggacctagatccggttgcctatagattcgccactaccgcgtaggctcctcccccgccacccgccactcctccgcagacgagaggagggggggggggcggggcactagatctggctagggtgatgccaaacccgacgacacaggcccctcccccacgcgcagcctgccattcctccacgcactgtcgccgtgccatctaccccgtcgcctatcactccactgtgcaccgcctccatgccctcttccactccgccaccgcctcctccacggttctcctcgctaactccagtggaggagacgcagatctgggccatggtaccccagccgttgaggtttccatggggagaaagcgtccgccgctactatccttgtggttgtccggctttgttgacgagccgcttgggcagggacgaggtgaagaggaggaagagggagggaggcaacggtggcatatttttgcctttcgagtcgtccctggggtgggaatgacgcagacatgagaaacggaagctttgtttcactagatggatcgtatcagcttggtttaaatttctttattttttatctcacaaaagaagccgagtttggacaagataatgcatgtttatatatagttgtgtaatatcatctcgtccacatgtttgaattaattttgttttttgaatgtagagtcaaggtttacaccatatttacatacccggttatcctcgccgaagttgtggggagagagttgaaggctgctgcgtatatgtcgtgttgcagggagagctgtattgaaggcaactgctgcagttctgcacagtactattcttagtattctttggtccatatcttttttctctacagcctttgggcagtggtgcagtttccatcttcaggtaagtctagtctgcatggctagaggcagctccttggcattaacatcagctagcgatggccggactgaatgctccctagcaagtagcaacctgtgttcttgagtcccccaacaaccagtgttctccacctccggtccatggcgagctctctcatgtctcatctcatcactactggaggagctggccgcgggtgagaggttgcagagatgtccgggtcttctctccgctcgtgagaggttgcaagcaaaacagacggtatgcatgcatcatctatcatttctttcatcagttggtagatctactatatatatatatattcttgcaagaagccaagaacacatcttgaaaaagttttgcttgtccattcatcgcgatctacagtttgcttttccggcgaggttgtggactggagatagcgcaagcgcacacacgcagtccgtcgatcgatctgcctcgatctacagtttgctttgccggcgatcgaggttgtggactggagagcgcaagcgcacacacgcagttcgtcgatctgtgccgcacaagttgcaacggtaagtccctcttcttccctcgtagaacaatcgtatatatatgggaaactattctaatccctcgaggggatgttccctcgtttgctcaaaaaccatctaaatggttatgaaaaattctggaaaaatttgacaacattcatacaacacatatatacaacttcacaaaatcttaagtccaaactcaactcacacgtcgagatataaaaaagacaaattcagcgtatgaatagtagcgtactgtttatatctaaatttttcttttttgtttctcgatgtgtagatcgaatttgaacatgaattttggtggactagtaggtatcattataatctacattgtcaatttttttcagatttttttacaactatttgcatcgaatttggaagaaaaaagttatacgagaggatatcccctcgagggattagaatccactccctatatatatgttatatatatgttagttgtcttttggcattttgatttcgttctctctgctgtacctgtgtgatgccgatttggttttctttccctgcttggctagctagctgctgctacttttctactactgtaatccattccatctcatgcatgcatgtccaccaactaatctcaagtatacattacttttgtctcctagatctggatatatagatgtcaaaaaaatagatctggcttcttttttattttgtacgatatatagatgtcaaaaaaatagatctggcttctttttttattttgtacttactagtgtatgttcattttaattaacttaagttgcgcgcctttctcctgtctagtccttcctctcttgaacagctagctccccttccatcggattcgggcatggattcttttttacatcatctagatccagaaccgataatggcgtaaaaaccctaacctaatgagaatggatcgatatagaggtccaaaactggggtagtagaatgtaaaccggcctgcctgtgaattcttcgaattgggcttcaaagtaaaccatttagatgggcccttttcgtattagaatagggactgcatagaagcccatttgacgagcccacccaccatcaaaaccgatggccatctcatcacaaaagaaaaagaaagttacctccacgtaagcacaaagccatccgccacgtctcaacccctgccgcgtggacagacacttctcttctcttcttcctcacgagtcacgcacgccgttcactccgcctctttctttctctctttctttctttctttcttcctgctcccctgagctcctgccttattacccatcgttgccgccggcggttggccggacgcatggcgatgccgggacagcttcaacacgcgatggctgccctggatccatgccgcctgattggcatggatacgcggcggccaacgctggggtggcctcggttcgtgctgccgttgctaacgggttcacatcctttcttttctttcccttttttttcgagttcacatcttgtcctttctattcgatttctattggttggtttgtttgtttgttttgaattttggtttgcaatttcatttactttaagctttttatgtgttctcattcattcttgtcttctagtttttgttgatttttctgaaaatccatctcactatcctatccttctttagatggctgatttaaacaacgacaacgtcttccctgccccgcatcttctcactcatccagcaaagcatcatcttgtttctaagactattcactctgttttcaacatcgaggtgaatgtgaggcatcaagaggaagataacaagtctgctttccgtcacttctgtagaatcttaaaaaggctccccattaataagaatctggatagagccgaaatagaggaaactactattccgactgagctctgcactgggtttgttattgagcagaggggaaatatactttatcttctaaccacagcccatgctttggatgattactatgatgcaaagaaccatgaccttaccccaaaagatcttaataaatcatttattttcaaagtcttgtgcatccatcaggagaggcaccttctttctctccaaggagtggatgataagagtgagcatctgaacagatacttctgcgatgcaaaagtagttgcggttaacactcaagttgatctgatgcttcttaagttgaaccgtgaggatatctactactcatatcaagatgcggataattttatcatttgtcccgaggaccatacacgtatcaagctaggaaaatcaccaccagttgagtctgagaatgtctttttacaagggtggccagcattgcgatcacaaacttcagtttgggggcacattagtcatactaacagaagatacgacacacttactagcttgaatgtgaaaggatataagatgaatctgattgaagtgcctgagtttcaatgtgcagccggaacatcgggaagtgcaattctgaatggggcagcacgttgtgttgcggtttatcacggtatacaaaagaattgtaaagccggatacgcaatcagttatcaagatgtgaaaacttttgtagatactgcacttgcaaatgtaagttcaattttatttccttttaactcttctccttttctcttttcaattgcttagtgacttagtcggttagtcctagttctgtttgttttcttcttttcagctgccaggtgatggtgatggtgatggtgatggtgatggtgatggtgatggtgatgatgatgacgacgaggagaatgacgataacgacagcgacagtgactatgatgaaagtgatgaggaagaggaagagagaaagaggaagaggggcaagggcattggcagcggcaggggtaggggaaggggcagggcgagtgggagtgaaaaggggaggggcagtgggaaggggaaggcgaagatgagatgaaagacgaagacgaagactgagagatggctggtggctgcgctactgtgtatcgcttcatgtcgagatggctagcgctactgaagtgtctaatgctgcatatctgtattccagttaattagagaacatgtctgtctgtatcccgttaattagagagttattcactagaactattgccactaggcgtatctagctaattaattagaattgttcactaaacatgttgccactaggcagtactatggctaatcatcaaaacattgtctattaattagagttgttcactaggcagtactaggcaatggaacaaggggcgctgggcggctgtggctgcgacaacagcatgatcttggttctttgctgttttagatgcatttcggcacccttgtttatccagcctataaacgcaaacctgactgtctgatggccactttgcaattgctatctgcaatagaccaagatggcagctgaggggagtatatctaggaatccgtttctttttgttgctgtttcattcttgcatgcatgggcaatttgcaaatactgtaaattgttgtgtattggtgcctagcaatttgcaaagagaatcaagaggtccatgtgcttctgaagaatgcaggtcgatgtgaatcaagaggttccacaaggcattgcaagttcatctacaggtttctgaatcaaagtcaggagtaaataaatattgtgcagtttgttcaatttccacgaaattaaactgtgcagtttgcccaatgtggagtactatctgggcattttagaagataacacctgttcacctgtctggaaacactcacgtgtctgcatcatgtctgaagtccatcgtctctgctatgaaaaatattctactttcccagcttcatttcctatgtaaataatagaggcatacaagttgcattatcttttctgataattgagtgttttatgatcattgggtctgcaagacagcaagctccgattcagtatactactagggcttactctacatcatgatgaactcatggcttgtgtagttgtgtatagtgtcagttttttctctgctctgattcagtattgccgaaatcctgttactcaagatttcaggcactgcataggtaatgagctagagtagatttgctgcacatgattattttctttgcagtttggacattagttatgtactggttctttctccagtagcctgaaaaggaaggttgcatagttactccacactttaccttgtgcaaagattttatatatatatatatttgaaaggcgggattttttttttactttgcaaagagaatcaggagtagaataatgtacgctcatgtgcctggatgcaaccagatttagcacatgttatttttttcaggtaagcatgtcttcctttcgcaagtcatcatggacaccacctaattgcaatatcagaagggagccatatctctctcaggttggcatgtccttcttttctttgtttaaatcatgaagaggtaccttttaattgggagtaactctgaacaggtggaggcagtctacatggaatactctagccagataatgctaccaagaagaggaccgtagtgggagtagattctaaactctcgttttttttaacttgtagaagttaaatttgacctttgcatgtttgtggagtgatttatcacatattaatctatcttgttaaattttttcataattatttgggtgacatgcaaacaacaaggggatgtcccctcgagagtttaaaatagtttcccagaccatagtggttagtggttagttgtgctgatttctcttttccagttcaaaatctgtaaagagatgactggcccaaatctttaaagttgatttggactatagatttcaatgtgtaaagtgatgttaactcatttggagcatatttataagtgattttattatatttagaataattgaatggttgatttgcagtttttaattgcaccattcttgcaatatgattgaattagcacaggagtgtctgaacttgaattcagtgctctgcatatgcagtggatgaatactcgcagtttacaagaaacctggaagaaatcaacctcctttattgcaccataattttattaattttattttgttaactttacaagagttttgctgttaactttacaagaaattgcaaacattcacattatagacaattctgtcaattcacatcaacgtaaagcggtcatcaggaagttggcgtggatatggagtaggtgcgaatttttgaaactggaacatctctgaaactgaggtacatctatgaaacatcagtgcaggagtatctccgaaacatcccacaggagtatcacagcttgcaagtttatgatctgcaagcttgcaatagcttgcagatcaaacactataaaaacaagcatgccagtatgctacagatagccagatagagtcaagcattctgtcaaaagctgctctttcctcaaaacatcagacgcctttctcttaaaatcaggtgaagcagcagaattgcatcttcctcagaaaattgcagctgattcaaagctgcaaattgcactgaactagtgaactctgtactaatcatgaatggttgtttgaagttgcatccaatcagattgccaactgacatgctcacgcacacacctggagcctacactgcacggtgtgcaacctgcagatatgttaaccataaacattaattagccccttccccatcttaatgaaatttggtcgccattccttcggccgacctggcaaaaaaaaaacattaattagcccaatgtcaaagcgtcattgttcttacataattttcatcacggtcgattaacatcatgcccaaacgattgaacaaatcagacaacagatggctgcgatgattgtgacttcacactagtgaaaattacagttggagtcaaagtcatccaagtgtcccaaaatgaactgttgtcacaaatcaagaacatgttcatcccaaaaggatttggggcctggggaagttgacaacttgaatgatgattgatgaacaacaacaaagaacagaaacccgcaccagagcaccaggagcatcttctcctttttatccttcgccccttcgcctcctcgccggttgccacagtacgcaccagaacgcaaccactactactagtcagcgaacaagctcactgatggagcaaagctaggagaaggtagacttgccggcgttctcgggcccacaagcaaggtggcggagagcggtgcccgagcgggcggccgagggtgacggtggaaccatacgatacgacggcgagtcggcgagggcacgcgaggaggagggcaaagatgaaagcaacggtcgtgattgaactacagcgttaaattacattacaaaaaaaaaaaaaaggagactcccgattgacctaggacgtcaaataaaagttaaacatcccagaatcaatggagcgtagggcttattcaaattgatatacctcttcaaaacatcttatctctagttttttttatctctatctcttttctatctctatctacttctatctactactagcaaaatgcccgtgcttcgctacgggtaaaataaagggttaaatgctataaaatacacagttagcatgtatataataactagcaaaatgcccatgcgttgcattgggtgaaacataaaaaaaaacaacggttttgctggctagctgtcgacagttttggaggctaaaaactttcgattttctggccgtacgatccgcgcgagatgattttctagctgtgcgattcgattttctggccgtacgatctgcgcgagatgattttctagccgtgcgatccgcgcgagatttggaaaaaaaaaatctgtacacgtgtgcttgcaggggctcgaacacagggtccccatcatggaagccatgcgtgctagccacttgatctgctgcatgttttggaaaaattaagtgagttacattttagttataactacattgtaactactatgtaactgcactgtaactatattatatatatatattattttaatacttatatatgagttacattatagctatagtgaaattatattgaaattatattatagttagatttgaaagttttctccttaaaaaactttcgacagttctctagatagtcccaaaaacaacagtaatgggtgtgtaggagcaaatcgaatctttccggtgcaagtaagatactaacatgacataattatttgttgatctaaatccattgacatgaatgattataggaaaagtattaataccactttaaaataaaattatgtattatagactataaagtttgaaacccaaaaagtatttacttttgtcatgtattattatgagttggttgcaatacatggttattttttggtacttgatattgataaacacatttttttttacatattgtaaagagtagcaataatataagaaatgtttctcgctatctatcagatcaacctcattgcactccaatcgcataatcattttcactcaaaaaattagacggaaatcatacgatgaatagaaaaaaaattggatgtaaacacgattcattctgttggtgattacatttttttttaaaaaaagacatgtgattgttttctattttctaaaaataatttattttgtcgtaaataattcattttgttggtgatcacatgttttttttaaaaaaatacatgtggttttttatttttaaattaataaaattgctcgttatttttatatgattcttggtagacgtggatccaacctttttttttttggtgtagtagcctcgggcaagccttctattatttaagctagtgctgcccaagctaggcaaaatgtggtattatttgtgcactgacatatgacccgtgtggggcccacttgccatgttagttaaaactggccacgatactgctgagggatcgaaattgacatggtattgtaagttaaaggatgaggttacctggtatttttatttagggatggatttcatattcggtgataaactaagggagctaaagtgaacttattcacgtttgctacagtatcgcacagtactgtactgggctgctg

SEQ ID NO: 6501 - DNA, 34688 bp, Oryza sativa
  unsure (1)..(34688): unsure at all n locations
aggaactccatacggtccaaatgattcttcaaaattttggcctcgcgacaggcatggtgaccaatttatccaaaagcgaagtctatgccattagatgtgacaccctcgacttataggatatctctcccccttcccggcacagatgaaacacttcccttgtacctactaggatttccactccacatcaggaaactcagaaaatcagatgttcaacctctcatcgataggttctcagctaggctcccaacatggaaaggaaagttactaaacaagactggtcggacggttctgataaagtctaccctctccgccctcccgacctatcacctcactgttttcccccttaaaaaatgggctgaaaaaaagatcgacaaaattcgtaggggcttcctctggacagggtcagaacaggcacaggggggacactgcctagttaactggaagagggtctgtagaccaaaaaaacatgggaggccttggtataacaaacctcgaactttttgggcgctctttaagactccgctggctttggcaggaatggaccgccgtcgacaagccttggcagggatcgagtcttccttgtgatgaaacagacaagcagctgttcagagcttcgaccacgataacccttggaaatggcaacaaatcaaaattctggcatgacagatggttgaacggatcacccctgaaagaactttacccttccctctatcagttggccacaagaaagaacagatcagtggcacaggagatacaagggaaccattggttgaaacagatgagacgaatgaataccacaacacaggttagggaattcatccttctatggcaccaaatccaacaagtggagttgcaggaaggaatagacgatgcgatagcttggagatggactccaaatggatcatattcagcaaactccgcctacaggatccagttcgttggaggcatacaagacaataggtctgatttcttctggaaggcgaaggtagaaaacaaatgcaaattctttggttggctcatgattcacagaaagatcctcacagccgacaaactccagcttcgtggatgggacaacagccacatttgtcctctgtgtggagtagaaccggaaacagcaacgcacctcctcatggaatgcgcctttgctaaacaggtatggagacagatatggctaaaggcggggctccacatgcctgtggcttccaccttcgatggagatatgctacgatggtggtcaacctgcagaagagagatggccaaagaacaaagaagaaattttgatggcctcttcatctgcacagcttggggcatttggctacagcgcaatgcaagaatcttcaatggcacttatagcacagtgatgcaagtggttgattcaattatcgctatgtgcaaagcctacgtcggagcgcatgttctagatgagtagtgcacgtactctctgttggcaactttttgtgacaagtcgacaagcacgatcgcaacacctaaacgccttgcggtgatatgaagtcgccaaccacctcgatctagccaaatggccaaatcaagatgggttttgcaaaaagaaaagctaaaccggctagcgaagccgatttagagatcaaaatcagcctctaggccgatttagatcgatatgaggataactacccgtctcgtgggcaaaacggaaggttttcaggacaaacctacaaagagatgtcgcactctcgcagcggcggcggacggtttacggcgcaaaccgacaaagatggactaaaactagggtaaaatagaaaacatagtaatagaacgattcaagtagattgtattcgggggttttacaatgaaccggccttgtcccttaaataggggttggtcttgccctctacaggcccttctccacatccaactcgggatagaaaccaaaggaaacacgaaacctgccttcccgagtaaggaaacccgtcactttccaaactttggcaattttcccctatttcgtccataggtgccaaatttgggtgtaaacacatgcccccctgcctttttggtgaacagacgtgaacctaaaagcatagaacatgttatctcagggcgataatccaattaccggccataggacttcctaagcatcttgcaaaatgctcgggaagtatttcttcaagtatttcccattaatttatccctgaaaacaccgtcttgaagtgtcttcatctccctcaaagtcttcaaacgctcgtcgatgacatcttcaaaaattacttcccatcaaggtcttgtaatcttcaaccgacaagtcgccttgcttgaaataccgaagagtgtcaagatttacctcaactggcaaaacggcaatttcaacaatgttttattactcgactcggcttatccattagcctgagcatagtaaagagaagaactcaacaacttaatatcataagattcggcaaaacttctcacttccttggacataaaagaagctcctttaatgtttgaggaataccgaatctatgaacgatatgcttcaaaataaagtcaattacctccgcataagtaatattctcgagcggcacagcctcggcccacttagtgaagtaatccattgcaactagcacgaaccaatgccattttgatggcgaaggataaatttgaccaatgaaaaccaaagcccaacctcggaacagccatagtttaatgatagatttcaacacagcggtaggcgttaattgaacattgccgatccgttaacaagcttcactccctctatagtatttgaaacaaccatcaattattgtcggccaatgaaaccccactctcctaagcaaccaatttatcttacgggccgattgatgaattccacaaatcccttcatgaacttctctcctagcaactttagattgatcattatctaagcatttcaacaatactccatctatttttcggcgatataatatttgaacgcttgccgccgaatcttccgatcaatcttaagtgtaggatctttcaaatatctaatcaaaggaattcgccaagctatttctatctcatgggcacaaatgtccgaattcacaattaattcggccttttaatcaactgtaacgtgccccccagcctcctgtctgggatcggtcagaccggccacgcaatgccggtcggaccaccctgtctgcccggtcagaccggccatgcagagccgatcagaccgcgggtaccaccggtcagaccggccgtgcaatgccggtcagaccacccctggtctatgactttgtcaatttcgtccaaacttttgaaatcaagcatcggcctttagtatataatttttttttcacataatagccagatgcttggtatatcaaattattggaccaaaattccttctctctagacatatgaaaaattataacattcaactaatatgtctagatgaatactaattcaattggcttttgaaacaataatcatcatgacatcaaaacacttagccaattgaagcataatcaataatgaatcaccaaagtcatatgtgtcacatgcatagattccaataaactaaaaatgtaagtaatcggcttaagcatgtatgcaaaatattaacaatgccaatgttcctaaatacaataactctagaacaaatcatcacattgaccattgacattagccgaattactaataagcaaaactttcatgatgcaataaatatgaaatatatatattatatggtgatccataaaaacacatatgatttggctttaaataaatatcaaagactcatgagccaaatcatacttcaaacaaattatatgccaacctaccaattccactacctagaactagcatttgcaacatgtatgcataatatcaatttgataagcaaaaacacacatgtgctagatatcaagcaatgttctaacatggcataggcatataatataacgttgaacacaataaacccataccttgccttagcatccaacaaacggcggctcaaagatgtgatgttgtatccatcgccgttcatcttctcttggttccctcatgagcatattaatgtcttgccccccgagcaaaatcggctctcttgactgcactatttcgaaggcaagacaaacaccgcaccaacattcatagcaccatgcgaaggagacttatctctaatgaccgatgattcttctctcatcaaattggatatatcactactttggaaaatcaccgatctcttaacttttacttctttaggtctccacactcgcttaggtgtcgttcgaggctctaaattattacatgttttgttctctacatcttcggcctccttttcttttttacctatggcccgaagacgttgtaacctcctcttctgagaacgagataagccagaaggtatccacttcggctgtggttgttttctaggagctaaacaatgattcttaatattcttggtcgaagtagaagctcctatgttgctctcaattttcccgctcttctccaatgctccccggttagaccggcctctgggcccggtcagaccggctgcaagccatcagtcagaccggccaggagggtcggtcagaccggccgttgtctggcggttagacctgccagacgcctcggtcagaccgccgacgttgacagtaacggcgccggcttcagtcttctccacttgtacaatttttgccgcatctccagtaggtacatgaacatcttgagactcctccttgacagcaacgacctccggagctttagcttctttcctcacccacaccttcttcacctttgatccaccggaccgattcttttgtgggaaacggtcttgtcttgaattagatgaatgattcggtactgacctaggtgattcctcccatccttgatgaaacggcgtagagaattgaggcatccatggcatgtaatacataaaaggataaccatatagtgacattggatatggataccatggcattacaaccggaggtttatatggagttggtatggttgatggctccgatttctttgatgtttgaccaaatctcttcctacgagatgatcttagtcttttcgaatcactagtttggttatcaaatcgttgaccggctaatcctttcttgtatttagccataagcatctcaaaagtgagcttcggctttttggtcttttgggaattagatgacccatcctttgcaactttatgatcttcggccttcgcatttttgatcctattcttgggccgaagatccccaataataacacttttccctttctttttgtctacatcaataggactaacagggagaggatcactaacaattccggtcttaggcatagatgtaaccgaaatagtctcacaagtgaccgatgaatcatcaaccggtcttttctccatcaatcttgcatctttaaaataatcatgaaactcatgctccatttgtgaccatgtacaaattgaactaggagcaagcaaactataccatgtagatgcaaagtttgacaaagaaaggggaaacaacttcaacttaagcaaatcatcgctaccggccttaccacattgatcaataaagcggccgatatgctcgattgtagtcatagcattctcacctgtgaatttcgtgaagttgggcacctcaaatccttgcgggtatgggaccgaatctacatgttcaggatatggcctttgatatgtatgcatagctactttggattctatttcaccactatcccgtaagacattgtcattatcttttccaacatccacatgaccgatttgtgattcggtcttaggtgacaatgctatttcactttcgcttgtgatacaatccgaaccgtcacttagttcggctatatttttaatgatgttattctctaagctagcaacacaatctaaaccattacttggttcggctattccatcgttgtctaaactagtaacacaatccgaatcatcgcttgattcggctataatggttattgcattattatccacgctagcaagataatccgaaccaacatttggttcggctataatcgttatggcatcattgcacaaatttttaacacaatccgaatcgtcgcttggttcggctacacatgatattgcactatcatataaactagtatttaagctattatcatccactcggctttcctgagccagagcttcatgcaacacatgatcaatatcaagaaatatctggccattcaatttctctttaatagaatcaagcaatccatcatatgcaatgttggccaaatctttgtcagttattctcaaactaaaacatcggcttttaatatctctaaacctttcaatataatcagcaatagattcattatatttatgcctaaccgatgttaaatcaaacaacttaagctcagtttcattagtgtgaaaataatcatgaaatttttgttctgattgagcctaggaagaaatagaatttgccggtaaagaagtaaaccatgtaaaagcagtaccggacaaagataaagaaaataagcgcaatttaaaagtatcactattagcctcaccacattgcgctaaaaattgacctacatgctcccatgtggtcctactatcttcaccactaaacttggtaaattcgggaactctataattacgaggaaacggcacatcatcataatagtcaggatacggcttttggtaaacattagcacgattcctagtttcagtcccgaatctattcctaataatctcactaattatatcctccatattattaggcccatgttgatttggcggtggattaggtggcctaataggttgtgtttgtggcgcaatatgattatattggccttgtctagtatcgggaggataccccctagcaacatcattataaacattaggaacatgtgggggaacttgaggactacttgtagcagtagatacaggaggatcaaacgttttaaagtgatacaaataactagcattagtcatcggatctataccctgtattggaacaattgcgttggtctgaccggcccaaggcccggtctgaccggcatcatgatgtgcggtcggaccggctggccggtctgaccgccggggtaatacccggtctgaccggccggctggccggtctgaccgacggctatgttacggtctgaccggtcgtcaggctcggtcggaccgaccatgaacgccgtcccgtcagtttaactacccattggatctataggagattgatcaacagtggtataggctttatcctttaatgtgtaatcatccataaaagagcctagcctactccttaaaaatccatcaaccttatccttaaacattacatctaatctatctttaaaattaaccatagataaatctattgtagatgcaatttgttgttggatagattgtgatacctcgtcattacttaccatgtcgggagcgagcttgggacgtggcccgggcttgatgatcacgccttgacgagtcctagtagtagctctcatcaatgcctcccgtgtgagctcgttgatgtactcctccatagttttacgatcttctccttcgaagtcatccaatgtgaccagcatcacattagatggctccgcctccgtcttggatgatggcttcgtcatggcgaagtcgaagttgagttgacgatgaacggatctcctccccagcggagtcgccaaaaatcgtgttggcaactttttgtgacaagtcgacaagcacgatcgcaacacctaaacgccttgcggtgatatgaagtcgccaaccacctcgatctagccaaagggccaaatcaagatgggttttgtaaaaagaaaagctaaaccggctagcgaagccgatttagagatcaaaatcagcctctaggccgatttagatcgatatgaggataactacccgtctcgtgggcaaaacggaaggttttcatgacaaacctacaaagaggtgtcgcactctcgcagcggcggcggacggtttatggcgcaaaccgacaaagatggactaaaactagggtaaaatagaaaacatagtaaaagaacaattcaagtagattgtattcgggggttttacaatgaaccggccttctcccttgaataggggttggtcttaccctctacaggcccttctccacatccaactcgggatagaaaccaaaggaaacacgaacctgccttcccgagtaagaaaacacgtcactttccaaactttggcaattttcccctatttcgtccataggtgccaaatttgggtataaacactctccttctagttgcttctcattttcttaaaattttaccaccttatctcccaggttgccttgatagaagaatgcttgggatcctttgtaatctgggtttgtaaaaaacctgtattgctttttctctactctccttaatgaaattggcagagctcctgccgttgacccctcaaaaaatatatatatatatatatatatatatagttgaagcagagtatgcacaaccaaggcaaacaattgaacactaccattgctattgctccattgtcaaccaatttgtccagaacatttcacagccagacacacagaaggcaaaccagtttgatagtatatctttgcatgcttttgctcaccttttgttttggaaccagaccttgatctgcttggggtcgatgctggcgaggatgggtcactcgcggagcagctgctggcggcaggagaagctaggcttagggcactcagtgtacacccgctctagcgcctccacctgctccggcatgtaccggggtccatcctggctttgtcatacccgtcgctgtcgctgcccgctccgcatcgggcatcgcgagtcaagcccaagtcaaatagaaatcgaagacaaattttgacggcgtaaaaaaaagttcggcaaaaacatgttaaatttttataataactagataaaatacccgtgcgatgcaacgggtgaaaaaaattctaatgacaatatacgtttttcatacatagccatgtcaatgacaatatttgtatggatcgtttgtagctaagacaattagaaaattggaacatcttcgatgtaatggtccaacctcgacgatgacaacatacatcatcaatgcttgctttacctaaaataattggattattcacgtgacaacatacatataatctaacatactctttcgatctcattattgtaaccaataataggatcaatcaaatccaacgttctctcgcatggtcaagtctacacaaaatagagtcactgtgcactcttctctaaataacaattaaaaatatgtttatcttttaaatataatttctatatgatgtgttatcaggaatattacctatatctgataatagatgatgaaaaaaaatcgagcaatccgacccaagcgtctatcaatttagcgttttttctgaccgtttttttagagcagcttgtttttcataaatggtgtttttttcatgagaggttttttcaaacaatttttttagaaatggcatgcttgctttttctaatagatttttcctcgcatgtatttttttattttttagggatgacggaaacctttttagcgcttttttcagacatttttttctcacgcgtttttttgcttttttttctcacgcttttttaaccgtttttattttctcgcgtattttttttcttgttagttgtacgatgaaaacttctttttttagttgtacgatgaaaacttctttttttagttgtatgatgaaaacttctcttttaagtagttagattacattagattagattagagctagaggagagatatatatagggaccacagaaactaatagaagcagagttttttttgccgcattttttttcctacctttgtactttttttctcattcgtttttttatttttcactaaccattttttgccattttcttagggaatcagatagataaaagatgtgattttttaagtagggacggacaaaggaaatgttttgaattttttaaatagtaaagatagagaagtatgcaaaacttatatacgtacgtatgaaaaagaaaaaaatatacagtatataaagtttgtatacgtgtatataaagtttgtatacatgcatagtattaagaaataaaaaaccaaaaaaagggaaagaaaaaaaaagaaaagaaacgaagaaaaaagaaaaacggaaaaaccatacgtacgaaataggattatataggaatatgattttttttccaatttttagatagataaaagatgtgatttttcaagtagggacggacaaaggaaatgttttgaattttttaaatagtagagatagagaagtatgcaaaacttatatacgtacgtataaaaaagaaaaaatatactgtatataaagtttgtatacgtgtatataaagtttaagaaataaaaaaccaaaaaaaagggaaagaaaaaaaaagaaaagaaacgaagaaaaaagaaaaacggaaaaaccatacgtacgaaataggattatataggaataggattttttttccaatttttaagagaatcggatctactgtttttttcgccgctttttttggcatatgaatcggaccctttttttttaaccttgcataggaatcggacattttttttttggttttccccatttttaaggggaataggttttcccctatttttttctccaactttttttttcgtttttatgggaatcggactttttttttggttttttcgctattttttatttagacggacgaaggacttttttttgttttttctctatttttctccgacttttttttgttttccccgttttttaagggaatcggacttctttctctttttattttgttttttacgctattttttattattattaaaacggacgaatgaaacatatctatatatatataatatatacctaattaaaaaatagataaagcttccggttaattttttcgtccgtcattaaagggtgggcccacgcgattttcgccagtaatgcgaatcgcgacgcgtgacggcgattttgacgctccacaaataaaaagagaaacggaaaaaaaaagagagaaagctagcaagcagcccaactaaagcagcagcaggccggcccaacaaaaagcaaacgcagcctagcagtcagcccacatagcaaagcagcagcccagtacagtactgtgcgatactgtagcaaacgtgaataagttcactttagctcccttagtttatcaccgaatatgaaatccatccctaaataaaaataccaggtaacctcatcctttaacttacaataccatgtcaatttcgatccctcagcagtatcgtggccagttttaactaacatggcaagtgggccccacacgggtcatatgtcagtgcacaaataataccacattttgcctagcttgggcagcactagcttaaataatagaaggcttgcccgaggctactacaccaaaaaaaaaaaggttggatccacgtctaccaagaatcatataaaaataacgagcaattttattaatttaaaaataaaaaaccacatgtatttttttaaaaaaaacatgtgatcaccaacaaaatgaattatttacgacaaaataaattatttttagaaaatagaaaacaatcacatgtctttttttaaaaaaaaatgtaatcaccaacagaatgaatcgtgtttacatccaattttttttctattcatcgtatgatttccgtctaattttttgagtgaaaatgattatgcgattggagtgcaatgaggttgatctgatagatagcgagaaacatttcttatattattgctactctttacaatatgtaaaaaaaaatgtgtttatcaatatcaagtaccaaaaaataaccatgtattgcaaccaactcataataatacatgacaaaagtaaatactttttgggtttcaaactttatagtctataatacataattttattttaaagtggtattaatacttttcctataatcattcatgtcaatggatttagatcaacaaataattatgtcatgttagtatcttacttgcaccggaaagattcgatttgctcctacacacccattactgttgtttttgggactatctagagaactgtcgaaagttttttaaggagaaaactttcaaatctaactataatataatttcaatataatttcactatagctataatgtaactcatatataagtattaaaataatatatatatataatatagttacagtgcagttacatagtagttacaatgtagttataactaaaatgtaactcacttaatttttccaaaacatgcagcagatcaagtggctagcacgcatggcttccatgatggggaccctgtgttcgagcccctgcaagcacacgtgtacagattttttttttccaaatctcgcgcggatcgcacggctagaaaatcatctcgcgcagatcgtacggccagaaaatcgaatcgcacagctagaaaatcatctcgcgccgatncgtaccgcagaaaatacaaagtttttagccctccaaactgtcgacagctagccagcaaaaccgttgtttttttttatgtttcacccaatgcaacgcatgggcattttgctagttattatatacatgctaactgtgtattttatagcatttaaccctttattttacccgtagcgaagcacgggcattttgctagtagtagatagaagtagatagagatagaaaagagatagagataaaaaaaactagagataagatgttttgaagaggtatatcaatttgaataagccctacgctccattgattctgggatgtttaacttttatttgacgtcctaggtcaatcgggagtctccttttttttttttttgtaatgtaatttaacgctgtagttcaatcacgaccgttgctttcatctttgccctcctcctcgcgtgccctcgccgactcgccgtcgtatcgtatggttccaccgtcaccctcggccgcccgctcgggcaccgctctccgccaccttgcttgtgggcccgagaacgccggcaagtctaccttctcctagctttgctccatcagtgagcttgttcgctgactagtagtagtggttgcgttctggtgcgtactgtggcaaccggcgaggaggcgaaggggcgaaggataaaaaggagaagatgctcctggtgctctggtgcgggtttctgttctttgttgttgttcatcaatcatcattcaagttgtcaacttccccaggccccaaatccttttgggatgaacatgttcttgatttgtgacaacagttcattttgggacacttggatgactttgactccaactgtaattttcactagtgtgaagtcacaatcatcgcagccatctgttgtctgatttgttcaatcgtttgggcatgatgttaatcgaccgtgatgaaaattatgtaagaacaatgacgctttgacattgggctaattaatgttttttttttgccaggtcggccgaaggaatggcgaccaaatttcattaagatggggaaggggctaattaatgtttatggttaacatatctgcaggttgcacaccgtgcagtgtaggctccaggtgtgtgcgtgagcatgtcagttggcaatctgattggatgcaacttcaaacaaccattcatgattagtacagagttcactagttcagtgcaatttgcagctttgaatcagctgcaattttctgaggaagatgcaattctgctgcttcacctgattttaagagaaaggcgtctgatgttttgaggaaagagcagcttttgacagaatgcttgactctatctggctatctgtagcatactggcatgcttgtttttatagtgtttgatctgcaagctattgcaagcttgcagatcataaacttgcaagctgtgatactcctgtgggatgtttcggagatactcctgcactgatgtttcatagatgtacctcagtttcagagatgttccagtttcaaaaattcgcacctactccatatccacgccaacttcctgatgaccgctttacgttgatgtgaattgacagaattgtctataatgtgaatgtttgcaatttcttgtaaagttaacagcaaaactcttgtaaagttaacaaaataaaattaataaaattatggtgcaataaaggaggttgatttcttccaggtttcttgtaaactgcgagtattcatccactgcatatgcagagcactgaattcaagttcagacactcctgtgctaattcaatcatattgcaagaatggtgcaattaaaaactgcaaatcaaccattcaattattctaaatataataaaatcacttataaatatgctccaaatgagttaacatcactttacacattgaaatctatagtccaaatcaactttaaagatttgggccagtcatctctttacagattttgaactggaaaagagaaatcagcacaactaaccactaaccactatggtctgggaaactattttaaactctcgaggggacatccccttgttgtttgcatgtcacccaaataattatgaaaaaatttaacaagatagattaatatgtgataaatcactccacaaacatgcaaaggtcaaatttaacttctacaagttaaaaaaaacgagagtttagaatctactcccactacggtcctcttcttggtagcattatctggctagagtattccatgtagactgcctccacctgttcagagttactcccaattaaaaggtacctcttcatgatttaaacaaagaaaagaaggacatgccaacctgagagagatatggctcccttctgatattgcaattaggtggtgtccatgatgacttgcgaaaggaagacatgcttacctgaaaaaaataacatgtgctaaatctggttgcatccaggcacatgagcgtacattattctactcctgattctctttgcaaagtaaaaaaaaaatcccgcctttcaaatatatatatatataaaatctttgcacaaggtaaagtgtggagtaactatgcaaccttccttttcaggctactggagaaagaaccagtacataactaatgtccaaactgcaaagaaaataatcatgtgcagcaaatctactctagctcattacctatgcagtgcctgaaatcttgagtaacaggatttcggcaatactgaatcagagcagagaaaaaactgacactatacacaactacacaagccatgagttcatcatgatgtagagtaagccctagtagtatactgaatcggagcttgctgtcttgcagacccaatgatcataaaacactcaattatcagaaaagataatgcaacttgtatgcctctattatttacataggaaatgaagctgggaaagtagaatatttttcatagcagagacgatggacttcagacatgatgcagacacgtgagtgtttccagacaggtgaacaggtgttatcttctaaaatgcccagatagtactccacattgggcaaactgcacagtttaatttcgtggaaattgaacaaactgcacaatatttatttactcctgactttgattcagaaacctgtagatgaacttgcaatgccttgtggaacctcttgattcacatcgacctgcattcttcagaagcacatggacctcttgattctctttgcaaattgctaggcaccaatacacaacaatttacagtatttgcaaattgcccatgcatgcaagaatgaaacagcaacaaaaagaaacggattcctagatatactcccctcagctgccatcttggtctattgcagatagcaattgcaaagtggccatcagacagtcaggtttgcgtttataggctggataaacaagggtgccgaaatgcatctaaaacagcaaagaaccaagatcatgctgttgtcgcagccacagccgcccagcgccccttgttccattgcctagtactgcctagtgaacaactctaattaatagacaatgttttgatgattagccatagtactgcctagtggcaacatgtttagtgaacaattctaattaattagctagatacgcctagtggcaatagttctagtgaataactctctaattaacgggatacagacagacatgttctctaattaactggaatacagatatgcagcattagacacttcagtagcgctagccatctcgacatgaagcgatacacagtagcgcagccaccagccatctctcagtcttcgtcttcgtctttcatctcatcttcgccttccccttcccactgcccctccccttttcactcccactcgccctgccccttcccctacccctgccgctgccaatgcccttgcccctcttcctctttctctcttcctcttcctcatcactttcatcatagtcactgtcgctgtcgttatcgtcattctcctcgtcgtcatcatcatcaccatcaccatcaccatcaccatcaccatcaccatcaccatcacctggcagctgaaaagaagaaaacaaacagaactaggactaaccgactaagtcactaagcaattgaaaagagaaaaggagaagagttaaaaggaaataaaattgaacttacatttgcaagtgcagtatctacaaaagttttcacatcttgataactgattgcgtatccggctttacaattcttttgtataccgtgataaaccgcaacacaacgtgctgccccattcagaattgcacttcccgatgttccggctgcacattgaaactcaggcacttcaatcagattcatcttatatcctttcacattcaagctagtaagtgtgtcgtatcttctgttagtatgactaatgtgcccccaaactgaagtttgtgatcgcaatgctggccacccttgtaaaaagacattctcagactcaactggtggtgattttcctagcttgatacgtgtatggtcctcgggacaaatgataaaattatccgcatcttgatatgagtagtagatatcctcacggttcaacttaagaagcatcagatcaacttgagtgttaaccgcaactacttttgcatcgcagaagtatctgttcagatgctcactcttatcatccactccttggagagaaagaaggtgcctctcctgatggatgcacaagactttgaaaataaatgatttattaagatcttttggggtaaggtcatggttctttgcatcatagtaatcatccaaagcatgggctgtggttagaagataaagtatatttcccctctgctcaataacaaacccagtgcagagctcagtcggaatagtagtttcctctatttcggctctatccagattcttattaatggggagcctttttaagattctacagaagtgacggaaagcagacttgttatcttcctcttgatgcctcacattcacctcgatgttgaaaacagagtgaatagtcttagaaacaagatgatgctttgctggatgagtgagaagatgcggggcagggaagacgttgtcgttgtttaaatcagccatctaaagaaggataggatagtgagatggattttcagaaaaatcaacaaaaactagaagacaagaatgaatgagaacacataaaaagcttaaagtaaatgaaattgcaaaccaaaattcaaaacaaacaaacaaaccaaccaatagaaatcgaatagaaaggacaagatgtgaactcgaaaaaaaagggaaagaaaagaaaggatgtgaacccgttagcaacggcagcacgaaccgaggccaccccagcgttggccgccgcgtatccatgccaatcaggcggcatggatccagggcagccatcgcgtgttgaagctgtcccggcatcgccatgcgtccggccaaccgccggcggcaacgatgggtaataaggcaggagctcaggggagcaggaagaaagaaagaaagaaagagagaaagaaagaggcggagtgaacggcgtgcgtgactcgtgaggaagaagagaagagaagtgtctgtccacgcggcaggggttgagacgtggcggatggctttgtgcttacgtggaggtaactttctttttcttttgtgatgagatggccatcggttttgatggtgggtgggctcgtcaaatgggcttctatgcagtccctattctaatacgaaaagggcccatctaaatggtttactttgaagcccaattcgaagaattcacaggcaggccggtttacattctactaccccagttttggacctctatatcgatccattctcattaggttagggtttttacgccattatcggttctggatctagatgatgtaaaaaagaatccatgcccgaatccgatggaaggggagctagctgttcaagagaggaaggactagacaggagaaaggcgcgcaacttaagttaattaaaatgaacatacactagtaagtacaaaataaaaaaagaagccagatctatttttttgacatctatatatcgtacaaaataaaaaagaagccagatctatttttttgacatctatatatccagatctaggagacaaaagtaatgtatacttgagattagttggtggacatgcatgcatgagatggaatggattacagtagtagaaaagtagcagcagctagctagccaagcagggaaagaaaaccaaatcggcatcacacaggtacagcagagagaacgaaatcaaaatgccaaaagacaactaacatatatataacatatatatagggagtggattctaatccctcgaggggatatcctctcgtataacttttttcttccaaattcgatgcaaatagttgtaaaaaaatctgaaaaaaattgacaatgtagattataatgatacctactagtccaccaaaattcatgttcaaattcgatctacacatcgagaaacaaaaaagaaaaatttagatataaacagtacgctactattcatacgctgaatttgtcttttttatatctcgacgtgtgagttgagtttggacttaagattttgtgaagttgtatatatgtgttgtatgaatgttgtcaaatttttccagaatttttcataaccatttagatggtttttgagcaaacgagggaacatcccctcgagggattagaatagtttcccatatatatacgattgttctacgagggaagaagagggacttaccgttgcaacttgtgcggcacagatcgacgaactgcgtgtgtgcgcttgcgctctccagtccacaacctcgatcgccggcaaagcaaactgtagatcgaggcagatcgatcgacggactgcgtgtgtgcgcttgcgctatctccagtccacaacctcgccggaaaagcaaactgtagatcgcgatgaatggacaagcaaaactttttcaagatgtgttcttggcttcttgcaagaatatatatatatatagtagatctaccaactgatgaaagaaatgatagatgatgcatgcataccgtctgttttgcttgcaacctctcacgagcggagagaagacccggacatctctgcaacctctcacccgcggccagctcctccagtagtgatgagatgagacatgagagagctcgccatggaccggaggtggagaacactggttgttgggggactcaagaacacaggttgctacttgctagggagcattcagtccggccatcgctagctgatgttaatgccaaggagctgcctctagccatgcagactagacttacctgaagatggaaactgcaccactgcccaaaggctgtagagaaaaaagatatggaccaaagaatactaagaatagtactgtgcagaactgcagcagttgccttcaatacagctctccctgcaacacgacatatacgcagcagccttcaactctctccccacaacttcggcgaggataaccgggtatgtaaatatggtgtaaaccttgactctacattcaaaaaacaaaattaattcaaacatgtggacgagatgatattacacaactatatataaacatgcattatcttgtccaaactcggcttcttttgtgagataaaaaataaagaaatttaaaccaagctgatacgatccatctagtgaaacaaagcttccgtttctcatgtctgcgtcattcccaccccagggacgactcgaaaggcaaaaatatgccaccgttgcctccctccctcttcctcctcttcacctcgtccctgcccaagcggctcgtcaacaaagccggacaaccacaaggatagtagcggcggacgctttctccccatggaaacctcaacggctggggtaccatggcccagatctgcgtctcctccactggagttagcgaggagaaccgtggaggaggcggtggcggagtggaagagggcatggaggcggtgcacagtggagtgataggcgacggggtagatggcacggcgacagtgcgtggaggaatggcaggctgcgcgtgggggaggggcctgtgtcgtcgggtttggcatcaccctagccagatctagtgccccgccccccccccctcctctcgtctgcggaggagtggcgggtggcgggggaggagcctacgcggtagtggcgaatctataggcaaccggatctaggtcccgctccggatttcgctaggagcggcgggatgtcgccacggccggtgactgcgggtgcggcgacgacaaggagggcagcgtggctggcaatggtggagctttgaagtggtggcgacgggtgcaagagtgggtgctgtaggcaaaagtctagcttggagggtttcctgagccgacaacaacgacttcttcgggcgtcgtgactctccttggggcgttatcgagcggccacacttcccctctctagcaggactctccgagtgaaaacctagtccggtaggacgggcaacgatggcatctatgacgtcatgacctccctgtagccattgcctagaaggtctttgttcctcgccgttgtcatcttctctcggtttggtcgtcaacggttatagattgccctcatcaggttggagtgagggacgagtggatctccttctctctcgccctctccctctcctcaacccctctacatgaggataatccagagctcatcgatgatcttctgtgtggagtcgatgttcggtgggttgtttgcgactaccttataggtttagcggtgattggcttggtgctagcttgttctcctaggatgtgcaaagagctaccagcttgcagtggccgtgtgtttgttttttttcggctacaattaattttctaagattgtaatcttataatattttcttgcttcatcaatatgaaaccttgcaactgtcttggtcatttgaagaaacaaatttcaaaccaaaaaattgtcctaatgatttttttttcaaaatttgttgcttttatatctcagaaatgaggtcgagtttgtacgagatttacatggttatgtaactatcatcttatccatatgtgtgagtttttgttgaatttagataactttttgttagagtttacaatagttttcacctaagttaaggttccatcgtatatttacccaagatcactagctgaccagccccacctataataatgaaatgaaaagaaatgtagccagtcactagctgaactttttgttaaaattgtcaattaaacaatataaggggagtagatgactgtgtgtatcgacagtgtataaggggagtattactttcaagtttgaactggctaggcgttgatagctaaatttggtacaggttttgttcggttattagtcaaacaattagccgaatgaatttttttggagtaaagttaccgtcgtttcgagttttttttcctttcctttctttgtttttcttccttccttggtataggccggtctggctgagtgcgtcgtgtatcaaaactctattcttctaatttttttttagagaagggtattttctacccagcctctatgtccaaccagatatatacggccattgagatagagaacttagccccgcaaacaacccaatctgaattttgctccataggagatttgaactcaggaccttagggagaagggtattttctacccagcctctatgtccaaccagatatatacggccattgagatagagaacttagccccgcaaacaacccaatctgaattttgctccataggagatttgaactcaggaccttagggtactacttaggtcactgtaaccactaggctacatgcccttttgtctattcttctaatatattgacgtgtaatcattttgcgcgttcgcgaaaaaaaatgaaattttttggcttattatcgatttggttgttagcagatagttgttttggtgttaattaaatagatgcgatgacactatatatatagtcctaactgcccgaactaatcgatattgactacttattgttactgaggacatgctattatactgttacatgggatgcatgtaaacggtctgacaacagtctcgcccatttccataacgatatatctttcgtatacagaatctataacgtagagctggaaaaaaattagtactgaaattaaatatcagaaaattagaaatagaactatacggatgaaaatgtgtcggtatcaacccggaaccggtaactgctgtcgaaaacatgaaactgcaaaatcatcacatatttagttcaccataactatataatatgactgtaaattaattaaaacttacaccacataataaattacaacctatatctctgttttagccgtgtaattaattacattaggaatttggttaaaaagttgattgacttttacactttgggtgaaacagatgcatgaccatataggtattagaaatacggcaattacaatattgtagaaatggtaatttccgcagaaacacagtaattatagtattgtaaaaatggtaatttccatgcatagaaatatggttgaatatgaaaacggttggtaaaacaacaaatcatttccatttttttaccatttttgttttttttgtcggtttaccatttctatttctgtatgggtcggtcggtagaaaaagaaaataagcgcgtccataaattcgggatattctaggtgcggtcaacgggtcaaggttgaagagaaaacaagagtatatggggtagccaagagccaaaagctgttgagagtgcatctgtgcatggaaaggcatcgaagagaagtatggccgatatatcgatcgatcaggacgatgtactgcgaacgggacgacatgcacgctatatatatatttttttcttccacgtatttatacttatttatgctgcgtcattacaacaataatcgaaaatattacgggattggagaagatatccctaaacacaatctatctacacgtagggtacttgggtgtgtttgtcgtgttttcgatcttttgctgtcattttttccttctcttcgtttttgttcgtctcggtctaggcggctatacccttttttttaagaaaaaataacaaaattgttatgtacatatttacaagagaaaattcacacaaaatttagtcgttttaagaaaattcaaacggtcaacttgtaggcaattaacagtatgggtatggagaggatcaaaataaaaactcagtatcatatagaggacgaggaaaaattcatagacacgaaagagattgagtgaaaattcatgagtaagttagaaattttatctatttaccataatttataactctctccggatttataatacttaactttaaccactattttctataataataataataatatatgaaaatatcaactaatatatgattttattgaagtactttttagactaatctatccatatggtctccatttctaaaacaggtattttagaaattatttatagtcaaagattttaaaatgtgacatcaggcctatgcaaaacaacgagtattatcaacatacagagagagctatgttatggaagacaaattacgtttgtcagaccaaaaattaccgttcatcgattaattggaattatgtagaaatttgacgttcgcaaatatgtgtatacactttataatattatgcacttatttgaatatgtaaatgtgtataactatataaattgaatatattcacgttgttttttaattgaacaggaataacttaacattaacttaaaatatatactccctccatactcgtattagaagtcgtttagaataatgtttaagtcaaaccttggaaatataaatcatgaataactctcaagttgttgagttagaaaatgtaaaaattatatgaatagatttgtcttgaaaactactttcgtaaaagtatacatatatcacttttcaataaatatttttatagaaacaagaagtcaaagttatgttttggtgaccgtgttactgttcaaaacgacttcctttacgagtacggagggagtagcttccaacgtcgcatttatacaccaaacattgacatgtttggtcatattgaataagtaaaactaaagagtatgttaaaaataaaacgctaaacaaagtcctaaaagactactttaggtcatcatcaagtacaacatacgggtgattattcggacgattaaacggagaatatggtcgattaatcactaaattaaaacagagttttgacgttcatgaataacaaatgtggatcgtatcacattaaccgaatggatttgctgtcgttacagtatatatatacggcttttttccactacactggtagggagtatactttagcacatgccatctttttctttttactaataatgtttacaaattgaaaggtttgaaagtaaaatataatatttggtgtcattatgatgaccctgctcttttccgattctggactttggatttttttttctctttacaagatgtcaaacttttagtgttgcatccctgtaaaatttttataggaacacttttctaaacaactacaattaatttatttatttatatttggggcctgttcactttagtgccattttcaaccttaccaaattttggtaaagttgcccaaaaagtggctatatttagtttgctgccaaattttggtacctatataagaaatcctgtcaaaattttgacaagtcaccaaaattttagcatagttaccaaaattttggtaaggtttttttttttcaacaaagtgaacagcccttggattctctctttgggctggttggggcgccagccccacctccataatcccctgcctcttgttagctaccaatgactaaacatgattagcaaaagctagttgtatggcaaggatacagagcgctagctgtctcactgcttcatgctagtgcccagagttgcaaataagaaaaataagtacaccatatacctcgatttttcacaaattttgttatatgtcaagtaatatgtttttttcattacatgcgtataggtctcttaggaacaatatcgagttgacaaaagctagttgttttagtcatctgatatttttaccacctcaattcatattctggattcgccactgtttatatccataaatagcaatcacaaaaaatagtttggccatcaatcgtcgtactatctcaaacggagcgaaaaatggagggcttggaaaaaaccgaaacatatttccatggcctgagcaaggtgcttgctgtctgtgcccggacgggaagctctccggaattctagcatccaaacattagcccttggcccgcaaagatatcaccggggcccagcattgtgcagacagcaaagatgcaaaagctgctccctacaagacgacacactctctgcaagactggacacacacactctctctcactctctctccctctcctttgcaatagtctttgttctcatctctcgtgttgctgcgactacacttttgcaaatctctcccgtgtctgtagacccctctcgcgtaaccagattatttctttatcaaacccaaaattcgagtctcacgtcaataaatttaatttagaccaaacccaaaatgtctttgtgtggagtatgaaatggagagagtaacactaagtacattataccgataaccattggtgtatatattagcaaaatccagcaaaattgaggtgacactagggaaaaattccccaagaaaatatccaaaagacaaaggtaattaagtcgagcaagcacttattgagatcacatgtttcttctgcagtgaccaaatactcaattcttataaattcagtactcctattttctatcctaactacaaattccaagctcatcaaagcagggctcagagtttggctctacaagtcatttttcagtttctcaagttacataagggcatccttaatattgagccacacaataaccataagataaaacccacatatcttttgcttaattatagtcaatgttacaatggtttaagttcttctgtttaccttctggctagctctaagcttaaggttagccataacaatattctcttctaaacacacatttctatacacaaagttgtactaatatttattgcttataaacacacctttacatgcacattggagatgccctagcattcactaaattatcttccccaggtaagagcaggtacaataagtctagtcagcaggctccaaaatattccatgtcagcatattcttaggtggaaggagaataactgaagagagagattgaagtgggcgactatttaagcgcccggcgatagcacgtgtcgcacgataaaaaatacattttgtgggtcccgcaaccaccctcatcggtatagatggccaaaaggctcgaggcccgacggcccggcccatggcacgatattttggctcggcccaagcacggcatggcccgacggaggtcgggcccgtgccggcccgggccgaccactgggccgtgcctgggcccctccaccggcacgttggctcggcacggcccggccgggccggcccggcacgatgggccggcacgatgggccggcagctaggcccgatacacagaaaaaataggggagtaaaaatagacatattatatgccatgaacgaaagaatagggatctaaaatagacttttttttatctatacatatgtcagccgaagaggagggacagacaatagacttattttagctatacatatgtcagcccaaagaggagggacggaaaatagacttattttagctatacatatgaaatagcccaaagaggaggaacaaaaatagacttaatttaaaaaggcccgatgggccacctatgccttcgggccggcacggcacggcccgacagctggtgggccgtgcctgggcaggaggtgcagcccatgggccggcacggcccggcacgaagtgcctatcaggccgtgccggcccgatgactgctgggccgtgcccagccgtgcctgggccgggccgtgccgggcaggccctttggctatctatactcatcggatctcatgtctcatacttgtgttcccacctatgttctgcttttcgccttttccttctccgctccggcgtgcgccgatgtgcttggttcctcgccggaatgttggccagcgtcacgtcactacaccggcaatgattcaccccaggagagttcgagagctccaccagctgatttcgagctcgcgctgatcgacctcatgcacgcgaaccgacgcccttgccgctgggtcgatcttctctcggcacgaatcaagcttctcaaacctcaaaatcgagttcttgctgctggggtcgacgccctcccttccgaactgaagcgaatcgatgtatggatggagctccttaatctgtgactcgacataacccaccgctcggtttgctctggtatgaatcagccattgcctagctgcaaaacccatctttcttctttgctattctcttgtttttttttcttttctctcatttttgcttccgtgtgaatggagatggataaaaggataaaccaccagtcattttcttttagttgctgtttctggtgttgatttcaatctaaagctgtgcgggagatgagctaggaaagcaaaaaccaaactctttctttttcttcatcggtagactactcacgctcatgacagcacaaatggctacaaagatggagtacattcttgatcgtactgtgtatccaaaattaattgtttaatagcttctatgtagttagcacaatagccaatctattgtattagttagctttacactaactgtaaaatgacgtggcatttggtaccgtcagcggtgggctatactattgaccttgctctaactagtcttgctgtacatcttcaagccatcctccagcggacaaccttaaattcaacacatttgtcgatgcttaaggggtaaaatctagagattaaaacaagcaaagtaggacaattgtacagtggtttagagaagtatacctttcctgaatcgacagaaaactttaagggtaaggtaattgtctcctcacatggaccttcaatgtcatgtacttccaactacacaaggaagacagttctgctgattattttttaccaatttttttcaaaaaaaaaagtggcatttttgttattgtgtaataccataccttgagaaccatcgactttttcatcccctgcaggtatctccaaccaagagaaaggagataaccttcgatctgttccagaattttaaaaatagaaatcacaacacatttgtattattcttgacaaatattgatttatattaaactattacttgagaccagaattcatttcacctcaggcaaactagtcccgcactcgttctcaaaaaagatcacgtcaccccgtctaacaccgagatgctcaagagcagaatcatcagctatgcgtttaacaataaagccaccattgatgttatgtttcacagagagctcctcccggagtgacacaccagctagttccacacttcttaaatccacgtcaaacacagggcgggcaacacagctacagataagatggattcagtcaattagtagacaatgagcatacagatatgatggatttagtctatagtagaaaatgagcgctacagataagatggacttagtctattaggagaaaatgagcgcgcatgttggcgcaccaaccacttttgtaggccatgtttattatttagcaaattgaattttaaaacttaattttaagttgattttaggtgttttttcgtagttttttcagcattggcttttaaaatcgctaataacatagtagatataaaagatttatccataaacattcaattaataagaatatatcgtgattcagtgggtttacgtgccacatagaaattgctcgattttgattcaatctgtagtatattttaatactgatggaaaaagagtatatacctgaattgcttccacatctcaaagaaggtgcaaataattgagattgaaatgataattgcaccagggccggctctgtataccatagcaatggtactaccacaactgtcaactacaggccctccaacaccaccctgcattaattaaaaaataaataaataccactaagtagaaggtaaaacaaatagcaagtgtgaagaaaaggtaaatgtatcagtacctcaggaacatcacaatccacaaacatgtaatggtttctccacatgaaagaaccatccgaccacgtgattgctccacgcctcgccaccagggacatattttcatcccgagacaaggcaagaattttctggccatactttggggcggacccaaaagcagggacctgcaatggtaggtcagacgtgatctccaagatggagagattgtagtggcgattcatgaatatcaaccgtccctgcacaatagacttatctgcaagatgaacctgcagctgaaagatagagagagaaggcaatgcgagaaaaagaaaggttaatggaagatagagagagaaggcaatgcgagaaaaagaaaggttaatggttactcatcttaagcacaagagacggaactcatgctaaggatatacaagaaaaggccatcaatttgacaatgataacgcttgagaattgaaatcagagggcacattaaaattcacacaaagcaaatgcacagcagcccagctacggttagcaatcacttgaccatactatacttaacaaaaatggtaatggaactcggatgatagaaacatggggattgcctaatggaaatcggtgttctacacttgcaccaagaaattaaagaaattggcaggcatgaaaagtcatttttagcaattgggttagcccctacttaataagaacagttatggaactcggatgatggtaacatggggattagctaagacatgcacctcgggttggggctcatgcggcttctttttgaagtaagtggagagcgtgacgatcatagcacgcttggtggctccatcccaactgacgacgaatccggtgcgcggagagatcaattttccctctgaaaaacattcagttgattagcaggtagctacatagctaggagccgataaatacatattttgtattgggctactaaatacactaaacaacacatatttccatttgttgttggactacacatgtctatctcggtagctttcttttatatcaccggcttttcccttaacatctgcagctagtttagcacaaaatccacggtaattcccatgtggagatgcagcatgattttctcatgtaatgctagatagggaatgcgtaaaacaacgcaattaaccacacgtgacatgctagcagcctagcacatggctcacttagtagctaagttagcagtaaatacagtagattcaggcagtaaaatctgaatatgcctccaaacttgtactaagatgttgtccataggttaccatatttttgggacggatggagtaaattaccagaaggtggggatgaaacgcggacaattgagcgagacatgcccaacaccatgttcttgtcggagggggtaggcaaggcggccgcggtggagggatcatctttcttatcgcgccagagagttagcttctgaagtcgatcaactgaagaagaagcagaaatggggagaaattaacatggttaataataggtatacaagaaattaaaacaagaagaagaaattaacagtggtggggagaggatcgatgacgacggatcgagagctaaaaaccttcgagccggacgatgcgggagctttttctgacgcggggtgtcgtcggcgggtggatcggcgggagtggccgggacgccaaggtgccatgcccctccctgtgcatcacacccgtcgtcgccgtcgtcgaagtcgtcgtcgtcgccgccggcgactcctcctcgatccttctcttcttcttgctcgaagacactcccgccgactcctccaacaccttcgctctggagcgagtcagcctcccggacgacgatctgggactgtcgtcgtgctcggcgagatcggaatccggcttcgatttggaccgagtcgacctcgccgccggcgacgatttgggaccgccgctcgaggccgccaccgatttcctccgtttgggggacatggccgccttcccgccacaccaatcgccgccgctagggttttctttagatcctcataccgctcgagtcggattccttttcttttcttttgcctgttactgtaggagtatttattagtggaataagttcactttaggtccctcagtttgtcaccaagttcgaaattcatccctgcaccgcaaaaccagatacaacgcacccctcagcttacaaaaccaatgaaaaggaggtccctcgtcagtattgtcttccggttttggttctttgtcttacgtggtattgatgtggcgcttatgtgacaattggatcgaaaaaataataaaactactagggcccacaaatcgttgtcaaccaccgtcgcacccgccacagctaccacgctcgtcggcgaccgctcgatctcctcttccggccacctctgccgttgctgctccctcctcctcccgccatcgcttcgcccacggtccgccggcatgctccggctgttgcgcgctccgctctgccggcctgctccctctgcccccgcctccatgcccagctctgcccactttgagggatataataggttggaatgatcctatatattgtttggatggagggatgaaggtgggatgcctggatcaatatattcgcatatgcgcatggtaagttgatcaatatattcttccacaatatagtagctctctttctatcatttttgttgcatgaatcctaaaataatatatgcttaatcactaaaacacatattgttatttttattgttttattttcattatcagatatcgccgtagcgttagcacgggcgtattactggttgcaattagttggggaggttaccccctagtatacatattgcaaaataatactccatccattccataatataaggcacaaccacttttttttagatgttccataatgggagaatagccactatggtccctgaagtttcgctctgagatcattttagtccttgacctttcaaattgtccaagcaagccttaaactttatcatgtggacatatacagtccttggcccatcgaaaattgccacgtgggtatgccatgtcatcttccaatgcaaatatatgatgaaatacccaatttgcccttacacatatcgtcatagggaaataagagagaaagaaaaggagaataataataataataaagaagtaggtgatcctgcatattaaatatccgttagagttttaacattgaaatgcaactactcacatgaaatttatttggcatgataattatatatttagtggttgttgctaatttaactttgtattagcataatccggtgaaaaaaagtttgccatatatccagtcgcattgaataaagtttgtaaattcttttcattatttttgtatggtacatggaagggtaaattggacatttcaccatatattttgcatgagagcataacatggcatgctcatgtggcaatttaagtgggcccaaggactatattagcccacatgacaaattataaggactcgtttggacaatataaaaggttagggaccaaattgatcctagagcaaaacttcaaggatcatgttggctattctcccttccataatataaggcatgcatgcatgcatgccattaactatgacatattctccattaattactacttttttaaatccttcactctcacgttctctaactctattggatgtatgcattatatttattaggatgatccaaactacaagatgataattattatttcttggtttttggatgaaggatggttgtgccttatattttggaatggaggaagtacttagtcatgaacaccacactatttgcaaatataaagtgaattgcgtctggtaacaaacaatcaagctccataagttatatagaaaatatgagtcaattgtacccacggtacaacaacttagtaggtgggtgcaatataatgcaaaaacttgagaattaaatatctgagtgcaacaacttgataagtgtgtgcgttctactacgagaacttgacaatttaatattttggtgcatcaacttggctaagcatatgctatgtgagttttttcatgatgtcaaaatgccattgcataagaatcctacggatattaccttaaatattgaatttattctttaagaattatgctgcatatacaattttttttcatgggcttcttcatcagactaatcacttgcttatacactcaataagcgcattagtcccttaatcgtttgtcatcaattaaccaaaacccactaggagcatagatgatctttcacaaaccacatataataatagcaaagatgtattaagtcttttttcctattactaagctaagcatgtattaagtctttgattcatgtaccaacgtcttgattccaattatttatttattccgttcgaatttcaatcatgatgtttgatccttcgttcactgccacataaatgatttttttaaggcccatatacatttcaggctgaccgtaactggtggcgcctgcaaaaatcgatctctattttcgcaatatggcttcttaaaagtcccgcatgcaactctatttcgcaagtggacctcttaaagagccatatgcaaaaataagcctatttttctaggcgggtctcttaaacaaccacatgagaaaatgtattttcggaagcccggcctcttaaaggtctacctagaagtcggacttacctcctccttttccttccgacacttcattttttttagggtaatttggaaccatgccattataattttgcaaagtttgagatatgacatcggtatctcaatgacatgtaggacccacatgagttaatgacacgtgggttaggatggcatatctcaaattttgcaaaataataatggcatggttccaattttccctttttttaagtcatcatccttatctcctctcctcatattattgcaaactcctctctctctctctctcttctcattgaaaggcgccaattggatagatttgatatgatagtatctaaatcaatttcaagtgctttgtaaattcagtactctggtgaacattcttctaaatctgttgttgactacgcctttcttcttttatattatttttactccccatttttatattataagtcgttttgggttggtcctatagtcaatttttttaagtttgacaaaatttatagaaaagatatcaacattttcaacataatacaaatacactataaaaacatattcaatgatgaatttaataaaactaatttggtgttgtagatgttatttctttctataaatttgatcaaactttaataagtttgacatagatcagacccaaatgtcttttagtataagacggagggatgacacgaagtaaattatactgataaatcat

SEQ ID NO: 6502 - DNA, 19368 bp, Oryza sativa
ctaaaaaccggtgcaaattgactatttcggtggtttgggaagacaaaacaggttgaccgtggtcagacttgctgatcagcataggctaccgtagaactcacatgtcaacgcccactcttcttctaccctctctttcttctcttttactcccaaccaagccaagcagtatgggaggtggccacggtgagcccctcggagcacgttcgcctatccaccatcgttcttgtagctcggagaggcctctccgtctcaacaccgtcatcccttgatccagttttcatagttgagcgagtctctgtacctgattttgcaattgagggatacgattcgacgagtacaatagttgagggagctaaattagactaattctcaattaatatagctcagtgatgtcaaaatatgcaaaagtccaaccatcgagtcactcctctattggcccgtcttccattttttattttagcacaacaaatttgatcttttttccttttatgcatttatataattggaaatttggaattacatttttaattttttttgttcctgttacatttttaatttttaattaaatgtaatatcaacacggtgcaatacaataacttttaagttaaatagaagttcattttctccactaggatacttaaagaattttgagtatattttttttataactatcgtataataatatctgtaactttgtgttcattcatcaaaatatggttttatattaagactatgctattcactagaaaaatttgagagtgtacatcctgaaagtatgataacaagagagattttctatcattttgtttacgtttgggccaattattttcctcttagagattataagagattcaagtgcgatttttgcagaagtccctagaaaataaatgtcatatactaaaatttatatagaataaaatgctttacctataaaatactgttttagtagagagagagagagagagagagagagagagagagagagagagagtaactgagtcatctataaataactcgtatggaattacctagctatgcacaattttgtccaatgtcaaaaacatctcctatggaattacctacgcacattgttgtctaatgtcaaaataactcctacgctatcatatcgttttcgttttccatcgttgtcacgctgtcaattttgcaggcctgcaaaaactactagagtacaaaagttaaaactattttttcaccatggatggatggatagatttatatatgcaagtcctccaagatgtataccagtccaaaccaaaaactccaactcgcaatattaattcacactgaaaaatttggggaagattcaatatataatttccactcttttaatttaatttcctatctaatcttgactgattcccgtttcaactggagaggagatgggagtagatgcacggtgccacaatcgcgaaacgtgaataatgaaacgagcgaagaagttaggcagactgaaggccatatgagtatatgacatacacacgtgacgtcgggtacaatatactccctccgtcccaaaaaaaaaacaaaccctgggtttgcgtgtccaactttgactgtccgtcttatatgaaatttttttataattcgtatttttattgttgttagatgataaaacatgattaatactttatgtgtgacttgtctttttaattttttttcataattttttaaataagacggacggtcaaaaattgggcacggaaaccagggtttgtctttttttttgggacggagggagtacaaagtaaaatttgacgagaggcaaggaccccacttgtcatacactaaatccaccctggtatacatgacactaaaagtaggcaaggaccccacttgtcatacagtaagggctcatttgaatcgcaggaatgaaaaaacacaggattctgataggaatacaattgtaaaacagagaatttgtaaaacacaggaaaaacacaggaatggccgtttgattggaccacagaaaaaacataggaatctgatgggagagatagatagactcagaggaaatgttccaagaggttagacctcttgctaactttcctccaaaatatgcataagattacccattccatagaaattttaaaggattggataggattcaatcctttgtttcaaagaccttcgtaggatttttttttccataggattgaaatcctccaaaattcctacattttttctacaaatcaaaggtgccataaatccaccctggtatacatgacactgaaagtatatattaattatatgatagcaatagattttctatcgttttctttacaatgtcatggaggttgaactttcaactaaagtgatattacctcgtcaaagaaaaagtgatatcacctccatctcaaaatattgcaacccggatctggacagatatctagatttattatagtaggaacaaattacatcctaaattacaatattttggaatggaggaagtaataagagtaatttgaaagtgtgtggaaaaggaaactttagctctttatgtgcggaacgcagcctaactacctaagtagacactacaggaatattggcacgcatgttcaaaaaataataaatatggtacctgtgaaaaacagacttttaatagacaatgagagagataggtaactgagtcatctctaatttctaactcccatggaattactagagaagccaaacaaactgcctctaatgtcaatcagtttcgctttccatccttctcatgctgtcaatttatcagtcaatcacactacaaaattaacataatctcttttttttttcttcaccatggacgatggatatatagatagatagatatatttatccgagtcctccaagaacaccaaacgagaagctccaagctcgcaataattcaccaagaatcgcaccacttttcaccttttcttctcctcctccatttccatccatggcgacgctgctgctgctgctgcacacggcgcaacagtgagctatagctagagctcggcaccacgggttagcaatggcggtggcggcggcggcggcggcgaggcggcgagatgtctcttgtcttctcctcctcctgtgcttcagctcgtcaatggcggcgaccggcggcggcggcggcggcggcgagcaggaggctgacagggtggcgcggctcccggggcagccggcgagccccgccgtgtcgcagttcgccggctacgtcggcgtcgacgagcggcacggcagggcgctgttctactggttcttcgaggcgcaggcgtcgccggcgccggagaagaagccgctgctcctctggctcaatggaggtctcgatcgcttctgctttttttttttctaaaaaaaaagaatttgctgcagtaaaagctctgttaaatgttaatcggttaaaaattctgttagttaagtaagtaattactcctagtaaaaactacagtttctgtttgttcttttgtgtgtgcgatatgaaaaattcagatattttctcttgggtatttgttctgtggagtacttgtcgtttatgtttgtttagttttgagatgaggtttcaggttaaatttgtgatcattggttaatctgaacttctgaagagctgcttattgattttttttctttcaactgatcatattgcataaatataaataaataaatgattgttgcatgcaacatttatgttctttcttgatggttaattaggaatatttttttttctaaatggtttgttaattttgttcttggttttgtcaggacctggttgctcttccattggctatggtgctgcatcagagctagggcctctcagagttgcaagacaaggagcagcactagagttcaaccagtatggctggaacaaaggtgcagagtttattttgtttcctttaattcctgaattatttaaatatttttcatgcttaacatcactgacatttgtctttagtataattctgaaaacattttttttgtgctataaaattggtctttgccagaggctaacctcctgttcttggagtctcctgttggggtcggcttctcctacaccaacacatcctctgacctctccaatcttaatgatgattttgtaggtaattaagctgattgtaaaatgatactctagtttgcttggccatctacaggtgatctgaatttcgattgccttgtaataatgattagaagtgtaattttgtggcatcctttttttttttgttgcagctgaggatgcttatagtttcctggtgaactggttcaagagatttcctcagtacaaggacaatgagttctacatctcaggggagagctatgcaggtaaactcatttcagaaatgaaaccggtaaattttctaatcagttttgtatggtctaacattcagaattcttcattttcatcaagaaattaaaagatttcctaaccgcaacatattacaaaatctggtgtgagacatttttctcatttgttctcatgtggatgtaaacatgtccaagatgccttcctttcaagattccagttatctaatcaaaatggaaggcagcatcccaatccttgaccaaaattttcttatcgtttgctttcacaatatctcaaggattgtatgtatcgaattatgttagtgtcaccatcttatctgaaaccagaacttccactgaagaaaaaaatcatcactgactttatagaactagctgacacctatcatgagttcatgacagctcttagttcagcaatcatccccttagcaagcaaacaaaagatcatacttttaatggtgaaagtgtcagatcaggaaccaagtctctaaaataatataaggtttagtttcagccttctcaaatattcctgaagtacaatattctcagagtcatctgattgttcagaattcagaagaaatttatgtagaattcagtaaaagatgacctgcttaaacaaaaggtagaatgatttcagttgttacttgcatttatgtattgaggacagaaattataccgatgccatccgaactgatagattttctctgcttgaaacaaagtttgagtttttggattgtaatattggtccattagatctctgaacatatgtccctgaaagaatgaccaaagcatcagtggtaggttcacgggctacattgggcttctttcacaatccacatgctgtggaccagaagatgctctgcaaaaaaagcttttgttctgcacatcatgcaagatgaatctcaatctgaacttttcctgtgcaatgtccctgttatacaggtcactatgtgccccaacttgctgaccttgtctatgagaggaacaaagacaaaagggccagcacatatatcaacctcaaggggttcattgtgagaatttcttgaattgctttcagtaattattgttatggttttgccaaaaagttcttttatgtgaaatgtgctcatgtataagaaaccatatacaaacttagaaagtagaaagaactgtttactctcaccgtttcatattgcttgtcattttagctttgtcttaagtcaaacattccttacaacttacgccataaacttttactcataagatttatgtttttagattgaacaaaagaaatactttcataatatataattcacatgttcttaaactatatgaatttacagaaattgatggtcaaagttaggtatattcgacttaggacaaaactaaaacgacaagtaatttgaaacggagggagtattttgaacaatagtttctcagttgtaatgctcacaggaacacccaattggaacacgattaacttccatttaaaccatcctaaactcataaaattggttcctgcatgaacataacagtcaaaaaatctgcttgcaggtaggcaaccctctcaccgatgattactatgattcaaaaggtttggctgagtatgcctggagccatgcaattgtgtcggatcaagtttacgagcgcatcaagaaaacttgcaacttcaagaactccaactggactgacgattgcaatgctgcaatgaacataatcttcagtcagtacaatcagatagatatatacaacatttatgccccaaagtgccttctaaacagtacttcagcatcttcacctgatcgtgcattcttcgcaaataaccaggtaaaactgatccatatgcaaaaaaaaggataaagtttcattctggaccctcttctgaaattcatgcatttctgtgttttgacaggaacaattcaggtggagaatcaagatgttttcaggctatgatccatgctactcatcctatgctgaggactacttcaataagcatgatgtgcaagaagcattccatgcaaatgccagtggactgcttccagggaagtggcaagtttgcaggtgaattagcccaaagatttttcagttttatatttcaatgtattagccattaattcttttagcttgacaggaagctgagctcatccatttctttttgcagtgaccaaatcctcaactcttacaatttctcagtactttccatcctacctatatactccaagctcatcaaagcagggctgagagtttggctctacaggtttgcctcatcttaatcttagacctgttcaattaaatccatttttcagttttttttatcattcacctcagatcttccccattatcctccatactacagttcttgtacagtttctctgaaaccttgaaattactgttcaaatatattggtagtaatatgcatctacataaaaaatatgcaacaatgccctacaatttacctgaatcagtctctgttcatcaaagcagcggtgatgctgacggcagggtcccggttatcagttctcggtactgcgtggaagcactcggcctaccgatcaagaccgattggcaatcttggtaccttgacaagcaggtctgcaaaccagaagctgaactgaacatcaatacatcatgtgatttgacttgtatacatgctgaaacatggagcaaaatatttcaatttgcaggttgctgggaggtttgtggagtaccatggaatgacaatggtgactgtcagaggggcaggtcacctggttcccctcaacaaacctgctgaagggcttatgctgataaatgcattccttcatggtgagaagcttccgacaagcagatgatatgcgctgctgatgaagctttggaggtacaagatggcatgagatacaggcatggacatcaattttcattgaaaggcgccaatcggatagatttgatatggtagtatccaaatcaatttcaagtgcgccgtaaattcagtactctgttgaacattcttttaaatctgttgttgactatgactttcttcttttgtgttttttttactcaccttttccatattataagtcgttttgggtttgtcctataatcaaactttttaagtctgacagtttatagaaaaataaagtaacattttcaacataataaaaatacactataaaaacatattcaatggtggatttaatgaaactaatttggtattgtagattttatttctttctgtaaacttggtcaaactttaataagtttgacatatatcaaagtatcaaaccgaaaatgtcttgtagtataaaacagagggagtgacacttagtgaattataccgatatgtattggcagaattcagcaaagtttaggtgacaccagggaagaatgccccaacaaaagatccaaaagacaacagtaagtcgagcaagtaggatatcacccgtttcttctgccttgaccaaattctcaactcttgaaatttctcactactttccatcgtacctacatattccaagctcatcaaagcagggctgagagtttggctatataggtttacatcatcttaatcttagatcagtcaattgaagtcatttttcagttttttttttatcatgcacctcaaatcttccccattatcctgcacagtacagtttctgtacagcttctctgaaatcttacagttaactgttcaaatatattggcaatatgcatatataatccaaaatatctaacaataacatacaatttacttgaatcagtctctgttcatcaaagcagctgaaatgaacatcaatgaattgactattagtattcatgctgaaacatgcagcaaaacattgcaatggtgacagtcagaggggcaagttaccaagtttataggctgctttcttctggaacggttgcgatcttctcccccacacacgcaaaacagagcaagtaattacgcatttgttataaacagctttcctacagatttttttttgtgcaaaaaacacaacgtttagcggtttgaaaagcatgcacgtggaaaacaatggagtagatggcatgagatatactactaggcaacattgtataggtggcaagagatacaggcaagaacacggggacatgaacaccaaacttcgttcaaaaaggaccaatcgggctgaatatatatgacagtcgttcatatgaatattagcagttcagccaaaattaggtaacatcctaggttaaacgccccgacagaagtcatcaagtcaaagaacactcgaattacataacattcactaaattatcctctccaggtaacttcagtcttgctgtacatcctcaagccatcctccgtcaggcaacctaaaattcaacacatttatcgctgcttaaggggtaaaatctaggtattaaaacaagcaaagtagaacaattgtacaatagtttagagaagtttacctttcctgagctgactttaaattctaagggtaaggtaattgtctccttgcatgtaccttcaatgtcatgtacttccaactacacaagaaaagtaattttgctaattatttttccccaattttgtaaaataaataagtaatattttttgttattatataatatcagaccttgagaaccatcgacctcttctcacccaggtatctccgaccaagatgaaggagataatcttctatctgttcacgaattttaaaaatagaaatcacaacacatttgtattattcttgcataatattgattacttgagacaagaattcatttcacctcaggcaacatagtcccgcacttatcctcaaaaaagatcacgtcaccccgtctaacaccgagattttcaagagcagaatcattggctatgtgttcaacaataaagccaccttcgatgttatgtttcagagagagctcctcccggagtgagaaactagctagttccacactttttaaatccatgtcaaacacagggcgggcaacacagctacaaataagatggatttagtctattagaagaaaatgagtgctagtgataagatggatttactctattagtagaaaatgagtgcgcatgttggtgcgccgaccactttatagcccttgtatattatttagcaaattgaattttaagacttaattttaattgattttaggtattttttaatcatggattactttccagcatttgctttttcgaaccgctaataacatagatataaaagatttatccataaaactaataagaatatatcgtgattagtgggtttacgtgctagataaactttttaactttgagaaattgctcaagacgatattatgggaaaatgacatctaaaaagttagtgccatttccataatatagatagtttcacatgtacataacataatctgtattaggaggaaatacatatcctaaaacaaatgtcttagattgccaatttctatccatcattttgtagtgaaattacatgctactacttacactgctcatctagttccctgtttattgttttcttcatacaggctactactatacccgtatgtagtgtagtggttttatccaaatatttttcaatggttgcaacataatccttgcttccaattttcttttggcatttaaacatacaatattatcgtaatgaagttaatttcttcgattttgattcaaacggcggtacattttagtactgatggaataaagaaatttaatactgatggagaaagagtatatacctaaattgctcccacatctcatacaaggcatgaataattgagattgaaatgattgctgcacaagggccgtctctgtatactacagcaatgatactaccacagtagtcaaccacaggccctccttcaccaccctgcattaattaaaaaaataaataaataccactaagtagaaggtaaaataaatagcaagtgtgaagaaaaggtatttacctcaggaacatcacaatccagaaacatgtaatggtttctccacatcaaagaaccatccgaccaggtgattgctccacgcctcgccaccagggacatattttcatcccgagacaaggcaagaatttcttggccatactttgctgctgacccaaaagtggggacctgcaatggtaggtcagacgtgatctccaagatggcaagactgtagtggcgattcacgaatatcaaccgtccctgcacgatagacttatctgggagatgaacccatagctgaaagatagagagagcaggcaatgggagaaaaaaaaggttaatgccatattgttactcattttaagcacaagaaacagaattaatactaaggatatacaagaaaaggcctgacaatgaaaatgtttgagaattgaaatcagagggctgagtaaagttcgcacaaagcaaatgcacggcagcccagctaccgttagcaattacttgaccatacttaataaaaatggcaatggaactcggatgatagaaacatggggattagctaatggaaatcggtgttctacacttggaccaagaaattaaagaaactggcaggcatgaagagtcatttttagcaattgggtttgcccctacttaacaagaacaataatggaactcggatgatagaaacatggggattagctaatggaaatcggtgtcctgcacatgccccaagaaatttaaagaaatatacaggcattgtaagagtcatttatagaaactgaattgaacatgatggttaataataacagattacacacatatagaagccacagtatatatatacagaagctgcaggaaaagaagcctgcacctcgggttggggctcatgcggcttactcttgaagtcagtggagtagatcgtgaggatcatagcacgcttggtggctccatcccaactgatgacggtgccggtgagaggagagataaattttccctctgaaaaacatccggttgattagcaggtagctacatacatagctagaagttgatataaattcatattttgtatcgggctactactaaatacatattttccctttcgttgcaattcgaactagacattgtctatctcgcctacagctaattaagtttgatcgatgactagattagcactacatccatggttaccatgggagtagagagcagcaataattttctgattttgactgcataagtagatcgatcaatctatcagacagtaaagtgggttgactcagttgaattagaagtagatgttaattaccagtcggtggagatgaaacacggacgattgagcgagacatgcccaacaccatcttcttgtcagagggggtgggcatggcggccgcggtggagggctcgtcttccgcatcccggagagttgccttccgaagtcgatcaactgaagaagatgaagaagagaaaaaaaatataggtactcaaaaaaattggggaagaaacagtggtggggatggatggatcgaaagctcaagaaaacctttgcgctgggcgatccaggagctttctctgccgatgcgcggtgcggtggagtgcggctgcggcgggtggatcggccggcgtgccaaggtaccaggctcccccgtcgtcgtcgtcgtcggaatcactgtcgcccgcgactcccccgccgtctcctcctcgatccttctcttcttgttgttgttggaagagattcccggcgattccaccgcctgaatcggaagaaccagtccaatctgctttgctcgggagcgagtcaacctccccgaccacgatccgggattgggaatgccgtcgtgcgagcggagatcggaatccggcgttgatttcgaccgtgccgacatcgccggcgacgatttggggggcatgtccgcctcccgccgcaccaatcgccgccgccgccgcgcgttttttttttcttcactttttagctactagaaaaatgcgaagtatatttcaatcttattactactatatttattactaatgtatagtactccctccgtttgacttttttaatcaacgtttgactactcgtcttattcaaaatttttatgtaaatataaaaatacttatgtcatgcttaaagaacatttcatgataaatcaaatcacaataaaataaattataattatataaattttttgaataagatgaaaggtcaaacatttatcaaaaagtcaacggcgtcatacattaaaatacggagggagtatatagtttagttaggatgaaatttggagtactgtacgttcgcttggatatatattacctccgttttttaatagatgacgccgttgactttttctcacatgtttgattttttctcacatgtttgaccattcgtcttattcaaaaaatttatgtaattataatttattttgttatgagttgttttattactcatagtactttaagtgtgatttatatcttatatatttgcataaaatttttgaataagacgaatggtcaaacatgtgagaaaaagtcaacggcgtcatctattaaaaacgaagggagtatatttttagaaaatcatgatctacaggaagtccgatcgtcttaagttagcatatgagtttttttaaacagatttcttatatgagtatgattccttatgtattaccaaaagcaaacgaacttaaaaaccgacccatacacaaataccgtacaaataccgtagagatatagattaaaaccaaaacataaaattaaaaccgactcaaacacagataacgaaccacggaaacatcttcaatttttataagcgactcaaatatggatgacggaccgcggaaacatatttaatttttataatagataatagattttcaaccacaccaaaatttaacaattttactatatatttatcggtaaattttcttttaaaaatttgacagatgtaattacattacatagtgtagcacaatgtaacttgtatataactttcatccgttagattttgtttcaagatttgtgcaagtgaggaaggaaaaaagtcagagcacgtatttatgagaggattcgttcccacgaccttctatttcaccgaaatagcatgttacggagagatttttttaaattacatacaagttacattgtagttacatgcaaattacagtgtaattattttacaattatactataattacatctgtcaaatgtataccctctgtcccagaaaaaagaccaatcctatctacgaatttagacacgtgtatccaggttcgtaactagaatttattttttccaggacggagtagtaggtgataccaaatttaatgatagtaaattttagcagattcaaattttgatagtattaattattgtgtttagtttcaaatgccatgtgcttctcgagcgactttttgaaaacaaagcaatcctccagagaatgtctatctgttttgtgtatggggcaccatgatttctttgtgtcgctgccttgtgggtccgggcgcttgggagggttcgcgtattctgctgcgaggacttccgcttgagctttccttttcccgtttttgcgatttttcttcttgctcgactcagatgtgtctgcggctgacttcttctctcccccagtcttcggtttgtcgttcttgcgtcttagtgcgtcatcgacgtgggcacatctttcaacgatctcgaataatcttcgagtagttgtgatgcgccttgttgccaactcctgggtagtgtagcgatctctgacaccagacttgaaggcgcgaattacagaagcgtcagtgatctcggggatggtgttcctgcactcgttaaagcgcctaacgtattccctcaaagattcacttgagttctgtgttaacgcgtgaagatcgtcttcgatcgcgtgacgcttgtatgttccttggaaattggcgacaaactgatgccacaggtctgaccacgaagaaattgagtaggggggagatgcatcagccacgaacgtgcagaacccttcaacgcggttggtaaatagtttgccaatgcattggcatctgctccagcggcataaagcattgtcgagtagacttgaaggaattcttccgggtcggtgctcccatcatacttttcaataactctaggtcggaatctctcaggccatcggacatcacgtagggaacgaccgaaagccctacacccagcgcttggagcggtgggttgtcggtggtcgcatgaccttcgtggatgtcggtctgacgatgaagaggacgcggatgatgacgatgatgacgatgggtcgcttggttccggcgtgcgattacgagggtgacgacctggatctcgggaatcttgtcttcatctctcgttgttgtctcgacgctgatctccttcatcttcgtcgttacggcgacggccgtgaccagtgttgtctggccctcgccgatcgcgatcgtcatggtctcggttctcttttgggcgacttcctcgatcatggcgtcgtgaggagacatgacgccgggagtggttcgcgtcatcccgtgtgcgtcgtgcttctcggcgtccgttgatttgatctcgaagatcgccagtgccacgaggtggaggggtagcttgtcgaggtgattccctccgttctggactttcaccgttagcgtcgccgactggcgatcggttttgttgtgctgcggtgatggcttcttcgaacgcattgctgaggttagtcaccgatgcccgtactcgttccgtccaacgctcgaggtcgttgttcagaacgggatcgtaaggtgtttccctcagtatggcttgaacagccctgatgtgttgggctggggtagtcgattgattcgccgccaccgcattggcttgtgctgacgtgccaacgtcatcgatagccaacacctcccgcgccgcgtctgacgttgatgacccatagtcttcgaggagatgtaaaacagatggttcatggggattgagatcgattaccccaacgaaccgatctagggctggagtcgctccttgttccttgctgttatcccggatggggacgtatgacttaggagacggagttttcatggcgccgagtagaattttgcaactcgagaggtcgtgattctttgtcttatggataggacaatagacgttccgagttggagaagtacgctggatcccacgttctttgcaggcgcggatttcagcacgagcgttgacgaatacccagtaatcttgaagagtatgtttcttggttttatgaataggacaccaagacctgatagtttcggaagtcatctttgctggcccgcggtttgtgtcggagggacaaggcctggccgcatcagaatccttcacgaacttggatgtagtcggtaatccgttctccgtttcaacgggtggatttttcgacgtggaggcgtcttggttcgtagccaccgcgttctcgttcccagtcattgggggaccggttgagatcggcattgtggtgtaaaccgggtagacgatttcgccgacttgagtccataccagcattgttgaggtaggaagaacttgagcggagctggtgttggcgttgttgtcgacgaagcttgatggcatagtagtagaaccttgaataccaagtccccctacctggcgcgccactgtcgacgggggatacccgtagaccggatatagagggtattggggtacgctggtataaggatctacgtagtacgacatcaagcaaccaaaagacgagaattatactggttcaggccccttgataggtaatagccctaatccagttgatatgggattatatggtggaaaacacagattacaaaggaaaagacggaactcgggggattcggcgagattgtagtcgagatgattcgactagctctcgtcgacttggctccttgcaggctccgacttcataggctgtgtgggttatgttgactctgagattcgatgatctatgccctccccggggggtcccttttataccgcaggttgggtgctctccgagtaggactcgaacataccagacctgacacgatacgtaggtaacccaattcttgtccgagaaggtctctccccgtccattgatttcacgaagagtttccttagatgccaaaagatctattcgtgtacacgtggatatgccatgtcgatacatgacgtatatcgaggggtagagggtatgcctgacccgtaaccctgacaatttagtagaatttttaagattagaaacttctagattattaatttaatttagtaaggtagtattggtaagagtatgtttggtttgtaataattaaaaaaaatggtaaggatataaatatcaacaaagttaacaagctcgtatatcttcgtcccactcatatcggattccttttatttttttttaacaaattttataaaatcacacctattattatctaagttgtataaaattatagggattttagtacgtgacatgtagctatataggtattgtggttttaaagttcataaaatcacaccgttaaccagtttaacatattattatatcaaaattttaaaatactactcctcccgttaaaaaaaataaatctagaacgggatgtgacatattctagtataataaatctgaatagagatatatccagattcgtaatactggatgtgtactagtttaattttttatggacggatggagtatataacaattaaacgatggataaaaaatttataaattttagatgtgatcttagaactcacggtactactgtgtgtttggcaaactgaaaataaataaatgtctactagctccaggtgatatacatggccgtattactgatgcctagacctacgattcatgtaccaacatcttgattccaattgtttatttatttcgtttcttatatatacaagcagccgttcgaatttcaatcacgacgtttgatcgttcgttcactactacataaccaatttatttttacgagggcccctatacattgcagcacaccgtaactaattgtgcctataaaaatcaatctctattttcgcatatggcttcttaaggacccaagcaaaaatttattttcgtaaacggacctcttaaaaaaccatatgcaaaaataagtctatttttctatgtggatctcttaaaccgcaacatgagaaaatatatttttttagacgggtctttaaaggtccgtaaagtctgacttaactcctttactctcagcacctcaaatttttttaagtcatcatcctcgtctctctcctcgtattattgcaaactcctctctctcccctctcattgaaaggcgccaatcggatagtatccaaatcaatttgaagtgcgccgtaaattcaatactctggtgaatattattttaaatctgttgttgactacgcctttattcttttgttattttactccccattttcatattgtaagtcattttgggattgtctagtcattttttttaagtttgacaaagttcacagaaaatatagcaacattttcaacataacacaaatatactataaaaacatattcaatgatggatttactggaacaaatttggtcttgtagatgttatttctttctttaaacttgatcaaactttaataagtttgacatagatcaaaccaaaaatgtctttagtataaaacggagggagtgacactaagtaaattatactgatatatcaacgatatattggcaaaatttagcaaagttgaggtggcaccagggaaaaatgccccaacaaaagatccaaaagacaactgtaattcgagcaaacacctattgagatcacccgtttcttctgcagtgaccatacctcaactcttataatttctcagtacttaattccatcctacctacatattccaagctcatcagagcagggctgagattatcatgcacctcagattatccccattatcctccacggtacagtcctgtgcagcttctctgaaatcttacaaataactgtacaaatatattggtaatatgcatatataatccaaaatatccaacaatgacctacaatttacccgaatcagtctgttcatcaaagcagccgaactgaacatcaatacacatcatgtgaatgtcattactagtattcatgctgaaacatcagcaaaacattgcaatgcaggtttgtggaacaaccataggggcaagttaccaagttgccgcgttcgtttggaacagttgggatctctcacacgcgcatgcataataaagcaagtcattaacatatgattaattaaatattagcttaaaaatgaatcaatatgatttgtttgaaacactttcctgtaagatgttttttttgcaaaaaatgcaacatttagcagtttaaaaagcatgcgaaaaacaatggagcagatggcatgagatatgctactaggctgctaggcaacattgtatagatagcacgagatacaggcaacaatgtggggacatgaatatcaaacttcgttcaaaagggaccaatcgggctgaatctgacagtcgtttaaattaattagcatagctcagccagccaaaattaggtaagtcctaggttaaacgcccgacagaagatcatgtcaaagaacattcaagtaactaacattcacaaaattatcatctctaggtaacttcagtcttgctgtacatcttcaagccatcctccatcgggctacctaaaattcaacacatttgtcaatggattaaaacaagcaaacatgggcaattgtacaatagattagagaagtttacctttcctgaatcgacagaaaactctaagggcaaggtaattgtctccttacatggaccttcaatgtcatgtactagcaactacacaagaaaggcagttctgttaattattcttttacccctttttttaaaaaaatagtggtattttttgttattgtgtaatatcagaccttgagaaccatcgacttcatcccctgcaggtatctccaaccaagagataggagataatcttcgatctgttccagaattttaaaaatagaaatcacaacacattttttgacaaatattgatttatattaaactattacttgagacaagaattcatttcacctcaggcaaattagtcccgcactcgtcctcaaaaaagatcacgtcaccctgtctaacaccaagatgctcaagagcagaatcatcagctatgcgtttaaccataaagccaccattgatgtatgtttaacagagagctcctcccggagtgacacaccagctagttccacact

SEQ ID NO: 6503 - DNA, 19563 bp, Oryza sativa
tggttttattcggccatgtcgatatgccgagtgggtttccaacatagtcccggtcatcaagaagaatagcaagcttagggtgtgcattgattttcgcgatttaaataaagctactccataggatgaatacccaatgccgattgccaatcaattgattgatgcagcttcaggacataagattataagttttatggatagcaatgctggttacaatcagatttttatggccgaagaggatatccataagaccgctttcaggtgccctggtgcaatcggtttgtttgagtggattgtgatgtgtaacatcctgaaaattttgaatctggaatacggaatttaaaaattaagaataatcaaaaatctttttaaaaccttttttgcatgttgggatttattatgcatttgtgtgtatttaggttgtgtgccaaagatctcgattaaatctatctcctagagggacgccctcagtccaacgtcctttccttccattatcttcacggtctgatttattaagtgcttcggtactaaacaaatcacagacctgaatatataacccgaaaatcttttcttatgtcgcaatgcgacatatctttctcaattcttaccgtccggttatttcaaaccttttattattccgactcgataattccctcgaatacctataaacgatcgacgtatttatttatcgcacgttgattcgaatatcctcaaatccattcctaccgcgatgactggatttgtatgccacacgtcacccctagaatcctcccttcgctatcatcgttcgttcgtgcgagcactctcaaataatcctacgacgacctataaatttgtttgtcgggcgttaagcctaaactcctttttggcatcacggtgcatccatccaaacaaatcaagtctcgtattacaatccatttatcccgcccttgtgcattctcggaatatctataccgacccaaatccagttattgtccaagctacaatacaccatataatccaatccacatttacagtccaagtatatttctagtccaaacacagagccaaaatcaatatccatactctacagtccaaatgcacagcacattatacagtcccatttacaagttccaagtacagactaccaaagtacaaatcccaggaaaatactaagaactcctattacaattgggccattttcctctctctcccagcccaacgaacaacccagcataagtctattttaccttcccagagacgtagcagcccacccctgttatctttctcaagccaacccactgaaagtctactttgcctcccctgctcaaaacaacaggcatgcatgcacaagaattgctcgatgaaatgcctacaagcccaacagtagtttgcaaccacttttgccgggcacacaacaggaaattgcaccaaccatcaaatgtctgggacccccctcaccaacatgcaaaaccaacacacatacacccatacccccattccacataacactctccaaacacatgcaaacacagtgaggagggcccacaccgaaaaataacaccaagttcacagaggggaactcaccttgcctcccatgcagacaaccacaacaccaacaaaaattttcacaatttgaccctttgcaaaaactatttttacaaatgaaccgtcaccaaaacttatttcaaaaataacccttggcgctgaccaaaagagtcatttttaaaataagttttggcagcggctcatttgtaaaaaaagtttttgcaaagggtcgaattgtgaaaatttcagcaacaccaaggagcctatataaacaccaccacagccatgcacccctccatttttctcctcccctccctgatcaagctctgtaactaccaccactccgttccctcgcgcattggctgccacctctccgcttgctccgccgtggccggctccggctgggcctcagttgagcaagaggacaggaagtccgccgcgccattgatcagtctgagaatgactaactttgaacgactaacccctaacatctaacccttttgttgttctgttgcactgactcactaacccgctgactctttactttcagttgtcctaacctctgactcactgactcactgacctttccatttttgtttcgctaacccgctgatcctttcagttgtgtgatcctttgttgttggcaatcgaaagcgtagtgtgcgaggacgatccgcgagccaatcaccgacgctcggcgaccatgcacggtgtgccgctacccggctgccgcaaggtgtgcagcttctcctccggctcactctccccatcgcctccttccctttccaaccgccggcctcctcctctccacccctgtcgaactccatcccctcattgtcattggcctccgccactgaagccgccatcatcgtcgtcctcatcccagccaacccccaactccgcacttcacgtcgccatggcgccaggctaccgccatacgccaccctgccccgccgtgcgcgcggctgcgccaagccgccgccgcaccgcggtgcctccctcgcctgcgcacagcccaaccgctgccgcccgcgacgacaccccgacctcctcctcccaatcctcctctccctcgcgccgtcgcgctgagccgcacgcggcctagccgccttgtcgactctctccaccgttccccacatcaccgagccccctcccctctgtctgctgcgcgccagccccgccgccgtcgcgcctgaccgccgccccgatctctccagggccgcgccaggaccaccgccgcctccctatttgatactggcatccatcctcaccatcaagctccacccctccgcggaccctctccccactgcgacaatcctcccctccccatcccccaccgcctcctcccccctgcgcagccgcgtgccgccctgaagcgtcgtcgagcccggccgccggtctgccgcatccacccccgcgccaggccgctgtgccagctgcgccgccgcactctgccccgccctcaccgtgcgccgccccggcgccgtcgcccaggccgccgccccgcgcaccccaggcgccgcctcctgctgcgccgtcaccgcgccgacggcctcccctccattccaccccacgccgccagcaccagccctctccccaccgccgtcgaccctgttacatccggcacaactgatgacgaacaggaacaagtgtccaaggtcgttggctccgttctgagtacggcccagcaacggcctgttcgtgtaactaggcccaacccgaagtataagggtggaaactgggttaactagctgtatataaaggagagagagagaaccgggagtcatgacatgtaaagacagaattcccaactcaatacaaactcaatctctctctctctacaactctgtctttctctctgcttctcttcctctattcctctcaaactgtctctgattctctgaaaatatcttaccactcttccaagttggtaacatttggtatcagagccgcaatcctggagaaacctcggttcaaaactcgtcttcagatccaagtcgacgacatggcgaagcaaaacgagggattcgagaagactctgttggagattcaagcggcgatcggaaccatggtcgtcaagcaaggagagacataagagatgctgctcaaactggacaaatctgtggcggggtggcgacctcaagttgatgctgctgtacaagggttgcagcacgacatggaggagctgaagctgcatgtcctcaagttggagaagcagagcgaggagggcggcaattcgtcgaacacctcgcaggcgtcaaggatggcggaggaagggagtcaccaaactcctctgcttcctacgcccagcacgctgccgttgttttccggaacagcggcgagcgatctcggtccagatggccatcgcgtcacaaattttcaccgggggaaggcatcgggggtagttcatactctcgggccacctccggtcaagggtacgttccagattcccactaaattttctgttcctcatggggttgagtttggcgcaaattcgagtcggggaaatcgggatttgcatggggagcaagggttcaatcataggctaccgaagttggattttcctcagtttgatggttcggatccacagagttggaggatgcgttgtgagcattattttggggtttatggaactcatccaaatttgtgggttcggatagccaccatttacttcatgggaagggcagcgtcttggctacgttcatctcgtgctcatgaagtttttgtcgattggggtcgattctatgaagcgatgaaccgaaaattcgacagaaatcaacatcggcaactgattcgacagcttgatcagattaaacaaaccggttcagtgagcgagttttatgaacggtttgatgatctgatgaatcagttgttgacgtatgatcctatgtataacactttgaatttggttcaccggttcatagaagggttgcgttttgacattcgcgaagctgttttgttacattgtcccgaggatttggagtctgctctggttttggctctattacaggaggagttgtctgagcggaatcaagagcaaaggaaatttgtggatggatcgcagaagtttaaaaatgcatatccattaccattgccaccaaccaaggttttgaaaactgaggagaagaaaggcggagagctcaatcggggtactaatctttctgacaaggttagtgcacttcgatcgtttcgtcgtgcacaaggtttgtgttacttatgtgccgaaaagtggtcgccgacacataaatgttcaggaacagttcagcttcacgctgttcaggagctctttgcactatttcctgacaatgcaaatgaggatcaggctagcatatcttctgaagatagtgattcttccttgttagctatgtcagttcatgcagttcagggtactgattctcagtctaccattcggttacaaggaaaaattcaggggttgaatatactgatgcttgtagattctggtagtttggctagctttatcagtgatcaattggctgaccgtcttactggagttcagttcttagctcatcctctgtctgttaaggtggccaatggacaggtgttgcattgtcagaaagaaatgccttctgctgaatggtttgttagtggtcagaagttcttgaccacatttaaagtggtggccttgggaggttatgatgcaatcttaggcatggattggttaactaagtatagtccaatgcaaattgattggcagcttaagtctattcacttgacagttatgggtcatgaggttttgttgcgtggggtgcagtccgatacttctgattgtgccttgatttctagtcagcatttacagcatctgcacagtatcgactcagtggcaggtttggttcacttatgtgcttccctcagtgactctacagaccagttatcctcagttccagatgttgtctagtctttggtacatgaattctctcatttatttgaggaacccagtggattacctcctgctcgagattatgaccatacaattcctctaattcctggggctgtgccagttaatgtgagaccttaccgttatacacctgcccaaaaggatgagatcgaaaaacaggttaaggatatgttacaaaaaggaattattcagccaagtgctagtcctttttcttctcctgttttgttagtcaaaaagaaagatggcacatggaggttttgtgtggattatcgccatcttaatgctatcactgtcaaaaacaagtatcctcttccaataattgatgagttaatggatgaattggctggtgcttgctggttttctaagcttgatttgcgttcggggtatcatcaaattcggatggcagttggtgaggaggctaagacagcttttaaaactcacaatggtcattttgaattcaaggtgcttcccttcggacttacgagtgctccagctaccttccagggtgtgatgaatacagttttagctgatcaattgcgtcaaaatgtcttggtctttgttgatgacatcttggtatacagtcgcactttggaggagcacaagaatcatctgcgtcaggtgtttgagactctgagtaagcatcagttacgagtcaaattgtctaaatgttcttttgcacaaactcaactgtcttatctagggcacatcattagtgctgatggagtttcaacagatccagaaaagattcaggtggttcggcaatggccagttcctgtatctgttaaagatgtgcgcagcttcctaggtttggcagggtattatcgcaagtttgtccgacattttggcatcattagtaagccattaactaagctattgtgtaaggggcagccttttatctggacacaacaccatcaagaagcttttgacactttgaaacagagtctgatatcagcaccggtgttggtcatgcccgatttccagaaaatgtttgtggtggagactgatgcttctgatcgaggtattggtgctgtgctgatgcaagatcagcattcggtggcatttttgagtaaggctttaggacatcggactcaagttctttccacttatgaaaaggaaagtctggctattattcttgctgttgatcattggcgcccgtatttacaacatgatgattttttaattcgcactgatcaccgcagtctggcctttcttgataaccaactattaaccacctcttggcaatataaagcaatgactaagttgttgggtcttcgttatcgtattgtgtacaagaaaggattggagaatggagccgcagatgctttatctcatagatcctctgatggtcttccaattttaagtgcattatctgttggtttaccggattggttacaggatgttgtttcgggttataagtctgatcccgaagctcttcagcttttgcattcttttaaggaaggcacatgtcattctgctcattttgagttgcaaaatggtattctttatttcaagaaacgtgtttgggtgggcaataataggcagcttcagcagcaagttctggcaaatttgcacactgctgctctagggggccattctggaattcaagtaacttatcagcgagttaagcagctgagttaagcagctgtttgcttggccaggtttaaggcaaactgtgcaggattttgtgcaaagttgtgcagtctgtcaacaagctaaacctgaacatgtgccttacccagggttactacaaccagttcaaatacctgaacatgcttggcaagtcatatcaatggattttattgaaggattgccccgttcagcctcttataatagcattttggtgattgtggataagttcactaagtttgcccacttcctgcctttatcccatcctttcactgctgtgtctgtggcgcaattattcatggacagaattcattctatacatggactaccgcaggccatcatttctgatcgtgatcgagtgttcaccagtattttttggaaggaattgtttcggcgttctggcactcagttacaaatgagctcttcttatcatccacaaacggatgggcaaacggagcgcgtgaatcagtgtttggaaatgtttctgcgctgttttgttcatgcctgtccatctagatggagtaagtggttatctcttgctcaattttggtacaacacttcatttcattcaaccttgatgttgactccctttgaagcaatgtttggtcataaacctcgtcattttgggctctcagtggattctgttggggtgcctagtgcattggatagttggatgcaggatcgtcataatatgcaaagcttgatttatcatcatttggttcgagctcaacaacgaatgaagagtcaggctgattctaagcgtactgatcgcgtgtttgcggtgggtgattgggtttttatgaagcttcaaccttatgtgcagcaatctgtcatgactcgtgctaatcagaagttggctttcaagttctacgggcccttccagatccttcagcgcgtgggttctgttgcctataagttacaattacctgccaccagtttgattcatccagtggtgcatgtgtctcaattaaagaaagcagtagctgcctctgaagttgtttaatcaacattaccacgtttggatcctgattctgggcatctggctactccagtagaggttcttcaacagcggctacgtcgtcatggtgataaaatgattgttcaagctttagttcactggtctggtacttcgtcatccaccacttcttgggaagatctggaggagttaaggcatcgctttccttctgccacagcttggggtcaagctgtgtttcaaggaagggggaatgttacatccggcacaactgatgacgaacaggaacaagtgtccaaggtcgttggctccgttctgagtacggcccagcaacggcctgttcgtgtaactaggcccaacccgaagtataagggtggaaactgggttaactagctgtatataaaggagagagagaatcgggagtcatgacatgtaaagacagaattcccaactcaatacaaactcaatctctctctctctacaactctgtctttctctctgcttctcttcctctattcctctcaaactctctctgattctctgaaaatatcttacctctcttccaagttggtaacagaccccttcctgccacatccccacagccaaccgccggcagcaccaactccttccggcgcccctcgcccggagcctcccccacctctccgccctccttcaccgccgcgacagccgccgtcgctgcgccgtgcggttccccctctgtctcggctccggcgtgggtaggagagaagaagaaacgggaaacgagaggagagatcgagaaggagagaagagaaacggataagagagaagaaaggagtgggacccactaggggccgctgatccgcgaccagtcgcgcggccgcgcgcgcgcgatcaggtgcccccctctagtagtctagtctgatctcttatcctatggagtactactatttatatgtatgcacttttaatgtataaaagatacacatgtatataaagtttgtgtgtatacatataaaaaaggaataagtctacataaccccctaatgtactgttggttgattacttagccccctgacctaacaaaccaggtatttaaccccttaagtttgttaatgccgtttacttaaccccatacggtggtttttaacctgattttgccctgctggcactccacgttggacagatgggcatgcataaaagattcgagcggttcgccaaacaaacatacccccacgacttctcctcgttctctccggcggcgcatcctccgcctctgcctccccggcgagacgaagcgagctgatgttaagaagtggatccactttatcggattgcagagccgggcaaaggtgagtgtctgcaactcgtttttgtgtttttttttcccaatcagatcgttgtcactccaaggattagggctaatactacaggggtttttagtattgatattttgtattttctctctgcagtctagatggtgccatattgtgggtagtaaggctcatcgatttcaatgaatttcttgtggtaaattaattaggtgacttgacgattttagtgtttaggtctttatgtatccccgcgcgcccatcgatctgccgtggcaggcctatctaacgtggagtgccagcagggcaaaaccggacaaagaaaccactataaggggttaagtaaacggtattagtaagcttaaggggttaaatacatggtttgtaaggtcagggagctaagtaatcaaccatcagtatgttgggggttatgtagacttattcctataaaaaaatctaaaatatacgtgtatacaaactttgtatacgtgtatacaaagctggtataagtatgtataaaaaccaaaaaatacacgtatacaaactttatatacacgtatatacaaaatttatatacgtgtatacaaaatttgcatacgtgtatacaaaatttatatacgtatatacaaagtttgcatacgtgtatacaaaatttatatacgtgtatataaagtttgtatttgtatgtatacaaagtttgtatacgtgtatacaaaatttatatacgtgtatataaagtttatatttatatatatacaaagattgcatacatacgtattaaaaagggaaaacagaaaaatatacgagaagaaaaaaaagaaaaaaaagaaaaccgaaaaaggtacggaagagaaaaaaaacaaaaaaaaaggaaaccgtacaccggaaaaaacggaccgtacgcacgtcgtcgccgcctcctctccacgcgcgacacgtgtccagtcgcgcgtgggagggtgagcgcgaatagtcgcgtattagccgtttcgcccacgggaggacccacgttctagccccttcctctctgagttgacttccccctagaagtctacatcaccaccctatgctttagtataaaagccagagagatttttcacctactgaagtctacataatacccttcgcagagcctaccagtagccacctcatccactaaagtccacaacacaccctctatacaacccagagccttctcatgaagtctaaaccacctccctacccgagagtgcttcatcctccgtttataagtccttccaaacatcgaaaatccatatatttccaaccgtaactccgattgcctccattcaacttccataatccctctaaaatcgagatctatttaatggcaccattagttgtattgaatgttgctttattttatttcttttaggattgtgcgtggttattctttggttatttatcgaacgtaccggatatttatcgatcgtgggaattctagttatctaactgaagcagttatctcgaagacattaggaccgatagcaaggcaagtcactacgctcgaacatatcgatcctatgttacaaatgtgttgttttgcaaataaattgcatgctatttataaattgcatacctacatttgattatagcctgcccttgatattgattacttttatacatattgtacgccttttaatgccggagtcatttatttatatgcggtcaattattgaaaacgcttagcaatgctattgtagacatgcgtacacttcatatttacgctagatgattatggatgtgagatcactcgatgagagtgattgatgatttgcgggtggagacatgagtgccacccgccacacacaaaccgtttgcgaaaaccaaaacttaatacaacaaaacttcgactagggcggcaagaatagaatatgggtggttctaggaaacggttagtcgccgaccctggtcaattaaggaccgagtcaggaaactatgcaagaaacgaaccgagtacgaccacatttcaggtatgggcagacccgttagattaggacactctcgcaaagcggtacctcagtcatggcaagtgctgtatgtgagcgttgagtatagtgcagtgttggaaaggtaaatgacgtcaagaaatgaaattttaaaacacaccatagacaagtaattaggtaccccttatccctggagcgccaggactcccctcactatacggcagaggagttaggagtgcccgggtgcaatgggggttcatagtccttggagtaggtaccgaagagcgagagtgactgaaaaaccgggccgtggcgagtttcatgtgttgggactaggctcatgtgttgggcaagccacggagtgcgggattaaaagcgtacatccactgcaatgtgagtaaatcaatctattcgaatagccgtgctcacggttaatgagcgttgggacttgtattacacttgactagactcatagattttaatactgcatagagtaaatatgagagacatctgaaccttgcccaaagagtgggaaggttagtatagtagagttggtataagatgaaatgagagggtaaaccgaaccaagcggggcttggaaaggtggatgatgtaggaccgagatgtcgactagaggggggtgaataggcgatttaaaaactaaatgacacctaatcaaaactaacctaagttgctaggctcggtgagggttaagtctgactaagcaactaagttatgttttgcaaacctagggtgatagtggctcaattaattctctaggaaagtaaatcacactcctatgtcaatgttttgcaatcctagggtgatatgatttcaagaaagtctctaggaatgtaaattgcgcaaatgtaaatgcgacaatcaaatgagacaaggagacaagagatttttcaccgaggttcggaaactcaccggtttcgtactccccgttgagacgagcccaactccaccactcaaccacgaagccaccgcacgcccccttcgtcaaggagtgggcaaggcgggagccggcccacggagaggactacccaagcctcgatcactcggggtagttcttcctttactccgaaggcggtgaactccaaaccactcacaaaaccggcaccgggcctcctccacaatcttctcggagaggtcaccgggcaactcctccacaagccgtctagaaggcggcaacctccaagagtaacaagcaatgacctggtgtggagatgatcaatcaagtgccacactagctctataaatggaagcaatgcacttgactgtaggctagaacaacctcaaccactataatggatgaacactaagctcaaaggtgtgtgagagaggtgcaagggtgtatgcaattgaattgggtgccaagagagcccccttgctgctggagggggagtttttatactcccaccaaccaaaactagccgttgggggcgaaatcccccaactctgtgctctaccggtctgaccggaggtatgtggccggtcagactgtgctactctgcaacggctagaaaactagccgttgtagccctgtcagagggccccatcggcctggccggtcagaccgacatggggtggccggtcagaccgccctcggctcggtcagaccgccctcagctcgatctgaccgaatacgactccgtcggctctgtatcccccaaaccagagcatgacactcccagtctccagggggccggtctgaccgcgcatgtgccgccgttcagaccggccttatgcaccggtcagaccgccgtcttgtggtcggtcagactggccagggcacgccggtcagaccgccactatgcgcccctggtcaggccgaacacagtgaatctgtgtgtgatatgaaaagtgtgtgtgtcctctctaatcccattgtaattaatcatcaaaatcattaggggcctagatgcactttcaggtataccgttcggacagtgtgataccggttaggtatcaggtatcacgtgatacttcacaagtatcacctggtagcctgatacctgaacatgtatcatcccgtccgaacaggatactgtcatgtagcattttcgttttttatgctcatttaaaaatatttttgtcatttgtggttgtctaataaactaatttctgatggtgaagagcattttatcatttgactgtcatgcacacacatgtcatcccagacatatatcgtcatcactaaatatcgccgtagctttagcacgagcacattactagttgttattgggccgcaaacgcgctaggttaacgctacggagcacattactagttgttattgggccgcaaatgcgctagctctaaagcccaacatgcccgctggagccactaaaaaattgacgtgtacgtgtgctggtctcgccttctccattgcttcatcttcctctcaaatttccccttcgcgctcctgcgattgcttgctccgctcctcctcgctgaaaatctagggatatgatccccacctttttttcgccgcatatcttcgccagatctccgccacactttgtcacggtcgcttgtatctccatcctccaccaaagatccctaaatctcaaccccaatctatccactaatgactgaggagagagaagtcgagatcccatttggggaatgagcagtccaacatcatgaagaagaagtggaaggaaatggtgaagtatgacatcctccccgccaaggacatcatcatctagcaccctacagttggtgagggttttccgactcccaactctagcgaaattgcagtgttcaaactctttttctatcggggatttgggctcccaacccctggtttcttcccgtgcttgttatctttttacagaattcgactgtaccaccttaatcccaacactatttttcaactcaccatctttagtcacctctgtgaggcttttctccgcattcttccccatttcaatttcttccatcgttggtgcttcctaaagccacatccttgcaaagatcgaccctgtgttgttagcggcgcacaaaccaattgtggtctgacttaaaaagtcaatacttttcacttcctttgaaatctttcaacaagggttggcactccgagtggttctactgttcaaatcctgacctctctcttcctggcttcattgggctccctcctatccatagttcttagtggaacttgttgccctcagacaaggaaatggttgagtcaatgccatcattgcgaaactcacggacatgaggagtaaagggttgactagggtagtgtcgagggagtagatcccgacacaatattggtagagtatgaggatcattgataccaaggtatacacgagattaaggtaaaagagaccggagataaatatttttatacaggttcaggcccctgaactgataggtaatagccatactcctgtttaggggtgaaaatggggcggatatttcctgccggaccgaccgacctgaggcttgcgggaggaatatgggagagaaaatgggataccctatattatccgagttcaaacccgaatccggaaaaaaatatgggttaggatacgagaagagttatatccgcccgtatgtcctatattataaaacatatgtgaaaatctattataaactcacatataaacatgataaaagattagttaatcactatttttatgagctcacatgtaatattatataatttgttccttgatgtatcttttttagcactttaattgtcttcttacattaaatatccatgaattcgacatacaaaaaatatccgtacccgaatccgattcgaagaaagtaatatgggacaggatacgggatgagtgatgtgttatgcgacactacctgtacccgattccgaatttaaagtaagatgtaggttaggatatgggaatgttgtgatccgaccgtacccgtcccgttttcacccctactcctgttcgatcatagaagccggtgttgctcttatatatcagtatcaaatgagtacaatatttgggataacctattctagtcatcatcaacttggcggcatggatgtccaacacgtagttgacgacatggtagtcttcttcgtcgaatatgaactcgagattagaggttgtgttaggtccctcatgtcagcctctatggctccagattgggtctacctagacttgtccctcatgttggcaggtgttggtctgtgttgacgtctcccctctcctcctagggggtcttgtatttatacatatagatgctcccttgtccaagtagaattagggagacaaatatgtatatgattcgagtagcccttgtagcttccaacttgaactctacttctttcttatctggaacactttcgtatatgagacataattccctataagacttagtatatggtgggtcccgtcgagctcaatccaagactattgggtatgccttacctataacactgacaggtagatgttactcaagacatttccgcaacctataaaagaccgagtgcatcgaaccgttgattatgcaggtattgaagaccccactcgggagatatatggcaagtggtgatagccctatccgtccttcgtatccctccatattcggctacgtcatagagctacagaccagacttagcttgacagataagtggagagccggtgcccgaaacaatcaataaagttttacctttaactcaagtatattaattaatccatagaaatcctctctagcctaatcttaccattagttgttgtccttggttgaatcatgtttttagattatacatacacgttccacatagttcgatactcttttgaatactctaaggtgaagtgctacagtggtatcggtgcgcttgcggatttatgtgtgaccgtaacaaatacaaacagtcctgcgtgttgacttggctagttggaccaggtcaataagccacatcagcaaaaacagctaagggagtacaagtcaaacacagttaagggagtcaaattacactgactttaatagttggatcaagataatccggttaaaggatacgagtatacgagaggactgaaagtggacttattctcaggagtagatgaatagtactcgaattcggcccaccaccactacaccttggcctactaataaatactcctacagtatataagaggcaaaagaaaagaaaaggaatccgactcgagcggggtgaggatctaaagaaaaccctagcggcggcgattggtgcggcgggaggcggccatgtcccccaaaccgaggaaatcggtggcggccttgagcggtcccaaatcgtcgccggcgaggtcgactcggtccaaatcgaagccggattctgatatcgccgagcacgacgacagtcccaaatcgtcgtccgggaggttgactcgctccagagcaaaggcgattgaacaggtggggaatcggactgtggaggagtcggcgggagtgtcttcgaacaagaagaagagaaggattgaggaggagacggcgggggagtcgccggcgacgggggctccggaggggcatggcaccttggcgtcccggccactcccgccgacccacccgccgcctacaccccgcgtcagaaaaagctcctgcatcgtccggctcgaaggttttagctttcgatcccctccccaccactgttaatttcttctactttcaattttttgtatacctatcattattaaccatgttaatttctccccatttctcttcttcagttgctcgacttcagaagctaactctccggcgcgataagaaagatgatccctccaccgcggccgctttgcctaccccctccgacaagaacatggtgttgggcatgtctcgctcaattgtccgcgtttcatccccaccttctggtaatttactccatccgtcccaaaaatatggacacatcttagtacaagtttggaggcatgttcagattttactgcctgaatctactgtatttactgctaacttagctactaagtgagccatgtgctaggctgttagcatgccacgtgtggttaattgcgttgttttacgcattccctatctagcattacatcagaaaatcatgctgcatctccacatgggaattaccgtggattttgtgctaaactagctgcagatgttaagggaaaagccggtgatataaaagaaagctaccgagatagacatgtgtagtccaacaacaaatggaaatatgtgttgtttagtgtatttagtagcccaatacaaaatatgtatttatcggctcctagctatgtagctacctgctaatcaactgaatgtttttcagagggaaaattgatctctccgcgcaccggattcgtcgtcattgggatggagccaccaagcgtgctatgatcgtcacgctctccacttacttcaaaaagaagccgcatgagccccaacccgaggtgcatgtcttagctaatccccatgttaccatcatccgagttccataactgttcttattaagtaggggctaacccaattgctaaaaatgacttttcatgcctgccaatttctttaatttcttggtgcaagtgtagaacaccgatttccattaggcaatccccatgtttctatcatccgagttccattaccatttttgttaagtatagtatggtcaagtgattgctaaccgtagctgggctgctgtgcatttgctttgtgtgaattttaatgtgccctctgatttcaattctcaagcgttatcattgtcaaattgatggccttttcttgtatatccttagcatgagttccgtctcttgtgcttaagatgagtaaccattaacctttctttttctcgcattgccttctctctctatcttccattaacctttctttttctcgcattgccttctctctctatctttcagctgcaggttcatcttgcagataagtctattgtgcagggacggttgatattcatgaatcgccactacaatctctccatcttggagatcacgtctgacctaccattgcaggtccctgcttttgggtccgccccaaagtatggccagaaaattcttgccttgtctcgggatgaaaatatgtccctggtggcgaggcgtggagcaatcacgtggtcggatggttctttcatgtggagaaaccattacatgtttgtggattgtgatgttcctgaggtactgatacatttaccttttcttcacacttgctatttgttttaccttctacttagtggtatttatttattttttaattaatgcagggtggtgttggagggcctgtagttgacagttgtggtagtaccattgctatggtatacagagccggccctggtgcaattatcatttcaatctcaattatttgcaccttctttgagatgtggaagcaattcaggtatatactctttttccatcagtattaaaatatactacagattgaatcaaaatcgagcaatttctatgtggcacgtaaacccactgaatcacgatatattcttattaattgaatgtttatggataaatcttttatatctactatgttattagcgattttaaaagccaatgctgaaaaaactacgaaaaaacacctaaaatcaacttaaaattaagttttaaaattcaatttgctaaataataaacatggcctacaaaagtggttggtgcgccaacatgcgcgctcattttctcctaatagactaagtccatcttatctgtagcgctcattttctactatagactaaatccatcatatctgtatgctcattgtctactaattgactgaatccatcttatttgtagctgtgttgcccgccctgtgtttgatgtggatttaagaagtgtggaactagctggtgtgtcactccgggaggagctctctgttaaacataacatcaatggtggctttatggttaaacgcatagctgatgattctgctcttgagcatcttggtgttagacagggtgacgtgatcttttttgaggacgagtgcgggactaatttgcctgaggtgaaatgaattcttgtctcaagtaatagtttaatataaatcaatatttgtcaaaaaatgtgttgtgatttctatttttaaaattctggaacagatcgaagattatctcctatctcttggttggagatacctgcaggggatgaagtcgatggttctcaaggtctgatattacacaataacaaaaaataccactatttttttaaaaaaaggggtaaaagaataattaacagaactgcctttcttgtgtagttgctagtacatgacattgaaggtccatgtaaggagacaattaccttgccctta

SEQ ID NO: 6504 - DNA, 21173 bp, Oryza sativa
gttaattattggttatatatgtaatgcagaaatgatatatatgtttttttttctgcaccatagtgtactaaaaaaattatagctgctctatttattttgcttgcatctggctcagctcatactccacccaaattaaaacagcaaaagaaaatatgaaaccctttttttgtgaaaagaaaaggtggcatgcacggtggaaacaattaaatgggattttggtcaagactgcaagaaattaattagttcctgtgataactgaacatcaggtaatcaggtctgtgaaatgtttcaagccttcaagaccattctggtctccaatatacttctctgtttttcttttactgagagctagtatttactagttggtgtggcttatcagaatttgcttaattgaagaatttacaaacaagatgcttaattcgactgattaaacacaatgaattgacgtccattttaagaacggtagtgaaatgcagttccaaaataatggggacggaaaaacaaatttaacaatttatatgagaccaattgtaagccgaccgctgcaagttaaaccattcatggtgtatttgaaaggaaaaccgcttaaaataatttgtttgcttaaaattgggacaattaaaatgtgtgtgcattattggtgcttgactcactccaactatatatgtggaaataaataataaataaataaatatatatatatatatatatatatatatatatatatatatatatacgtacagagaaatagatataataggatattgaggatgtaattaactctgtgggtttgaaacaacatgtacacgtgcttatctacaatatctcaatggacggcatcaattaattatatatgctaatttgtaatcaagtcggcacacaattggtcagtactgtacactatatatgctccaggatgacctgaccaaatagtagatgtctcaagaattaattatatatgttgcaatttattgcttttgtcatctctatatgtggataacatattgttatggctatttttatgtcagcttatagtctctatatgatactaattgattttattttatttttggagtatataggacgctgagagacagttgtatgtcctcctcagtccacatatatatatttatatatatacacactgtcatataccatattttgttttttttccatccatcagtcaagaggccagaagtgtactggttgatagggaccattcgatcggtgtcggatgatatttaattgccatcttagtggctcaatagattagttgaatatgacatcgaattggtgtggagtcaaactttattaatgtgttgataaaatctggttcccctgcatccatactagtgattgaaccctgaagttctttaatcttagcttcccctagctaggcatgcatgaatggttgttcattttgcacatatatttgagtgcatgctagctagggtctaattttcttcctcatttcccttttcttggacatcatatttgtaccatatacaaggcacattgttatgttaaaaaaaatatttggttggcatgtacttattttatataatgtaaattgtttacatcttccacatcggtacacacaactaataagttttgactctaaaatagaagatacgaggttatacaacaaactcgcatctccttccaattgcatgataactcctgagctaatgaaaataaataaatcacacaaaactctataacaaaattataaagaaactatgtcacctaaagtaggataaaggatccctagctattgattttcaaagtacatagtatcctggtcccttgtaatagcattatagaccaatagtgaaccaagtggaagatataaagatgatatgcattgaattatttttttataaataaaaactatataactgtggtaaaccatactgactaatacagatcattggctccaaacaaaattaatttttaattagtttagacactcccttgagacaattgtcaaaaacatttctacatttcgattgggaggggagagctattggaagcaatgaaaagacaacgccaaatataccatgccatatgttattgaaagaaatgatgttgtatatatgatctggttggatgtatggtagctatactagcagggcagggtgcctatgcgttgtaatgattttttttatgaaattattagaaaaaatataggagttctgactaggacatattagagttaatagttgatacatataccaaattattttaattcgactgtatatagtcagtataaacatgtaatgttcattttatctaaaaaaaaggaaaacacattcacttttttagagacctcattcattctagaggggatcaggggcggatctacactataatcatcggtgtcaggcgacaccgacgacttttagcaaaacctatagcaaaactgcttatccatatactataacatcatgttctaaacataattagcatactatgacaccgatagacacgttatgacaccaacgaaccaattttctggatccgccactggaggggatgatcacttgctatactagagaaccttgtacagttaggaagtcatgaagaagtataaatattgggtactgaccaactctgatgttgcttgaattttgaattgttacactgacaataagggctcacatgacagtgagtagctgatggtggtagattcaatgtcactagactcaccaccattggagtcttatagaattatatagatatatgatcaagtctcttttcttagatgtcctaattaaggccttatatatagttgttattattggtgtgtggacaatcaattttaggacaggctcgaaaccatatctaaatggaatgactagtatccatttttaaaaagcaatagtcaaaataacatggtccatcgatcgagggccgaagaccgcaaaaagtcgacgatctatacaattacaaaagaacaaatgatgtgcacgatatttaattgataaattatcaattgtattatggtatgtttgtcaaagtatgatcacaagataagaaaactatattggccttacccgtgcaattgcgtgatgtgcgcgccagtttatgctggatattgacctatagagtgatttatttgattcaaagcactatagtgacattcattttttaaaacacaactagatcgtgtagcgattaactggactaatccagcattattagtcattcattatctagaaaaacattattagtcatatattttatagaaatgaccttataattcctcctcttctacagcctacggctagctatagctaaccatttcaatgtcaagatgagaagggaatttaagagcctgcaaattagaggtactctcacaacagaatatatataaggagcccacagtttaaaaaaatcaatatttacatattttgactaataattaaattaataatatatgtttagatcgtacatgtggcagcattatattcatatttgaaagtattttttatatgatattaattttagagtcgttgataatacgttatatgaaaagaaaagtcaaaggcattgttcttttcttattaacatgcatattttacctcgtgcgaaatctttttatatagaagttgttttaatatatcttataaatccattttgtctccggtgaccttaaacgggataaattaaagttttacgttggagactatgtatgcaccaaatttacacactttaaagctttatttatattttaggatggagggaggtactaaacgagaagtatgcatgagagcatgacactaactagctagaagaacactagcaagatgatgcaggtgtcattcattaattaaactaattaatcagaagttaattgagatttgtggcttgcttgacacatgtatactatactctcccagctaagctgtgtactactcctcaagatgacaccaccaccatcaccagcttttccttcttctctctcttctccggcgtccataaataccagcgccaccctcctctcctccatcatcgcagccaactccaacatcctgagctccaatctcccactccattccggccgcgcattctcccgctctcgatcgatcgatcgatcatggtggtgccttccgcgacgacgccagcgaggcaggagacggtggtggcggcggcgccgccagctgcggcggcgtccggtgtcgtcggcggcggcggcggcgtgacgatagcgacggtggacatgtcggcggagcgcggcgcggtggcgaggcaggtggcgacggcgtgcgcggcgcacgggttcttccggtgcgtcgggcacggcgtgccggcggcggcgcccgtcgcggcgaggctggacgccgcgacggcggcgttcttcgcgatggcgccggcggagaagcagcgcgccgggccggcgagcccgctcgggtacggctgccggagcatcgggttcaacggcgacgtcggcgagctggagtacctgctcctccacgccaaccccgccgccgtcgcgcaccgggccaggaccatcgacgccatggacccctctcgcttcaggtacgtacaataccaccactcactcttagcctagcttaatcgattagttttttactccctccatttctccgtttccccgtttcatgttataagatgttatgggtttttgaatatatagattcacgtttcacgctataaaatgttctgggttttgaataaattcatgcatgatctattgatgaacttttaagagtccaaaacattttgtaacatggaacggatggagtggcgtattgtgttgcgcctacgtgtcaaagtatgcatgcttacatggcacacgtatttaaaacattgttatgcatgtatataactaatgttctctatggtttaattttttcttaatgctacccatgcatattctataataaataaagtgtgccggactccggtcacagaagaatatatttgttttaatgtatcagtttaacttcgacgataattattattgttcgaagtacaaattttcggcatatttaatagtgtggccttgttctatcaaaacataatttttcgtaagagattatatacttgtataacttatttttggattgtagggatcctttccctatggttttacttcaaaagatgacttacatttggattggtgataaagaatatacaactaagtagacaaagttatatctagttcattttgaaaagttcaaggctcttttttcaacgggaaaggagtatcctatataagatatattatacagttaactctgtgccttttaaaagctctgttgacagtaaaatctcatgtagctggttcatccaaaaaaaaaattctcatgtagctgggcatacacgagctttttttttttttaagaacttacatacacgagcttaattacttctctcgatccttttgcggatgcgcttggttgctcgtaataaattttgtcacaaatctttgataaccccaccatttcccaaatttaagcatacatggtggtagaactatattcactaagttttacagtgtcgttgttacaacaataaactaatattgcaaatattgcaatagttacaatataattaatttcttctatgtattatgtactgaaacgcatatcaatcacatgcatggcactgcatatatggtcttaaactatatatgaggcaacgtgaataatatatattattaattaagtattacccgtatacacacacatacacatataattaaagattgtcatttttattatttttgctagacccctcgtccctgtgcatcactaaagtatttttattgaactagctgacctctacaggggtttaaagcttgattacttaattaaactgttaatgaaagacgactatatatgatccaataatatgttaattaagacggtgcatgggtgtccggtgtccctgcagtgtgagatgaacatgcaaaaaaaattaaatatatatcatgctgtgttccttaactaaccggccacatctacatattcatgtcataatcctgcatctgtctcactgctgatgtgatgccgtccaagcagtagtagtgtgggttggtagcagtaaaagggttttgtcagcttggttaggttttcctatctacaatatatctatctatctttttcatgtgttgtcaaaatacagtgagatatgcttacatatttctgcatctgagtactgctcaggggtgatgcaacgaagcatcaggtacatatctatatatttagagggctcagggctccatcgtttagccttcagtttacaggcataagaaaaaataaattttatagttaatttttaggttttttttatcgtaatttattttttcagtatttactaagaacatgtgtataaaagttttatctatatattattttttaatcactaatatactgtttcgcttataactatatagtagtataaggtatagacttgcatgatgtctatctacatgcatgcatgggatgcatatgtaggataggcttggcttgagagatgtctagctagctatgggtttttcatcagctacagggcaattaatttatagatatgcataatatattgtgttcagaagtcaaaagaaggccaagttggaatcatgcatacctgcactgcactcatgccagttgcaagcttgcaattgcaactgggcttgcttcttttcttttcagctggtttggcttgcatattttccatgttatgatcttctgatgtagccttttgactatatatcaaggatggactaaatgttagtttacacaataaggaaaaggatggaaatgttacactcatgtcatcatatactataacttaaggtaaattaagatcaatttacattaattttattaagaaaaagttgactcaagaaagctgcagtttatgttataattttaacttattatgttagcatatggggttttcatttttaattcttcatagtactacttcagtacatatccatatgtatactgtcattttcagacacaggtcccatcaattaaatcacggaaatgcatgagtacatagttttcaaaacaataattatcacaataatggcataattgatgctatgatggacaggccaatgataagttagttccaacaatttaagatcatacatagctagtttctaaagcaaaagaaaagcatgcaactgatgggacataacaaacttgatagctccacaaaatgggcataagaaattttctgatgaaagttaggtatcattgtctaaccaaatagacattggaaaaggatcaagcataccaattgatattttcatttttgctctaaaaaatgactacataagtggttttgaaagcgaaagcgaatattgccattggagaaaatgtctaccaactaagacaataatatatcagattttccttaactatctttgtgtatgctgaatgagagctcacatactaggagagattactcaccactcactgactgtactcagaaccaggtagtggcctaatcagagtttgctgagagaaaatatgatgaaatggacaagaaaaccctcacttaggtagttagaagactcctctcagggtccctctccaacaaactgtatatatttgtgtatcaaccaatctgacatatatgcagtggtttccaattaatggcaatatccaaccaccaactgatgcagcaacagagtgagtacttgaagcatccttatctaccagaaagctctgcaagcttaattagcaaagtacagcaggttttcatgtagaaaatgatgtgtttagttgggatatacatgatatatactttttgaaactcctcttagttctctatcaccatacatacatcagccattaatatataatatccatactagtacaagaatattaatcttaatgccttaatcaactcaaaagcctaagcttaattatcacaagcacatcattttggaaacatattgatagcaacatgccagtgaagtagtgaacacaaagaatgggataataatgatcaagaatgcatcaggttaagaacagaatggctaggaaatcttcacagtaaccattttgctatatgaaaagtgcaagacaagaaggaagaacaacctctttttgtcaaatgcaacagacaggggcccacatggaagtacacacatgtctgatgagaataaaatgatccaggcccctaaagagcatatctatgctatccatataaagccaaacaaaagaaaggaggcacacatgcaaggagtcctctttatggtaagataaaatgaaatgtcccagaggttgtgtagtggcaggggcagtgatacttgtgatccacgcactgatgggtctttccatggagcagtggaaaaaagtatggccaatcctgtcaacaacacatttttgcccattggaaaatttgtcacccctcggctgcatgatgtactgctgattctgtggcctatccatgcatcacaagattcacaagaaacgaatatatcacgtcttgtagatggtggtgcacaagcacagaggcatacacatatacccatcagtgtatcatcttttctaactcatcaggcaggcatgccgagggagggtgggtgcagcttttgatttgctgcagccatcaatcagtcaaagaccttgctcctctttctccagcttctttttacttgtcatggcacatccaacctgattctgtgataacagcattcttttgataaaatcaatttcaagttgattgtgctcacttgctgatatcctccctcactctgttgcagtgctattgtgaatgagtacattgaagccatgaagaagctcgcatgtgagatcctggacctgttaggagaggggctaggtctcaaggaccccagatacttcagcaagcttaccacaaacgctgacagtgactgcctcctgaggatcaaccactaccctccatcatgcaacattcacaaacttgaccatgatgaccaatgcaatatcaagagccttgttagcaccaaggctagcaatggtgggaatctgatggcaggtgggcgcattgggttcggcgagcactctgacccgcagatccttagcttgctccgagcaaacgatgtggaagggctacaggtgtttgtgccggaccacgagggcaaggagatgtgggttcaggtgccatcggacccatcggccattttcgtcaatgttggtgatgtcctccaggtagtcacagtaaatgactagagcaaaaaaaaacagcattacatatatcagaataaggtttactattatcaaaagaaattatttcatagattataaaaggaccgcaaagaaattatttcatagattataaaaggaccgcattgactatcatatgatttacaaattatgtggctttcttccagttattcataaaaaatgtttctttgctcactgcaaaacacacaggaaagtaatatatatttaatcatttgattcataaggctgcagcactgctgaacaatgtttcttttgtcaaaaaaaatgcaacactgatatgtttgttattttcagactcaaattcattgtattgctgcaattcttaccagctgacaaaaaaatctctttctatcctgcaactaccgctgttttactcaacttaaaaaaacaaatcactaaaacatgatgctgtaagcctggacatagttttgcattcctgacattcttcggcttatcctttctttggcctttatttcttcaggctctgacaaatgggaggctgataagtatccggcacagggtaattgcaaccgcctgcaggccaaggctgtccacaatatacttcgcatcaccacccctgcatgcacgaatctcggcactcccagagacaatcacagccagcagcccacgccgataccgatcattcacctgggctgagtacaagacgacaatgtactcactccgcctgagccacagccgcctagaactcttcaaaattgacgatgatgacagcgacaatgccagtgagggaaaagcataggaattgctggttaaattgcagacgatgcctatggaccagtggggattaggaagctgaaactgtccccaaaattttggctctctggcagtctggctactatcgtcagatatctcactattatgatggtgtagtgcctaagttgacgggtgtgtaatatcgttagcagtctacagaagctatggttgtacggaagtaatgtactgtcgccttttcagctaactatccatgttctctcttatatgtaatgagttagttgacggatgtgtaatattgctagcattgtatataagctatggttgtatggaagtatgtaatatagccttttcagctaactatccgtgttccctttgtccctctaaagcacaaaagtaagacctaactacagagcacaatagatagtttttgagaactatgatctattaagaaatcttaagagaaatcagaatacttttgacacatggttggcataagctagttgcaagtaattctgcaaaccacaccattattacactagattaaatttcatacttcaggacagtcaccaagtgtcaactcaacttacatatggtttttcctgtgaatgggagataattgtagagccaacatcacatcaaacaaaatggagagttttatgatatatatatgttcatgcactgtcggaaagaacatgatattataagtcagttgcaaataagagggtagtaaaaaaaagatactgcctaacggatgcacctctacctcccaatttatatttcaatgcacctcctaatttctttttcaatggcagaaacagaaaggaaccaaaagatacatatcattaaagaaccgtatgcatatattattaataaagaatgagtcagtgataagcaattattgtgatataaatcacagcaaatccgtgaagtggtctggtggcggtcaattatacatgcagttttctattttcaattatacaactatacaaagatattcacttcgaaacttttcacttctttatatagtagtgtgactctctcaaaaatcaatacatactgaagcaggaaaagattatatttgatgatcttactgaaggatgttggttgcatggtgtgtacctagttcagccacccccattcttctttaataggcggttaacacagtctttaattacgaagttcaagcccttgcttgcaaccagagtcaaggtcagctgcaggcaagaaaaccaacaatagttttactcttgtataatcacaatccttcccattaatcttccctgcatggtgtgtagtcacaacggcagatgatgactgcatcaatgattcctcagggccactctaactacccaaattcatgcaggctgatataatctgtaaaataaaaaaaaaagagtgatcaagtaattcatggagataagaataatcatgaaacctgacagcactgttcaaaaaataaaaagaaccctcaaagcattttcattatatcacttaccagcatgtactatacacaacagagtagatcaaaatccaccattacatcaccttatccaagggctgtgagcctgcaatacgcaaaaataacagtatgtcaacagaacattttctttcatgaagtcaacggtaattcttggaagataaaaacagagataagacattggttatgcaaccaactaaaggacaaagtagctccaatctgatggaactattcattgagcttgctgtttataacaaaaagggaactgatcaaattacaaccaatctcaaaaataatctagaacctgcaaaataatgctttagaaatgattgctctaagtttactatataaagtgaattttgttccataagtatcaatttaagtgggacattgcagaaatgtctgttcagcactaataactaaagcagaaactgggtgttgtttaaaaacagtgttcaaaaagcatcctttaatgaatgtcctcaacttcaagaatcataaagcaatataaatatgagcattccaaccacatgtatatcaagtcataaatattctgttcagaagggaatggtaggactgtactcaggtttcttaatttgatatctttaaatcgttcagaatcaggttgggctatgcctatgctacctgaacttgccaacaaagaaatcgtcagtttgtcatcatccaaaaacaatctttttgaaacaaaaggggaacacacgcgcaccaggcttacttgtttctcaaatattgcagagatgcacctgattagtactgaaacagaaacatgtccagaaagggcatgcttcaaaattggagaagggcacactaaattctaaagggaatggcatgattactacatccctgaaacaaatggttggctcgcaaatagcaacttgaaatgtcgcaggctgtcatcaatttcatgtggcttcacgcatcagatggtcagataccgatgatgatagctcgcttgcggtgccaaacatttagccaacatccaggacaagaaatgcccgaatatgtcgattacttcatccaccacatccacacaaatcatgctagagtgcacaaaatcggaccaggttccaactgtgcctccagcatcagggagatcgacaatgtagtcatgtgcccacaatgcttagacattcaaaaacctgacactagatttggtactctactaagttggcatgtggcagcgaacgattctcacacagaagaacatttcctgcacaaactgcatcttctcggagcccagagctgcgcacgagcaatcaatcggaactgcaacgaaaacctgtgcagccatccactacttcacaacacccgcgcggctacaagacatgcccttacctttacctgcagctacagcaaccggagcagcaggagattcctgaggccgccggcctccgcccatcctacgcgcggcccaagaacaccagcgccgccggtggcggcggcggcacggagaccctgacgagccaaaacctggtggtcgcggttcagcccctccggcttggagcagctccatccccgccgccgccgccgatccccatttgcgcagccttccacgtgctttccgagttgatataaggctccctcactgtcccgccacgccgtcgccctcggcggcgagccgccgtccttccgccgctcgcttgctccaagagtgttcggcgaaatgcctgaaaggcaaacggaagagagagagcaaggaaggacggactatgctttgggctgaatggtttaatctggaattggaccacgacatcgagattaggaataggttcactttagatactccatttgtcgcccattctgattttcatcctcagtgcgaaaaaccgggatataacgcattctccaacttacaaaaccagtgcaaacaagatcttcatcctacgtggcgcttacatgatcgttcgattcaaaaaataaaaagagaaaaattgaatactaaaaaaattaaaaaatatatgtcaagcccatatgtcagtcaaaaaaaaagtgggactcacatgtcctccatctcatcccccaacctctatcttctctctccatcggtgagcgtgtgcagagagggacgaggcggggaggccggcaagattgggcccacgatgctgtcgttgataaggtgggctcatgagaggggaggtggaggccgaggcgccacttcctcgcgagctcaagctctactatctcttcgtctacaaccgccgcctgcgtcaccgctccgccacggccttgctgaaggctaccttaggatgggctcatgggctgctcttggccatgcgccccatctccagcggtggcggcggtgcgaagaggggtgcaagagtgccaccgcctgcggcaccgctccgccacggccttcctgaaggctaccttaggatgggctcatgggctgctcttggccatgcgccccatctccagcggtggcggcggtgcgaagaggggtgcaagagtgtttctcttgatttgtttctctgacaaccgcggtgcaaaaaacggcaaggctgaagaaaggtgttggtcgaggtggcggtagggacggctcttggtcaggctccccgtcaccgtccaatataaaggttcgaacatccccttagggttgatttagtctcatatgtattgctggtatactttgtcagcaaataaaacaccatcaaagaactattaaaactattaatatcttggtatgatatttggctccagaccttccttcattggaaaatagtttcaacattgctcttagtctcataagaaaattaccttatgtgtcaccgatgtcaaagagaatcccctatctatcccttcttatctctctccctagttcgttcaatgccgctatcttctcacttgcctttttatcaagtatgccatattatcaattgagttattctaaacgtaaaccctaaatataccaagtgtgtaattcaacgacatttttcatcgtcacatgtaatataagtaatactccatccgttcatgtatgatcgacgtattagcgctggaaaagttttatatctttgatcgccgtatttctcttccaccgcacattcttaggataaacacgtgcatcgttttgttctatgcatgtaggcatgcaacaagtctcacgtattgaatgttcaccattttccgtttgcatgtaggcgagactcctcgtacacatgcagctgcttgtggtttcttctccgtgcgcatgcaacatttcaacgtgtaattgaattgcgatctccttagtcactacatcgatcacacatgaatggcaatagtaaaaattccttatataccactttttttgagaattccttatatgccactcaaacttcattagttcctttatatgccatcgaaaatatattgctctcttatatgccattggaatgaaatttatggcccttttataccattgcgttagtccgacgtgaatgggctaccaagttaacttaaaaatactaaaacacccttgcttctctgcaaccgaaaacacctaacacccaaaccgatgctcaaaaaatttaaaaccgatggataaaatgactaaaatcgtacaagaacaacgccgtttgttcctagaatggagttcattgttaatctcgcccttcttcgttaacaatttttttttataaaaaacatcttcatcggtttcaaacacttgcggctaagttttttctccaactttcttaactcattttactcattttccgcatgtacgtttttcaaactgctaaataatacggggtttttttaagatatctatacgaaagttgctttaaaaaacatattaatcaattttttttaaaataataaatactccatccgtttcacaatgtaagtcattttagcatttctcacattcatattgatgttaatggatctagacatatatattcatctagattcattaccatcaatatgaatatgaaaaatgttagaatgacttacatcgtgaaacggaggaagtatttaattaatcataaaaaaaagttttatgtgcgtgggagttgagttcccgaacataccccgatcaccgcaaaccgacctgtaatcctcacacgctgctgtctccgaaaaaaaaggggcaattgtgtttctgcccttgctttacgattcaattgtgattttacccctatttttttgggtttgtgattttgcccttgtttttctaaaatgaagtgccgtctacccctggttttgacagaagtttggtgggtccggaatttcagaattaaacgaagatagaaaatgttattatcatttttgaatgaccattctacccttggttcaatgaaagaaccaaatccccaatccctatcccgatttccactccaaaacccggcggcggcggctacgcgcggccagcacgcggcagggaggagcggcggcgggggccagctgccacggaacagcgcgcggcggagttgggcgcgggcagggaggcgctgcggcggcggcgtcgcgcgcgcatggaggcgcggcgcggcgaccggtggccccgcggtcagcgcgcggcggagaggagcggcggctccgtcggccagcgagcgagcgagcagcgagcaggtagcttggcggcgggatggcgctgttaaaggatgtaggcaggcacggcggcgacctcgggctggagcgcaggctagggacgcagggaggcacgacttgctgccggcgggctggcgctcctaacctcttgccggtgcagggacggaggcctagcgctattgaaaatacaggattaggagacataatggagtaaatcttgtgcatggtggaaatctgctgcaaatcccctgttttctttcccattttcctgtcttgtatctacgagagatttgtttggtgaatggtgatttcttcctgtgatgaatctttttggtgaatttttgcacccgatgcaagttctttgaaaatgctgcagaaatatgttaaattcttccaaaatttgtcaaagtttggtcaaattcgaaatatatacacattatatccagaaaggagaggcaaatgtgtaagggtatacaagtccttctactgctaagttgacgctgttaagtgatgctaacagaataggggcaaaacagaccttcgtttgaaaaaagtaagggcaaaatcacaaaccctaaaatgttagggtaaaatcacaattgcaactcaaactgaggtcaagaacacaattgccccaaaataaaagttcctcacacgcacgcccacgtcagcgcatcacaggaaaggccagtacgtcagccgcatcacgccgcggagggcaatcccgtaaattctcacgctaccaccatctctccccttccccccaagtctcgtcccttctccccgacgaacacgaactctttcccctccacctctcgactcctccctcgcttctccccctccgcaagtctccctccctcccccacaaaccctacctcgccccctccctccttcgatcgggggagcgctccattgcggtaggatccgatcccctttctccgccgattttttgcgattttttttgattttttgggtgatttgtgtgtttttttgcggggggattgtgcaggcgaaggggaagggggagtcggggatgttcttctccggtgacccgacggcgaggaagcgggtggacctcggcgggcggagcagcaaggagcgggaccggcaggtgctgctcgagcagacgcgggaggagcggcggcggcggctgggcctgcgcctgcagaacagctccgccacgaagatccaggtatgttcgaggcttcccgcgcgaggggaacggtggttttggggggttgtgaggcggggcggcgtcgctaggtttagcggggttttctccagcgcgtggggacttgagttgagttgcggcctcttgcagtggcggcgttcgggcattatttgcttataggtgttgtggttcgtgtggttttagtggtggtgggtagcattggcatgttggaattctcagcattaggtgatgtttgcttcaagttgtttttccttttccaatttgtgttatatgacgagttgtgtggagtgagataagttaatgtagttatggaacttgcgaatgtgtcattgtgtaggttaagttcagtggagtgagatgagataattatggaacttgcgaatgtgtcattgtgttggttaagttcaatggagtgagatgagataatgttgtcgtgcaacttgcgaatatgtcattgtctagcttaagcaattctagtagaagaaatctgtttattttttttcattgtttagcttaagcaatatagtataagaaatctgttttttttttttgcctgacgaggcaatgcgcaatctggtctgtgtagagtggctgaaacggtacttcctatgtatcaacataagacaaacatgtttttatttcccaaaatggaatttaactaattataagctgcagaaatgcttcagagggaagagagatttggaattggcacgttcggaagttcgagggaacttttgctctacttttggggagcactgccagagggttgattggtaagtattgccatggcttaaagcctttaacctatgccttgagctagctcattgactatcttcctactcaatcaggagcagtttcggtgctaattctgatttccttcgtcaattcctgttcttcttcaatgcaaagaaagacagtgatattgctatactctgtcaagtctgcaatttgctgttatattatgtcaaacatggtggtaagtaccaatgcaccatactactaattaccattgctcttctactatgtgcaaaatattatgtcttgctgtttctagtgctatagggatattaaatctatatatattgaccagagaagatttaattctaattatatccctatacaatattgccatatgagcattgtatgctcaaattctcatttgtgcctcgcactggtgatcatcttcctttcttagccatgaccctacttgtctgtttgtatgtttttcagtggcatctgaatgatgattaaggatattaaatttctctgaacctttatattatttgattttatttgcaaaacatgaggcttttgtctaggttgtgggatgtttgctatggcttgtattcttgtccttatggtgaacctttcaatgcattattccttttttttcatgcaccgagtgtaattgccttcctttcattttcgtttaggagatgttctaagactctttggtggtacaaattactcctcactggaacctcttgtgattcacagggttaaaaaacttgcactcatttgtgtgcaaactgtacatcagaaaaggtgagttcaattacagtaaactggtatatatatgtattgttttctgttcttgttttcaatcgcataatgcatattttatttaattgtctggtggataaaaatcacttatgttattctattgcttgcattatgaagtttctatggtagaacctggtaaacatgatgagtttcacttaatgaaacacttctatctcgagatacatgttcaattcaatgaacttcttttagtggaacattgcattgcaaatttgcaatctcacttggggaattcccacttatccttaatgtgaacttctgttttttgtgtcagtaaaggaaaaaaatatcaaagatgtgttgcaattgttgattttgctttctcttaccatccatgatccatgatgaaatgaacataattgtgtttgacttctttattatatttctataggcatgattggggcagtcagcttttgatgccgccagaaagcacaccaaagccttgtggttcattactcgaaactgccgcttgcttgataaatcctaagcttgcatggaactgcaaggtagttgggtatcttcagcggaagaagatctattgcttatttagggggattattatatccataccggtaagttgtgtttctgtattacggttttgtatttgtctactatcagtgcctacaccttttaggttacttgttgaccaaaatgtattaataagtgacaagtccactttctattgaaaatatacctttcttcttgctcaactctgatggtatatatcattggtcttgtctctgaattgatgaacatagtaaatctttatgattctttttttgtgattatgattcagcaaactgcaagaaatttggagcataataacaatacatctgctctggagcaagttcttatgcttattgcttcacatattggcgatgatccgtgttgttgtccagtagtggatccaagatggagtttctcctctcagcttctatcgattcctttcctctggcatcgtttatcacacttcaagaaggtgagttgttccatatttttttatcatttttttctgaagatattcatgtctgggaaatatagaaattgcaaaatgagatttcctatcatacctagtctttaaaatgtactggtgttatttctccattaattgaaaagttttgattcttaggagtttgtttaaataattagacgtttaaccagttattgcaagggtggtatatttgagtatctgatcatcgttacttattacttcaggttttctcagctaatggactcagcaaatattatatccatcagatagcttgctttttgcctagctgcgctgatgttcttccaaatgatatatcatctaatcatccaggttatgcatgtgttcttgcaaatgttcttgaagctgcaacctggattttgtccgagccaaagtttgcttctgaaacagtaggcattctacatctacctttcaagttgcagcaccattttgttgctttcagcattatatgatcatactaatattgattaaagtgagaggtcaccaaaaaccttgactttaggaaagagacttttagatcttgttatggtgtggtgtttatagagaaggcatttggatcgctttaggtccaatagctatattgtagtccctgtacaatattttggaagacacttagacccctctaagctccatttgctttgctattttatttaattagggttttgaacagggttggaaaaggttaagttggttggcaaacttaattggtctacgtacacagcattccttatcttagcttatcatccttcttgaacagtcagttgtttatgttaaaaaaaactagagagggaattgttgctttatgtcaacagtctgcatgcacgatcaattcttttttcatcttaaaattatttatgatgcatgcagttctttgattggccatacatgtatgaacatggaactaatattattttatttttctcgcaaaataattttatactatttattttttataactttttttaatataatgtatattatgattaaaattcatatgcaatcttcttgaatatgccaagagccatccctttcccacttcgttctggatgttcatttgtggatacttgaattcttaaaatgcacattaaattattttgattatgaatatcttacatatattttatttccaaaccaggcggctgacatcattgcagtctgtacatcactgctggacgcgttgccaaccattacatcacctaccggaagtaagtatcatgccagtaaaaatattccccattatttgataatatgacttgctaatatcatgcagtagcattttctattgccatttgtttctatcagagattcttgtgatactgagtaacacttgcaacatatcttctgaagtctaagtaatacacctgcagaagtttgttggaggcatgcttatgtggctcaatatttgcccctaat

SEQ ID NO: 6505 - DNA, 50178 bp, Oryza sativa
  unsure (1)..(50178): unsure at all n locations
aattaagtattaactataaaaaatttaaaaaatggattaatatgattttttaaagcaactttcctatagaaactttttgcaaaacacacaccgtttagcagtttgaaaagcgtgcacacggaaaacgagggagatgtgttgaggactcacggcaaagaacacagccgcatatatttaaatatacggttgcacaggacatacatagcttgaccccttttatacacaaaaggtaatatgtaaataaatgttgccgtcagacccatacacaaagtggtgtatattcaaccgttcaccgagatacctagatcggctaataccgtctggcacccctcacttaagtcgggttcgtcatccggctaattaacacaaagaagccacacatctcaaataaagaattaatctcaccaaagggacctcaattcaccagaagtattaattttccaccaatcacatagctccacataggaagcttcacacaagaccacaaagatagtagcacaacttcagccaccttagtcaagactctatctcaccttggtcaagcactcaaagcatggcgacagcaatggcagcagatgcatgcatatgagctccaaccaattagtgaggagtgagcagctcaggagaggaggaggagagaagtagggagtgagggaatagccaacaaatcagcgaaatgcaagattgtgccccatccattgcaagcaccaaattttgaatcccctatgattagtagccaaatagttcttggccaaatactcataccatcactatgtcggctaggaagaggagaagagaaatcagcaaggagggaatgtgatttacccaaggaagaggaaaggccaatgcatcggcgaagatgaacacgggagcacaaccatggacgaacttgtcacctaggcaaaggtgaatccctcaatacttggctttccttttttttttagcacctagcaaccaagcatctgttcccctacacctgcaaatcaccattagggccatcactaaattgcacccatcactgcacaagtgctagagccagagagatgagagaaggagagagagagagcacccgcagccgcagccgtagctgcagcaaccaccaccgccacagcagtagccgcagcagagctgatccacactagcaatggtagatcggtagccatggcttggatgatttagttggggaagggagaagtgccttaggaacagcagcaaggaagaagaagcggaggaattactgctgctgctgccttatctgttcgagagagaaggagagaatggaaggggattaaattgctagatgtacactactagactacacaagtcattaaattgaacctgctaccggaatagtattgtgcagttcaagcttagagttagataaattagctattaaacataagaaagctggcacaataaaataaactctgcagagcacattttaattggagagcatttgtatttcttgtgctgaaattttattgaagcctcagcgtatataacaaatttcaggaaagaagctagagttggaacgtgtcaattggcagtagtatattatttcagtttcgatcacagaaaactcaggcaagtccctctcatttgatcatgttgatagagataattctatttcaacttaaaaacctatttcataaaaatatttctcctagtattgcatcaatatatattttctagaataatgatatgaacgatgatgatatgattgacaagccgatgatgatggagatcatcgggatactagtatggtgggtagggggagctcagggatgagatgattgatgatgatggcaggtcagggctctccctacatacggtgtataaatataaggactaatcaccccatcattcgtatcagagaaccgtatataccgtgtcaaccatagatccgtcttaagatgggctggacctagtaccttatcaagtttattatactccacatgggtacgtagtagtagaatgggagatgatataaaccccatgaatgccgatgaagtgcattccaagcgcatatagtagcgcggtggtgtggagagctgataggctctacacaaacgtggagtgtagtaaattgaagtaggggaaaagttatgtactcttagcatggtgccgtatctagtgaagtgcgacaatcaaacatgttaagagtagctatgggtacagtgatacaagcctgcgcagtgctaaattaaatcgtgattcacgcctgtctcctggattggagtctacggggagttgctacaaactctattcaatgtacgagtgtactctagcttttataaatctccttttgaaaactcttttacaaaatagaaatatactttacttttgatgacaatgaaggtgatgatgttacgtaaggtatagtattgtagtatatagagttatatattattattcatgcgtgtacattttgctactaatgacttgctgagtacgaaagtgctcacccttgctatataaccccctttgtacaggtttgatcccttgcaagagtgagctggattagagatggccttaatactcctagggacgaattaaaggtagctctaactattcctctgttgcgatctctgatggtggattattatttggcaaaataatggttgttaaataataatctatgttctcgcacatttatctttagtgataaaagtgtggggcgtcacaaatggtagcaatgtaaatccttcataccatctttttggatcttagacatatgatgttatcacaaagaagttactttctacgattttgattcaacctgcagtatattttaatactgacagaataaagaaattcaaaactgatggaaaaatattatatacctgaattgcttccatatctcaaagaaggtgcaaataattgagattgaaatgataactgcaccagggccgtctatgtataccatgccaatggtactaccgccagtgccaaccacaggccctccttcaccaccctgcattaaataaataaataaataaataaatactactatgtagatggtaaaataaatagcaagtgtgaagaaaaggtaaatgtatcagtacctcaggaacatcacaatccacaaacatgtaatggtttctccacatcaaagaaccatccgaccacgtgattgctccacgcctcgccaccagggacatattttcgtcccgagacaaggcaagaatttcctggccatactttggggcggacccaaaagcggggacctacaatggtagttcagacgtgatctccaagatggagagattgtagtggcgattcatgaatctcaaccgtccctgcacaatagacttatctgggagatgaacctgtagctggaagatagagagagaaggcaatgcgagaaaaagaaaggttaatggtgtattgttacttatcttaagcacaaagagacggaactaatactaaggatatacaagaaaaggacatcaatttgacaatgataatgtttgagaattgaaatcagagggcagagtaaagttcacacaaagcaaatgcacagcagcccagctacagttagcaatcatttgaccatactatacttaacaaaaatggcaatggaactcggatgatagaaacatggggattagctaatggaaatcggtcatgcacctcgggttggggctcatgcggcttcttcttgaagtaagtgaagagtgtgaggatcatagcacacttggtggctccatcccaactgatgacgattccggtgtgcggagagatcaatttgccctctgaaaaacatacagttgattagaaggtagctacattgctaggagctgataaatacatatttttatatcgggctactgaatactaaacatattttctctctgcgacacattttcccatttgttgctggactacacatgcctatctcggtagctttcttctatgtcaccggcttttccctaagcatcggcagctagttaagcttgatcaataactagttcagcacaaaatccacggtaattcccatgtggagatgcagcatgattttctcatgtaatgctaggtagggaatgcgtaaaacaacgcaattaacgacacgcgacatgctagcacatggctcacttagtagcttatagctgcagcaaatatagtagattcagccagtaaaatctgaacatgcctccaaactcgtactacgatgtgtccatactccaaactaggttgccatattttgggacggatggagtaaattaccagaagatgggaatgaaacgcggacaattgagcgagacatgcccaacaccatgttcttgtgagatggggtaggcaaggcggccgcggtggagggctcgtcttctttatcgcgccggagagttaacttctgaagtcgatcaactgaagaacaagaaatggggagaaattaacatggttaataatgataggtatacaaaaaagaaattgaacaagaaacagtggtggatcgaaagctgaaaccaccttcgagccgggtgatccgggagcttcttctgacgcggggtgtcgtctgcgggtgcatcggcgggagtggccgggacgccaatgtgccatgcccctccctgtgtatcacacctgccgccgccgccgccgacatctgcgcctgcttcttcgccgtctcctcctcaatctctctcctcttcctcttcttcttgttgttggaagagattcccggcgattccaccgcctgaatcggaagaaccagtccaatctgctttgctctggagcgagtcaacctcccggaccacgattcgggactgggattgctgccgtcgtgcgagcggagatcggaatccggcgttgatttggaccgggtcgacatcgccggcgacgatttgggagcgtcgtggccgcctacggtcaatgccgccaccgatctcctcggtttggggggcatggccgccccccgccgcccagatcgccgccgctaggtaattttagggtttttgaaaaaaaataccgtgcgttgcagggttattttaatcttattattgtttttttttctagaaactatatacgagatttttattttaatactacttcatccgtttcacaatgtaaatcattttaacatttcctacattcatattgatgttaatgaatatagatagatatatatgtttggatttattaacatcaatttaaatatgggaaatgctaaaatgatttacattgtgaaacagatgaagtagttccttattgggatgatgataataatgtcgtttttttatggtttggcgagagtcataaaacaattaggagtctaactttcgtcccaaattagcatgtgatgtttttaaaaggatttcttatacgactccttatgtattttcaaaagcaaacgaatttaaaaacatactcagatacggacgacgtaccaaagtatcagcagtatcttcaatttttataatagtatattttcaacattaccaaattttaataatgataatttttggctcaatcaaattttggtaaattggttattgcgtttagtttgaaaccttgtcaaatcttgataaaatttttaagattagaaacttcttgtattatcaatgtttagtaaggtcgtattggttagaatatgtttgatttgttaccttactaattgttattcctttcttcccaaatttatcatcatatataatagcaggggcggaggtagtgtatgggagggagtgtgggagggggtgcttaggaacctgttgaagaaatttttttagttataactcaccatttttcatcatgtgtacacctccctcaatataaacttagacacacacattagcttaaacttgatcaaaagttgactaaattaagaaagaagctccgcccatagagtaaagtatacgaccggtccttaaatttggagcaatgtataaattagcacgtgtttgaagaaaaataaaaacattgttagatcgtggtgggtatacaattgattttatcacaacaatccagtagaagaaaactgtgcaacagtataatcacgtccaaaacaaatgcattaatagaaaatatttaaagaaaacatatttttttgaagcttgaagcaaataatccagataaaaacaaggcatcttttatcattattcttttgggtagtttttttttaatatataatctgcccattctaatttaagtaacctggacacatgtggatttatggctggttattcttttgtacccatagagagagaagagtaaagctttgaatatgcaccaataatactcaagtaattaacaccaaattaaagatgacattaccaccgcatatgtacatgtatgtattaatgtatacatataaaactaatgtatactcatgtatatacaaccgtagcacatatacacatacatactactatacgtatgtacatacacaccgacacaatcaacaaacaaattaaatagccaggtcccgtataaaataacccctattttatacgtgtcaaaaacacgaaacaaaggaaaaaaaaagagaacaaaaaaacaaaagaaaaaaatccgtacacgtatacagcgcaaataatacgctttgtatatgtattacacctctgatgattaattaagcctaatcaataattaaataatgaatcaagaatggctaatcaatcaatctttcgtttgctccagcacgtccaccatgagctgcatcaccttcacctgcacctgcagccgcgcgatgtagtcggcggcgcggaacaggagctcctcgccggaatcctcgccgccgccgccgcccggcacgagtctcctcagcgcctccatcttcctcctcacctccacgcaccgcctcatcctcctcctctccttgttgctaccggagttcttgcaggccgccccatgattactcgccggcggcggcatcaccgccggcctcgacttcgccgccgccgccggcgcggcgtcgcaacggccattgttgatggtggcgtgtgcaaccattgctagagcagtagagcttatattagcgaagtagtaacaatggcgatgattatgatgatgaagatgaagaagaagatgatgatgatgtgtgaaaatggctaagtatgttagagagagggggtagagatggttatatagaagggggttaggagggtacaaggctggagctaggttggaaggttgggggtatatgtgggggaattaggtggcatgaatggaaagttagagattaattattgatatgtgatcacaagcttaattaattgcatgaaacatggctagctattagatgatgtgtggataatgctctttacatgatacaaaatgttatgttaattagtgtgtgagagtgcatgcatgcatgggagaggaaggaggctagctttgcttgaggatgaggccatgagggcatgttctcctaactcaaggccacatgccaccacatgatcatatcatatataccttaacacagccaacaacacaacacctgtctctctctctcatgtatccaagcacaccaccaaaccaaccaaccatgaattagcatgcatgtaagtgcatgcactagctagctaagctaagctcccttttgatttgcctcctcatcacaacaccctggctatacccttgcatcatcaactctctaatatctctatgcatgtgttgtgtgtcatgtggactgctgccacctcagcaaaagttcatgcatgcatagagagaaaaagtctcctctcctctcctgcatcatgtgcaacatgcatttttttaaaaaaaagatgatatacatgtatatacttatgtagctagtgcatggtatataaatgtaccttgtgtgtagttaagtgtgtttagaggatgctattataatatagaatcatagattatactcacattgtgtgccaccatgttcccctatggggagctgatcatgatagccacccaatgtgccatgcaatcagggcaaatggagatattaatttgcaatatattgcattgcacatgtagattaatctccctgatttggggcttgattttgccatgttctcttctcatgctctcccacaatgacaaatattctcctcttggccaccactacaataatatgtacatgcaatgtacctcatgatctctgatcctgcatatatatatctgacgagccgacgacacgtgtcactcgcgccagccgtcgatctgtctatcaacagcgcgatttgcggaacaagattaactatagttggtggtgctgcccatgagcaagcatatgtattgaagatatatgtgcaacttctaggaagattccatggagaagattatgcaattgatcatataattaatgatgatcatctagttagttaattatgttcttttagtgaaattagttaattatgttgatgcatccatatgtggctgcagttgagcaacagccagcaggtttggttggttggttagttaaggttaattaagaatgcaattagattaattggaccgtacaaggggataagtctaccttagaaacaaaggtcaatgtgatttgagttattagtatatagttttggtgtgaaatactactgaaatggacgtcaatttccaggtcttagtttgctttctccaatacgcgttttgttaatcaatcaattagtttattatccctcattctgctgcaaatgaactgcacatgcatgctcgattaatttttcccttttgttcttgataccttaagctagcagctgattcacaaagattgaaatgatttgaataaacaaatgaaaatcgtgaaagttctctgtagaatttcaaaagattctgcctctttcggcagaaatctgttgtagcaaaggagcaaaccgaagcagataataatacactttattgacaaactactaactgtcacaaacttgagcgcgtcaggtaagtttcagatcctaaatttgtgtaaaatattgccattatcacctagtgtcagatcagattattatctcgatgaatcaagcgaggtaagaataatcttcgattaattttccccttttctcttctgataccttaagctagctgggtcacaaagattgaaatgatttgaataaacaaatgagaatcatgaaagttctttgtagaatttcaaaagattctgcctctttcggcaaaaaactgttgtaacaaaggaagcagataatgcactttattgacaactactagctgtcacaaacttgagcgtcaggtaagtttcagatcctaaatttgtgtaaaatattgccattatcagttactgtcagatcagatcattatctcgatgaatcaagcgtggtaagaataatctttgagaaatatttgcactaactaattcctactcgtctcattggaagaaaaaaaaaaaggaacattattctgaattttacaaatgagcccctgacgacctgacgttggcctgaattttacaaatacgtgtttctgcgtttgtttcgatcgggaatttcacacaagtccctgtttatttcagagaatcctacatttttgcaaatgagaccttataaaatagtattattccatgtcagcccttttcgtatctcctactattatacgcgatcagatcaagccgttgattccaagatcgacggatggagatgcttctccggtctccaagatatttccgccgccgatgaggctatcgcgattggctcagtgaagctgcagccaccggagaagccatggcgccgccgacggcgaggtctctgctcgcctcccacgccgccgtccgagccgcggcctccgctcgcaggggccgcctcgccggcgaccaccacccgccgcaggtcgcggccctccggcgcggggactgggtcaagctcatctgcggcgccagcttcgaggtagtagcacacttccgcttccttccctgcaagcgactgagttgcgagttgtagaagtggggatggaggagcagcgctgcgaacggagtagatatgatgagaaatgagagagagagagagagagatttttttttttttgctcttgtcattttgttaattttgcaaagggaaacccagctcaattgacctgtcaaggaacgatttctgatgaagttggtgcaaatccctcgtctcggggacatcgattttgaatttatattgagtaatgaaactagcaatggtgatagtgtgaatggaaattgtgaaatgcttgggatgtgattttcttgttcttgtgtaggatgctgccgatgtcaggaatctctcccttgtatacacgcttgccggaggtatgcttgttgctctaattataaacatttttgtggagcatatatgtagcatttcagaattcagactggcatcataacataatgggtggtgtttgaaaaatatcatgtcaacttggtaaaatagctgttttcaggaggtggttttcctagcgacctccttttgtttcgacagcttcttgtcggaattcgaagtttgtaaatttgtgcatacccttgatcttaatgaaatttggtccgcctctccttcggcagacctggcaaaaacttggtaaaatagctgtatattcagtgattccattgtgctaggttaatctactcttgataatcatggactgattttgtgtatgcagtggattgcattgattgtgcagcagacgcatctgtggtgggtgcagtgaatgaaggtattgatgtagcagcctcaattgtgccagcagttcaaaggccatgggtgatggttagtgttaatgacgattgcagagatcttcatttccgtaaagctggtaaatgatgtgctctttacaaaagttgtactctatattttgagtttatttttggatatttgttaatgccactttgaaataacagtctcgtttttattatcctcatttgagtatggaaaatttgaaattaaaagaaagttctgctgtatcatgttaaatgaacttggtttcctgctttcactagcaagacctgttgcatgtttatggatttctgaatacctttgttctttgcttctaaaggtttccacttcctttctcttttctctagaatttgatcctgaggattgcccaccagattgctcaaagccatgtgagaaagtctgtcctgctgatgcaatattgttagagagggttatgattgaggaagagcactctcagtctgatccttcatgtggaaaacttgaggtatcaattggtttgtttactttattctgcttttgtttattctcttcatttcattttatgacctgacctctgatgtcttgtgtagggtggtgtaattacggagcggtgctacggctgtggacgatgcttgtcggtttgcccttatgacagaataagtgagcactgagtaatgcattccttcgtttttcctttatggcatcatgacaatagtttacatgacctttgttcccacagtgttctttacatgtatatgtagcatccctatgtttttaagcataatctgatacttccacgcctttgtgtatcttatagaagctacaagccttgcttgaaaacatttcaggagctatgtcgtatgttcgagatcctgctatgactgctgaactgttgaaaaggaatgatgttgatgcaatagagatacataccactggaaagtacgtaagtttttctttgatgatttttataccaagtaacatttaccttttctccattactcagaccacttaatctgaactttttttgctactgtaggggaactgatatgttcaataccctctggagcaacttgggtgagtcaatcaataatgtgaagctgattgcagtaagtttgcactttgtttcatgatggatatgtttcctattgcatttaccatcataatgaataaaaaaaaaactcatacctttcaggtcagcctgcctgatgttggcgattcaacagttaatttaatgaatgcaatatacacaacaatgcagtcccatcttcaaggctataatctttggcaggtttgctatgaagagaacaaatgtatcaactgcagattctaatttgtctgtacatgatcatactgttcataactatacttttagcaatttgaaattctattaggacaattattttcttggtgttggctagttgattctacattctgtttttctgtaaatgctttgctggtccacttcatgtcataatctgaaccttatccatatccatatccatatccatatgctcaaaatctgaggttattcaagttaccttatttatacaagcagttagatggccggccgatgagtggcgacataggccgaggtgcaacgagggaaacagtatcctttgctgttcatttgtcttcaatgtcaaataggcctcctggtaaacaaagtcaatctttagaaaaaaaaaaactcgttatggctttgttatcatccacatttctaagtattttctaataatatggttttgaaggcttctatcagttggctggtggcaccaactcatacaccatagaatccctaaagaaagctggtcttttccaatctacaacttttcctggtattttgtttacttttttttaacatgtcaccggattttgtttactttgttccttttcttgttcaacttatgaggtcaaagaatactttaggcaaaatcacattttaagcccttgaactattaaactgtgtgcaattaaacctatgccttttgaaactgagcaatcaaactaatgttttatattctggtaatatgtttatttaatccatgaactatccaactttatttatcttactgaaacttaggggcagcaacctctggagtgactgattgtcagcaagcctttattggagggatagcttatggcggctatgctcgcaaggtttgctcttgatattacatttacagtgttttttattggaatgatactaaagtattcagcaaatacctgctagaatagaaaggctaaagcatagatactgtcagtggacgcaccaacacctagcaactagttaaatgaatgttgatctctatttttcttatttatgagttgcatttctcatccgataggattctaagtgaaatcattgctagaatagtcttgtatgtcatgttttgctcattttgttttttcttatgagttgcagattgttggaagagttctacgcaaaataccggcacaatttggccatgcacgcattgaggaccacccagattatctcctggaagcattacaagaagctctatcactagtcgggcctgtgaaaggttacccaaccttgccaagtctctgaaactagtaaatggcatctccaagttctcatccagatataggataactttgatccagttagttagtatggaagttgcattgtgaaggtaagccaaggtgagaaggtattctgccaactgattgcccaatgaacagtttgggagttgggaccaaccatttctggctaagtggcaaaaatcagtaatccaacagtcagcagatcaatcactaacttactcttaagcttggtaagtaggagatattccatctgagattggatgtcacaacatgctttccataaagtccatgtaaaactccataagaaaggtgtaaaaatccatttgttgtttgcatgtacaccttgaatattctatatagttcagtggacaacgaaggttttgacgtggacatgtactatagaataaaataattcaactttgttgcattttaaatggtccagaactccagattctagatgccaaaatacttctagaaaagatatattgcattttttttcttaatatcaggtcaattggatgtggatgatctttggataaggaatcttataccatgagcggtcgctctcgcaataggcacatgacgttttggactgatggtgcacgcatatattattatgtatggtgtttttactttcttgttttgtaaatacaaattgaacaacttgcacacatgttttgcttttttttcaagggacccaattggttgtcttattgttgattgagaaagaacatgtgcaagttgctaaattttgacattttatcttggagcaattaaatttaaagttctacaatttgggtggcattactatattattgatggattataaataattgaaaaggtctcttattatgcgtttggttgaaaatatggaccataattaaaactttgttgcttgttttatcaccatttttcctcttcagaaaggaagtgcacggtcaactcatcattctgcaaaactagctgcgccttttctttttgaaaaaaaaaatcttagatagaagaaatacaggttcatgactattttgaagaacaggaacagacaaattaacacttgaatactgattgacaacaagctaacaagataagaggaaccaaacaaaaaaaataaatggagaaacacatgcatggctgactgcttgtcaacgtggatcatcatcatacagatgctggccagctgtcatgcagaaagagcacaactctagacaatttctctcctttttcctcacatgaaagtaaaggccctgtggctcaacaaataatgtgaagatctctcattttcattttccttcttttccctagagaaagtagtagactgcaccaataaatatcctaacagttactcttcaattatatgttaattatatattgtttgactcttttttaattaaatttctataagtttaatcaagtttgtagaaaatataccgctattttcaatacaaagtaaacatattgccaaggtatatttaatattaaatttaatgaaactaatttggtgttacagatgttgctttttttcccaaagaactttcataagcaaaatatcaaacgacttataattttatgggggcgaagagagtatttattaagaaagcataacagctttgattataagccgtaacctttttagcaattaaaagtaatttatgtgtaatatatttacatatgtgtttttataaaatcaaaaatcataaaaataaaatataaatttaaaatttaaactttgactacgattgataagccaaagagcaaacactataacttttttaacacatatttgcatcaacaaatatcctcttattgaagaaaaataaaagtttaataagaaaaatagattaaaaaaccatccctggcatcaagataggcatgtctaaaactctggatcaaacaaatatgcttatgaatttcttgtttgagaataaaatagtgaaaagagaataaagggagaacaagcaggcgagtatttctaccttgcttccccatcccttccagcacagtgacctccacaagccaagaagctgcaagagcaagccaagccaagccaagaacgaagcagcagcgagagcgaggtgagcagcgagcatggcgggcgaggcggcggcggcggagcggtgggtgggggcggcggtggacttctcggaggggagccgcgcggcgctgcggtgggcggcggacaacctgctccgcgccggcgaccacctcatcctcctccacgtcctcaaggaccccgactacgagcagggcgagaccctcctctgggaggccaccggctcccgtacgctcctcctctcccttctcttccacttctacctcccatggcgctcgcgtagtcgcgttactgttcttgttggttgatccatccatcccatccgaatcgaagtcggatatgatctgcatgatgatggattccacgcgtaggctctgttcgatgaccagatcgagaggattaatcagtgatgcttttcagcttcttttgctgagtgattcagtgatttactcttctcagtcactgtggactgcttcttggatttttgcttatttggcgcgtagtagatgatgtttcttgattggttacttaagtttgggtgatttctttgtgtgaggttgggttagtttgcccattaccataatggaatcgaccgttgatttaccagacaccattttgtgcaacccagaaacgatgattgactagtggattggccgataatttgttgctaattgtgtactgccagctcctgggatcattcaccttgatatccttcaggcaaaccatagtgcatcatctttgtctcatcaaacatttttgcaagaacaggttacttggctagttggctagtggcagaatcacggcctagtgtacttaccattaatgggtgactgtgtatcttcagaatctttacccacatcctgctatatctccagtttaagattcggtgaacagtttaggaaaaatggtagatagttcatctttcatatgcagttgcgcacaatgtccatgtttcgcattataaagatagatgtcacaagctgtccaaacttttggagtttgctcctggtcaaaaaaaaacttttggagtttgcagctagagtatttacctacactgcacttaataatactgtgagtattgaaacactcatcagtgaaatattttgtcatgtacataaatggtaagtattggccatgtatttgtgctttgcgtcgccagcgcacgctagttgcatgtgagggattatgttatgctgatctcttattaaggtgtgtgtttgcatgatgcatttccaattcagactacttgcaagtgaaggattctgttttgttgatatgttattaaggttattctgcaattaattattattcactcagtgctgattattctagtctgcaaacaaggactgcttaacatcttgatttcgttgggtttttttaatatacagcattgattcccctctcggatttctctgaacctacaattgcaaagaaatatggagcaaagcctgatgccgaaacattggacatgcttaatactgtggccaggcagaaggaggtgatcactctctcaataccatatggttcaattaattggcactcccttgcaatattataaggtttttggttcttttatacaggttgtggtggttttcaaagtcctttggggagatccccgtgagaagctatgccaagccatcaacgaaatccccatgagctgcttggttattggaagcaggggtcttggcaaactcaagaggttgtaaccaaagcttttccccccattgttattgatgcacattgttcacatcattgccagttctaacctttgcattcctcttcctggttccttcagggtgctgttaggtagcgtcagcgactacgtcgtgaacaacgccacttgcccagtcacagttgtcaagacagccgatggttgatcctattgtcataaatatccatgtgttatatagtctgcttaaatctttgtccatctatctgaaacatattgaaccaccatgcagtgtaattgtaataataaacgaagtcaactgaagacgctcagttgtactttgtgcttgcactctctgagcctgactatgaaatggatcctgctgtttttcttagcaatctgtgctgaacttgagcaattttttttcctgttttttcacactgaatgtcttatcagagcacggttcatgcaagatcattcagcatggatcctgctgtttcccatagcagtctgtgttgcctgtctagcaattctgatatgcaatgtgacgcaagcaacttgagcatgttcttttttctgttttttttttcacactgaatgtcttatcagggcatgtgcttcatgcaatatcattcttcagcaagggcctcaattttcagaggctcctttgcacgtttttgaatcttgatctatctttgagatgagatgatagcatgggctgcaatacgtgttccaacctgtattccaatcacgaacagacatttttgttttcgattgtttgtgatggaaatcttggaattggcaggactaattttctgttgaacctcatgatcttgggagtattatgctacttgtcacaatgagctgattgtgacagggaagtaattgcatagagaaataatgcaaattctacactggaaaggcaatatctcagaaaggaaggcagcaaatatatgcatggtagaacggtgagcagccataggaaatagaggttcatcagccatgacaattctcatcatgctgaaatgctaaacatatggcctaatgccatttacatcaacaaccagcatcacagatacgatacaggtatgatcagtcatcacgacaccaaactacagacagcaggttaaggctaacacatttcaaatccattcatcaaggtagcaaaatgtgcagcagagccaccattagaagcagttcatagtggtccaagatagtcaccagccagggtagcaaggagctggaactggcgatcggcttccatccagcggaaccccatgaccttgaagcgcacgacggtgtccttctccagcttcgagtgttcattcatgaacaccgcgttctccccaccaatgtacttgaagtcgctcatcgtcttctccgacagaaagatgctttctatcggtccagatttgaggaaaatgccatgcttgaggatcttgtccacggagccaactaagacctcgcccttcataggcttctgcgtgatgcaggtgaacgtcaccgggaaaagaacgtctccggtcagctcacgcactttcccttctgatatcgccttcagctcactcacagcaatgtagtaaccatgatccttggaggccttccggtttgctatatcctccagaaggcggacaatgacagccttgcggagcaagagaccctgggggctcagctggctaggtgagatcaacacattcaaagacatctccaccttaaggaaaaccatggttgattgcctgtcaaaaagacccaatattcaagatgtcagcctatgcccatgcaacagtctttcaataaaagtaacatcaacaaatgtttaagagattgcggcacagagctaggaattgcatccccttctgctaacaaggatgaattgcacacttgcaatgttgataaaaggaatataaaatttcaaacatattttcaaggacatgacacatcaacagaaattcctcatgtctgcatgaacaaattcagtatatacacaactaggagcatcagattaaacggcaaagaaaaaaaatggataatgattccacttgatggaaaagactgggtatatttggctttggccttgtaacgccaatacgccatcatgtaaaaccatgatccaaccttttaggtgtatacacttaaaaaatttcaatttaatggtattcttaattcaatgctgcactttttcaggaatgtaacatctatgatatgcatatcacacacaacaagtgtagagaaggaaccagatctaccaaaagagttgtgctataatgtcctcctacataaacttttcacaaatctagctataatgtcctcctacataaacttttcacatatctccaagaaaaatatagtcaagggaaatgagaaaaccgcaaaacatttgcgcagcttgcaccatcagcatacatctatttgttttagcatcatcagatctgtaccagccccatggtctgaccagagataccagatccagtgcctaagttgagccggtccaccgcagagatcctagttggcccatacagttttcaagttgccaaggcaactcagcccacagttagtcctaaatgctagaaagagcccacagctggctttgaaacccagcaactacaagagtgagaacaaaccatttgagctaacagttgcatgtttcctgttgtgaaatgagcctacataagacagaagctccctgaattcatacaacattactacaatataagatagcagctccatagtttcgtattgcgaatgcacctacataatacaagacgttatcatcatacagaagctccacaaatccatacacttggataatacaacaagcatgtgattcaactggtgacctaattagggtacagccactgaacaacactggtttgttcccgctagtgcatttgcctactctcaagtgcacaccaggaagaactatcaagatttcctataacttaatatactagatagatttctcccatcattaacatccaatgctacacacaataagaatataacctcggataatgaacaaaaaagactccaccgatttatgaaagtcgccttgagtttgtgcagagcattttaggcgcaaatcaaagcactccgaacttgggacatggggggttcagttgaacccccaaattttttggggaacaaaaagaaaaaaaaactgttactggttgtatttaagagaggtttaaggctgtaaaaaagaggaggaggagagcttcttccagatctagactagaagagaagctagggttaacgcaagcaaattcccggtgggagagagagatgaatcagaaagaggacgtggatgctcaccaggatccccctccccctcccctgcgatggcgatcggcagccgcggctcgtcttggctggcgcaaggagcggaggagacgacgagacgggagattttcgtttacgccaagggggaggaggatactcgagtatcttctttcttttttttatttatcttctttttttttacttacttaaaagtgcacatttttgcgaagtttgagatggacaatctctcttctatgctaatatttcgaaatttttggccaaattttagaaatttttgtcccagagttattaatgtcattaggataattatacagtactaatcgaatctaactagtcggcgatggtatgttattggtatattgtagatcttgacaaacttaatggcatattatagaatatgaataaattcagtgacacacagcggattctctcttaaaaataatatagtaaaagcgtttctttatttcattcaaaacaaaacattttctacctaatgttaggagaacttcaagagaaggtaagaaaaagaggaggttggttactagcccaaatagacagaaactcatggttatgcttaaaatggaaatgagggagtccttgttagtgaacaaaccaaagtgtgttgaaagcatggcaacacgaaaatataaccatgacaccatcacaagctcacaaagatggaaatgttgttgtatttatcattggcatattgctctaggcccacatatcattctcgacatgcaaaatgttactttccggttcattacaaattaatctttatttctctacggttaaatttcagttcaaacatttaaagtgataattacttgtcgttcaaaccatcaaaatgttgaaagcgagaaaggttcattaccaaagaaatgttgtcttgaggccaaacggggcctaagggcacgtttggatcctgggcaaggctcatcctaacctcgcttagtaaagctacacgtttggaactggtaaaataatctggcttttggttttggggacgagctagctttgcagggcaagaaaattcttgctagccagtgagaaccgatttagctctccttcgacggcaaactccgttcgcgtgaaaatattggaacaagggcgatgcagacttctatgaaattggcgccgtaaaattagcgatgtttttcaatgactcacccaatcttgtcggcctcttcttccagatcttgttgtgaactctcgctcgctcaaattttgttgtaaattgccctctccaccaacccataaatacaacgaacaatcagtctggatctaaaaggaaaaattgatttatggaagaactcagcaacaagaggaactcatctgtagcagctagccattaatccttgccacaagaagcaaaaccatccaaacagaggagctacaacaaggctagcaagttggcaaatagatggtttagtgctgctaggctagctgggcgagcgaaccgaacgcgtcctaagttaatttgtcctattatatctaacctcgacacttgtactgcacaagacactagtgcgctcccttgaacagctttttttatggctttttcactagaagctgtaacaactttggtttcttttggccatctttcctccaattagaacaggattgcatacatcttaacagcaaagagagatgcaaactattaaagtttatcatcacaggaaaacttatgacatttacaactttgaaattgaaatatagcaagataaatcaagtagcctttccaagtttcttttgaccaaagaagagaaaagtgccaaagatctacatgacccagagttgttttattcaaaaaccaccattcgaaatgaaggtagctagatgcatgatgagggaaattttgttgcatatgggtgaaccccaaagcttacctaatggcattgtccgtcagcatttccagtgcgtccaaacctcaatgagacgcaccgtagataacttatgctcatgcgtcagatacacctaatttgaaccgacggtaaaggattctagacggtgccgtttgtagcggctttttcgctacttttcttggtgagatagaagacagtgacaaaataagttgcaaaaacaacaaaaatgtttatacacatgtacagcatgagctctacggtgtccctggagagcacaagctgtcaccaagccataacaaacggtcgaactgatcttgaacactggatccaatgcatggtttgttcagtgctcaaagagaacaccagcaaactttccatttagaccctcacaagccacaaatatgcggaaaaaaatgtcatattcaccctccaaaaagcttatacaaggacttgtttgtaattatcttaaaatacaggtgggtaattgcaaagtgagacatcttcccttctataaagagcaagcttagcttggtgatcaccaccactccacatctcttctccatcaagaatcaatcactcgctcgtcttctcctccattggagctctcgatcgagcttagctttgcgcttcgttcatccatggcgctcatcggcacggtggcggccgaggtgctcatcccgctcgcggcggtgatcggcatcctcttcgccgtgctccagtggtacatggtgtccagggtggccgtcccgccgcacgacggcgtcggcggcgccgggaaggtggagagggagagcgacggcggcgacggcgacggcgacggcgtcgacgacgaggaggacggcgtggactaccggggcgtggaggcgaggtgcgcggagatccagcacgccatctccgtgggcgcgacgtcgttcctgatgacggagtacaagtacctgggcgcgttcatggcggcgttcgcggcggtcatcttcgtctcgctgggctccgtggggcggttctccacgtcgacggagccgtgcccgtacgacgcggcgaggcggtgccgcccggcgctggcgaacgcggcgttcaccgcggcggcgttcctcctcggcgccaccacctcggtggtctccggctacctcgggatgcgggtggcgacgttcgcgaacgcgaggacggcgctggaggctcgccgcgggatcgggcgggcgttcgcggtggcgttcaggtcgggcgccgccatggggttcctgctggcgtcgagcgcgctgctggtgctgttcgccgccgtgaacgcgttcgggctctactacggcgacgactggggcgggctgtacgaggcgatcaccgggtacgggctcggggggtcgtccatggcgctgttcggccgcgtcggcggcgggatctacaccaaggcggccgacgtcggcgccgacctcgtcggcaaggtggagcgcaacatccccgaggatgacccccgcaaccccgcggtaagccacgccacgtcactctcctcgtcctcactctgttaaagattaagttaacacacataaaaattaagttaacgcacatgaaacgagaaagctattagcatataattaacttttctttaagataaaggatttaaataaaacccggcttctacatcccgaagaatgtacacagccaaccaaatccatacaaaaacactaaggctagtaaacatgattaactaagttttaattattgctaactgataaattgatatatctgatagtttaaagcaacttctgtataaaaagtttctgtaacgtatcgtttagttgtttaaaaagcacgctaatacgaacagaggtaatatctgaattttaatcagaaaagaacatgaccgaaccaattcgatctcatattttaaaacaactcaaagctgcttgcatgttgcatgcgagctcggttcgatctgagccactgcactaatctgaaagcaagtccagttggcctttttttgttgccttccttaaacattactaggaagcatgaaactcacgtgttcagtgttctctgctagctggcacaggcgtaacgcatgatttttaccggatttattcatagaaatataggagagagattgaaaatttattgtcttgtttggagaaaaggaattatttaaaaagtctcgctaggaaatatttaaattgtggacaaatttaaactgaatttgacttagaaatttaagtgaattcaattcaaaccaactttctttttaaaaagatcgattgaaacaaatctattttggcagttgatttgtgtatgcatccactttggattgttcttttgactgaatagctcaatatctgaatatttgtaatgattatttgaggttacaaacgaatgaactaaatattgttttcttttcgtttcgtattataagatattttgggtataatttgaatagatttatgcatgaattcagatacgtacaatatgtatatgtgcgcaaatttatatagatattagtgaatttagatgatgtatgaagaggccaaaacgttgtataacatataacggagaaaatatagagttgagatcgattttggtttgaaatagttttctcgaaagaaattatatatacaagaagattttataaaatgcttttatataattgtatcgtttaaaaaaccgtttaaaagtttgggaagcttacaaattcacccccatcgttcccttccttcaaagagaagtgatacatcatatatggttttgtacgtgcgtgtggatatgatgtgcgcaggtgatcgccgacaacgtgggcgacaacgtgggcgacatcgccgggatggggtccgacctgttcgggtcgtacgcggagtcgtcgtgcgcggcgctgttcgtggcgtccatctcctccttcggcgccgaccacgacttcgcggcgatgatgtacccgctgctggtgagcgccgccggcatcgtggcctgcgccgccaccacgctcgtcgccaccgacgccggcgagctcggcgccgccgacgaggtcgcgcccgcgctcaagcgccagatcctcatctccaccgtgctcatgaccgccgccgtcgccgccgtcaccttcctctccctcccccgctccttcaccctcttcgacttcggcgaacgcaagctcgtcaaaaattggtaaaagaaaaaaaaaccttacatagtgtgtaatttatttttttttggtttttttaaaaaattataattacacggcagacatacgcacacaaacaagaccacactcacatccctgtatacaatacattttttttaaaagttttacaattacacgggagacacacgtgcacagataataccacactcacatccctgtctatgtgcattcaacaacacattcttgatttcggagaaatcatgttaaaaacctagttacagtgcgtaatatttataagcaccaagatttgaatcttgttgggtggagccatgcacctatgactctagcagttgtacttgcaccaaatttgattaaattatggaataataatagttttgtctgaatttttgttgaataattcaggcacctgttcatctgcgtctcagctggtctgtgggcgggattggtgataggctacgtcaccgagtacttcacgagcaatgcttacgggtgaaaacgaattctacccacccaaattcgcgatgattctacattttgtaaaatttcaaattttgatgaaatttgcgttcaaatttcaaattgataggccggtgcagacggtggcgcagtcgtgccggacgggggcggcgacgaacgtgatcttcggcctcgccgtggggtacaagtcggtgatcgtgccgatcttcgccatcgccggcgccatctacgccagcttccggctcgccgccatgtacggcatcgcgctggctgcgctggggatgctgagcaccatcgccacggggctcaccatcgacgcctatggccccatcagcgacaacgccggcggcatcgcggagatggccggcatgccgcggcgcgtgcgcgagcgcacggacgcgctcgacgccgccgggaacacgacggcggcgatcgggaaggggttcgcgatcgggtcggcggcgctggtgtcgctggcgctgttcggcgcgtacgtgagccgggcggggatccggacggtgaacgtggtgagccccagggtgttcgtcgggctcctcgccggcgccatgctcccctactggttctcggcgatgacgatgcggagcgtggggagcgcggcgctgcggatggtggaggaggtgcggcgccagttcgacgagatcccggggctcgccgaggggctcgccgcgccggactacgccacctgcgtgaggatctccaccgacgcgtcgctgcgggagatggtggcgccgggggcgctggtgatggcgagcccgctcgtcgccgggacgctgttcggggtggaggcgctggcggggctgctcgccggcgcgctggtgtccggggtgcaggtggcgatctcggcgtcgaacagcggcggcgcgtgggacaacgccaagaagtacatcgaggccggggcgacggaggaggcgaggtcgctggggcccaagggctccgaggcgcacaaggcggcggtgatcggggacaccatcggcgacccgctcaaggacacctcggggccatcgctcaacatcctcgtcaagctcatggccgtcgaggcgctcgtcttcgcccccttcttcgccgcgcatggcggcatcgtcttcaaccacctctgatgaagctgagctccattgctaataaattaagctgcatgcatgctctcgccatgatcgatcagctgcacctgcatgcacgcatggataaacaagaagaagacgatgagcattagggttccttaaccagttgaaaccgataagagtaataattgtagctcgggataatgcagtgtcagatgtaatccaaagtgtcttgttgcttgggatatgtaatgcggtttgagacttaggatgtaatccaatgttgttttagacttaggctgcgttcgtgtggagaacaaagggagtttgtttgtttcgtttttcgcgtgcacgcttttctaaactactaaacggtgtgttttttaaaaaaaatttctatatgaaagttgctttaaaaaaatcatattaatctatttttaaagtttaaaatagttaatactcaattaattatacgctaatggctcatttcgttttgcgtatcttcccaattttctcaatcccctctcccccaaacacagcctcttaatcccatgtgtagtagtgtcgtcttaaattaccaaattattacctgttgataacacagcctcttaatcccatgtgtagtagtgtcgtcttaaattaccaaattattacctgttgatggttaagtttggggtcggcgttgtttttccaacgaaagcctgatttgagaacgtgcaaatgagcggtaaactgaacacccacacaatctttgatttgacacaacaacgttttgcatgaggaccaacagaacagagcaactttttgcctcgacacaattttgcaaacattggattgggatggtacaataaatcaagttgaaacgtgctttataagttcattaacataggtaaaaccttcctacaagtttgacgacgagtgcaatttgctctgtttttcccctaaatacgtagacgtatctgctggaaaccaatggacaatggtgcaagaagcagcagcttcatcttaaagtgatctcaaatcagcaatgggcaattcacagtggacagatatttgccatcaaaatcgtttgaatttcatatgttccaagctgtttccatcaaaatcatgtgaaatttaggcattccaaacagcccgacaatggtccacgttagtatatacaggataccaagaatttgttaccgtgtaaatggggggttttgagcaagatacttcaagctgttgtaaaatggttctgttacatgagtgacagcttagtggatcatcccataggctgattaaaaataagagatgtaaatagtccaatcgaagggcacattctgtgcccgtgagagagctcacattgatctttaggcggaagctaaaacagcaagaccctctcctttttgtctatagtgcagcaccaaatggcatgttggttctcagcttggtattcttctctttgagtgtcaatttacatgttcagctgagccgaaatcgcggttgagatatacaactttgaccaaaactatctcacctccgaccatgcttgctggctcgagggtcagaatgctatggattcaacgaccttcttcggagccaaatgtgaagcaattccttttcgtcgcaaggaaaagcaatcgacttgaagccaatagaggaaaaaaaatatttattgtcatctcactgaataaggctctgaatcagttgcttttgatgtatttacagtcatctcggaaggcgagttccctgcatctttggtacagtcatctccattttgatgagtggaatccaagcttcctgggtcatgttgtagattctgagaacctgggccttcctcccctacatcaccattgccttcagaagttttcgtgcttgaggaaggtggatggggaccctgtttatctgccaaattcgagcgtctgcctgccacactagccgcagcgacaatctttgagcagataaatctgggttccatctttggttttttgggagacctcccatcagcttgtttgtcatccactggattacgctttatgactaaggcctcatcatcctcatcagctttaacagcccttttgggaggtgggttgtaaccctcatcatcgtcgtcataatccacaagcccaccagatttagacctgaaaaaacaaaagatctgctaaacactggaactgaagtatgttttagagtccagaaattgcataatgtgcgcacagaatgtaaaacgtaacaagttattatgaatataaagaagaagaagccagtaaataaatcttcaatatgagttggcaggaagttatcgcaagttatagaagatgagataatgtaccttgcagggatatgacggatgtcacttcccttgggtaacttatccaaagattccttctgtgcatatgatgtctgtttatcagaatcttcctcatcactaaggtattaaaataaaaaattccatgtcagttaaggacgccatctatgaactcaattggactctttaacacaaacaagcagcaaaactgaagtggacaaacctgcccttgttgaaatagtcctcctcttctttgtcgagacctctttcttctggcttctttctcatgtcaactagactaatactttgtgttgtttcaccactctccattaactagcaagaagacatggagaagcattcaaatgaggcaacagtaacaacaggatgcaagaatacacagaactataagtttcaacctgttgatacttgagtttaaaggcctgaatgctccctagtttttcgaacctcacaagttggtcccaaaaggatttggtaacatgtatcacaagtgaattgagattttcctgtacaaataatgcatcaactgacagcacattatgtagcattataacaattggcaaataactcccgctaggttacctttcgtatgtattccaacagttcaaggacaacagaatgtagcatgttgtacctatccccattttcaacaaatacctcgataattggtttcaatgagttgaacttgataacatggctaagaagaagctcatcctgcagagcacatacaacactttatctcgagttccccaatgatgtcaatgaacctacaattagaattcaaactgggaaaaaaagtaaatgtcatacatttctagcaataacagtcctcatgaatcggacggctgccacgaccaaaaccttctctctcctatgggttaaagtaaggattttctccacggaattgcttcttaaaaagttgaccctacaagattagacctgccttttagcaaaacagcaagacatgagatgtccaaaggaaatattgaattaagaaaaaggaaagggaagcatttgcattgagtattacttgatcttgtaggggtgatgaactacacaaaagcataaaagctcgcagatgttagacagtatttcagtcttcacagaatggttttcaactcttgtacccacaccaactggactagatgttgattgggtaatgtccataggggaggaagccaatgctattacatcaatcaacttatcaagatgcttttcatgaaaaacatcaataactcctctctgcgacagaaagagataacaaaatttccatagtaactcaatacaaattacacgttaacagtcatgcttcaatattttgaagtgagcagaaaatcatgttggttcaagaaatatcaaaagtttcacaatttaggctagttcatcttacatagtttgtaggcatatttgtagcaaatccatccatcagaatcttcaaaatttccagaaattgacagtgcattccctcaccaaagtcagttaccatgccttgaacctgaaatttcagtaatagcgagcagtatttgtaaatacgctagctgaggcacaaacagcagatttgaagcttagcaaaaatgtattccaacattcctggacataacagagaaatggaggcacctgagaaaaatacctcaatcactagtaacttaatggttcaactacaaataaatgataggtcctcagattataaaataaccatcgctaccatttgcacacagaactttcccaagatttctgagttcattaatcagctgtacatcacattgtcaacggtcaagcatgcagctgttggtagtgtcgacaacaaacaggaaagagaagcatttgcatagatttgaagattaaaaaatgagaagagacatgattcgaactccaaaggctccacaacaaatccaggagtcgcaaagtgcagagaatatagctaaaatagcagaaggtacaaaagttgcagaacatgaaggccattaagaaatgtaattcactgcttggaccatgtataggacaggggaacataaatccaaaaccaggacccagaaaaggggtgcaacttacttaccagaagaccaagaagtgaatttccttcttgagaattttcttgacgagcaatatatgatctcagtaagttaggatcttgattaagaaaatatacaaggatgtctgtcctgcatttgccaaaaaagaaacagtgtgattagaaatagtatatgcaaggaaaagtcaaaaatataatttgctcattgctctagattgcataagttacccagctgagacgagcactttatcctgactctgcaacacatcagacatgatgtcaaacacaccttcactagcaagatccctgaacagggaaaagaaatgattaacctgctagaattgtctctccaattatccaatttacaaaactgcacttaaatgctatttatttgaacagttggttgcattattaatacaggtatatctgcatagcacgaaagaagacagggtaacaatcatgattcatagtggtgaacaatgtccttataaacacaaggagactgcgcttaagcaaatttgcattgtagaagacagagaacatgattcatagaatcatagtgttggcttgtcatgaggtgaatgagggtgcacaacacacataggccacaggagtaacatgacaaatggaaggggttttccctgaaacttatggaagtttatcatatcccatttcccatgtgatttgccaatgaaagtgaaacaaaaaaaatgaagctgtttacttttctctatcttctgaataagctaggaacaaacttcaaactaaaatgagctggattcacattactttttgtagagtatagatatatctaaaataattgtctaattttatctatcctccttctatcttatgaataaatgtgtgcattatatttgttgccagtaattgcctcgtatttgaagaaatatgttttctcatcaaaattaaatatatggttccattgtacacataagcaaactgaaataataagaaaaatagatgaaatactaaaccaggtacatcatcctgttctggggccataacctatcatcatcatgtttgtttgggcatcacacatacaacttcattactccctccatcccagaataagttaatctagtacatgatgtggcacatcctagtactacgaatctagacaggagtgtccagattaatttattctgggacggagtaagtactaaattaatttattctgtatgtactagattaatttattctgtactagaataatttatcctgtactagattaatttattctgggacggaggaagtactaaagagagaaggttctcaaaacaccaacctagatagacgtaattgctgaacagcctgcaaacttttagtgagagtacaaaactcaagcaaaaacaggacctgaaaaaacaaaatgttgtcaatccaaacagcatacacaagaataatctccccagctcccacccccaaacacaacacacaatcagtaacattatatcaatgttaaagaactgtgtgaaatgacatactccctccatcccaaaacataacaacttttgcatggatgggacatatcctagtactatgaagattcatagtattaggatatgtcatatgtctcatccacccaaaaattgttatagtactaggatgtcccatccacgcaaaagttgttatattttgggatggggggagtagaaggcaacaatgtgcataatacagaagtacaaactacaaaatatcaagaaaattgatgtctccaaaaactcacagcccacatcatataagcactcaaatgatgaagcaaatgttcagcatgcataagatattttggctcaactgcaaaagaagcatcccaatagtacaagatgatccaataaaactctttgaccagtaactggcttcagtaaagccaacacagtatctagttcacacaaactcaaccttggtttgtcttgttccctccaagcgcgcacaaaatcacaactcacagaacaccatgaaaacactttaattcatgaaagaaactagcaagcattgacccttctttttcttttccagcagctcagcgattggaaggggtagttctgttgaagatttgacagaacatactataaccttactaagattatgactagaaagaaaatttcccaggttctcatagggaagggtgtgtctaaatatgttagaaaaaaaaaaaccaacagtctcaccagttcgcgttttgattcagcagaaatattcgaagatctcatcttagcaaacagttcttttacaaaagaagcatcgtccttgagtaaacaaacaacctacaggagaatcacataatctgaaatagcgaaattacagaagaaagttgattcaaaacatgtacaaaatctatagtgttgaaatactaacagcagcattgttcgcatgaatgattgcagcaatgcttgccatggtagaatcatcaagtactcttggtaatataacatcctgtaaataccaagcaatccagaccaaaacagtcaagcacaaaaatggcaacagaatcaaaactactaaaaactccatgtagcaagggggcagagaacagagggcactgacctttatatagcctattctgtatgtttgatgaatctttgaaaccacagaagcatttttaatgggtatagcctatgcaaaagaaatcttgacatgaaaatcactccatcttaaccaggatatgatgcataaaactcggtttacctccttgaaaactacatgctccttcaggaaagtgcgatgattttgcacagtgcgagcctctggatcatctgctcagatcagatcactgtatcccattagtaacaaacagcgtatgcaattatacaggtatgttactatgtagaatttcccgttaaaatgacaaagcaagactttatcattactgatgtagacacttatagaggtcaagggtaattgcttacattcaagtgcgcctattatctcaagaataaaatcatcagagaaaatcttgtcatatatcgcagaactgttcaacaatactgcagaaggacaaacaaaataagcagcaatcaaacataacctatgacaaagcttaaattgccatgtacttactgattccctttactaatctaaagatcatgtggagtgcatccatgtttcctgaactctcacacgttctaaaaagattcactagctgggggaagaaatcatgctgcaacatattggggaaaattgaaaagtttagagcatcataatactcatataaatatccatcaatgttctagatttcaaaacttcacagttcaccctatgtaagaatataccaaagttgacaaaacggtgtgtggtttgttttatctgcaaacgaatttttatagtgcttatcaactgttcaagcaaaaacgaaccagaaccaagtgcgacaaaccagtgacctgaagcttatcttgcaaaatcatctactgcaaccaagcatgctcttgtgattaaattactgacttagagcacctacaacacccacagtccaacaagatattacattggtttaacagcagatccaaatttgtggagcaatgaagctcataactgagggccagtgtgtggttgttatcctatgctgtggaatctagtcaattacttggatcttcactattttattagataatacaattatggcacaataaaataggattatttccaactagaaaatataagttataccaaaaatccgctgcaatgccaaatggagcctaggcatcaattgtgaaatgaaataaagaaaatgaatagaggcatcttcctatgcctaacagcatggagctggggaatggcctattgtccaaaaataaatgggcagcctgcactagtttagccttaacgtttgtaacactcatgtacacttttatgcctgcaggaagaggcaagctacatgaccaacatgttgacatagaatagttcatgacttacatattgtaatattaactctgcaacagaaacacgcatccgctctgtcatgctgcactccaatatagtctgcatatttggtcaacagcatttcaacatcaatatgttagtataattcaataggaaacgtgtgtatctgcttccaggcatattgaccaaattaactcaggtctctaataccctacatataatgtttctaatgtggcaaccaaaaatatgcatcaaaaatcagatgatgagagcggtatataagtaaatggcactggaaagaaaataaaggtagcccaccacacctttaagatggaagatagactggacaaatcaagagggggaagtttctttaattctctgctggtagaacttaaggactcatctgcaggtaaagaaacaagtcactatcacatttttagcaaaaccatacacagcagacagctacaagcataaggcaataagaaatggtacactcaaattacattacattgtataaatataagaattcaattttctgaaccttaaatactttatttaggtatcctttcaaaaaaatactttatttaggtatcaggtggcaggagattaataagaaccttcagcattgcctctcaggcatggtaccaattagcagtcgttgcggccgttattgcggtagcagcctactgccactacgagcccgcaattcaaatagcggtgtagggcatcaggctgcagcatgcaccaacgtggtctgaagacaggctacactagaagagaacaaatatgccactgctagcttgttgtatgtgtgagtttcctcctgtgcaatgaccagaagctggaatatactggtttgttacatgtgtagctatgtatatgtgctatattgcctttcagttctacctttggttgatgtcctccatttagtgaacttccagaacatatcatattgtactaaaagttaccatgtctgcatgattagattaacttaaaattgtgagtactttttaattccactatagaaatatagcgtctgcaatccgctatgtcaataccaatctgctatttagtacctagctctcacgtgagcaaatagataaaatcggaacataacatttcatgtccgaacctgacagcgtatgtgatgagattaagcaagcccatcaaatagtttactcaagaattaaaccgagttattgggattttaaagttgaaatggggaaaaattaaatcctagccatgcaaaagagagatcatacaatcaaccttcaaatgttgcacaaccctccgtgacataactctcaagagggcacatcatgcatatgtacacagttccatgaagaagggaatgtgtagttacctaccatgaaaaggtggatttctagaggcttctaaagattcaaatgctgcgggtggagcggcttcttgaactgtaggatatagaaaaagtaaatgctgtaaaaagcaactcacaagaataacaggctaaaactacacaggttagaaaaaataccatcaaggacattaaattgtaaatttcgttgtatggtacacacactctccctgcataaaaccatcagaatttaagcagacatgaataagaaacttgaaatatgatagtaaaacaatccatttatagttgaatcaccatatgtatgaacatccagcagcttcttgaaaactcaatgctaactctagtgccttttcaggatccctccatgagatgattgtttcttccaacaaaaatggtaaagatagtacattaagacttaggagaatgagtatggccaatcttaaaagaaggacattgcaccacttcaccttcttgtttcctgtatatatcatcagatgtaatgtgatgaagcagtagcgtgtcactatcctcttcatccacaacagtcagagcaatttctcttgatccctaagtcaaataaaggttgaaaaggtgaaccttaaatggcaagtccgagattaagactgaaaatttaactgcaatcttggtgtcacactctacaagtagttcagccattctaacacgctgcttcctgtgttacttttatctgtgataagaatattatctctgttttgttcttaaatgcgaacatgaagatcagtgtttccataaaaacagattatccaatttcatgagaagcattttgaaaaagcacactcatgtgtaacagtataagcttaaatgccaaaaatatattgtcccacaaataactggaaacataattaacttcaacatattaatgatgaaaacagcacgatcgatattcaataaaaactttatacaaatttataaatatcagtccaatagagaaactaagatttgaagataaaaagagggtatcatcagagaaaccatatttagtgaaaatcactgcagcataggaaaggatataaggtttcaactcaatattcagacaaaattatacctcaatgtagtcgatggtaacatgccctgttccctgatcatcccacttcccatcatcagtcaatcggtacactttgactcgctggaacatttttcttcaaatgttaatagtagtgcttatgctgtatatcacaaaataaaaatacacacagaaaaggtacaattcttggaattgattttgtggcatgggccttgtatcattggcttgttcacaagtatctctgtatggtgtaattgacaacactaaatagattaacagttgcaagcaaagcatcttttcgggctattgtctggaaagatggcatggtgtaataatattatttttaagtcttttggatcttaaccaagaattacctccctgttaaccgaaatatgataagctgatatcttaatatagacgtaagatagcataatagataaacattgcttcagcaagtttttagtttaagatcatacagtaggacagtaaacaaataactgagatagtcttcctgaagtaggatggaccaaaaaatccttattctaaatggctactggtaaaacataacataatatagcatataattacaaaaaactggaattccatgcaatataggcaagttatacatggtatggtctaaacatcaattagctcaaggcattttgttataggacggagtaatgaatgtacacatgccattttgttactatcaagtaactatccaagatctaatatgaggaaaccaaattttttttactaacatttcctatggggtttgtgtaaatcatttgtcggggaatagtgaaaattaactggcgctcaaaatggaactgaaggttttctgagtgaaaactgaaaacccaagtagtcatgggatttgtgtaaatccttgttcgcataatagtcaagaagttttctgaagttcgaacaggaactaaaatgttctgagtgaaacacaattcgaggttattaactaaaagctgatgactcctcttgaacccaaccaaaacgtgataccttgtttctgttgcattctgtcttatcatgtcagttctgttctgtgattccgctttgacaaaaagaaagagcatactcgatttcaatagttttatgtccgctatcccgatctgtttctaccctatggagaaagtaaaggccaaaacagttcaccagacctgccttccaccgttctccacgcaagtggaaaagtgcatctacatttatgaggcggagcaggtggaaaagctctactccctgttagaatggagttgctaaccgtgatctacgagtgatgattagaaagggatcaggtgatcggcacctgaaatagtaagctccacagcacacaacgagacattcccctcacaattcaaccagaaatccccccccccaaaaaaaaaaaaaaaacccaatgaatcacactcttccccaaatcctgcacatggtcaggatatcgaatcaaccactaccagagcgagcaaccttgtcgaattcccgaaactcccaagcgaagtttccaccaaaggcgctaaacgaaagcctacataccgccgcgagtgggatctaccggccctgcatcgcccatcatcggcgaaccttctagatccttctaacaggggggagagatatgcggggactgggagggggagggagaagctcacctgcatgctgatctgcaccgcgtcgtccggccccgcctgcttcctccggggcccctgctcctcctcccccatcgtcgcccgccctaggcctgcctcaccgccggggaaggatggaaatcggggcggactcggggatcggggggcggcggcggcgagggcgagggcgagggcgagggcgaggtctagcagcgggaggaggaggagggcagcggcgaaaccctacccgccattgacgagcacgagcgagcgagcgagcgagctctcctcccttctctctctcttctcgcttcgcggctttctcctctgcgtctatttttttttctcgtttggccccctcgagtttttcttttcttttcttttgttgtgtgtgtgtgttttgttcgcttgcggaatggaggggggaaaaaaggaattgcggggggtgggagaaggaaaacgatggacacggcagtttggatattttacgtggtgtggtctttttgctacgcgtacaccatcaaaagttcgtctgggcccacttgtttgtttctcttttgagggggtacaatttagaactcacacaaacacacaccacaacacgcgtgtgtgcatcctaatatacgatagggttgagattggaggtactaggtcccattgcacgggaaacgtatagtcccattgaatgcacatgcgtgtgtgaaccatattccctagtagaaccacctaaacgtgatccctgggagccgggaaaaacctcggtgaggcaacgtgaaaatgtgggagtcaaactcgcgccgaccggttcgaaccacggtgaaccaaccagatgcgctagtgcaactccttggtctcatttgtttattgatgttcgagttggagggagattttccgcgcacacgaaacgaaaaatatcattagcatatgattaattaaatattaatggttataaaattaataaattgatttatctaaggtttaagtttaatgctcttcaatcaacttttcaaccttctaatatttaatctattcgcttgtaatatcccaactaattgtcaagagttctgttgaatccatatgcgctttaaaaccttggcatacgatgaagttcaccggcttgataacatagctattttatttttatggttagtgttttttatgcatgactttttttttggacatgtcaacttgattttgtggtatcagcattttttatcctttgatgagagtaatgactttttgtaattaaatcatgtcgtagcattgagtctttccacaattaaatgatagatttttatctataatgtaaacagattgaccgtaatgaaatatgagcactcaagcacctttaaggaaaaaaacaaggagtgcgtgagaatatttaggttgtactactcggtgcattataaatcatgcatatctatgatattttttccgtatgcgcatagtaaaatagtgagactttcaaattataaaaaactatagaaaaaaggtttctataattttttttatctatagtcgaaatataagatatattggacttgtcgaaataagagattggacttcatttagatgagtgattatcagtagaatcatttgatgttagtcaatgaaaggatatttggttagagagtagacttcgtgggatgcaaagctggttcccattgcaagatttcatctgtagaattatttagctgcagtaaacaaactgatcttacttttctcgaaaaggtaaagagaagtggatttctttagtcactagcctatcataaacaaaagcatgaacattaggtagaattcatagttgactaggctagtcctacttactagtcagcgatcaaccgatctagatttttataatactaattttcttccctttttcttacactaaatcattttatggcgcactttattaatttgcaaataaaatttcatcacctgagagcaaactaataataaatttgagaggttcctctacccaaccgttgattgggatccccgatttacaagccaaaatgtaaacaaagattatatttagaatcctcctattacgaaccattactttccctaagacaatggtttcatgttagcaacccacacaccctattatattcttgctagagaggatcacgactgcaataaatgtcgatgtaatatttaatgttgtttacggtaaattggacaattagctgctaataggttcagttttgatgtttagcaaaattcttgtgtgttagcactacaagtttaattgaacattcgatgtataattgctttaaaagttaacgtaagttaggtatttaccatataaaaatagagaatactaccttcatcccataatataaaaaaatttagagttggacatagttactaagaaaatatatgaaatcaaatagggataagttgtgattcgtagggaagtggatgtatgtgagaaaagtgaatagcgaggagttatgattggttgggaagacaatattagtgaaaaagttgttatattataggataaattttaagtgctataagttattatattatggaacgaagagagtaaagcgtagtatacatgttatgccttttcatccatattaaataaacacagacaaagtatcctccacattctcttaaattgaagttcaaacatacataagaactatcgtcatatgtgttatgaagacacatatttgtttattgagtatttttattaaaaaataatggtattatgtccaaattgccaaaaaccacgaggcttggcttgttgcacgtaaccacgagtattatgacctaatagtttcataaaattacatcattaacccatttttctttcatctactacaagcataggaaaaacacatatatgagttttccaaggctgtgttctgtatagcaccagttggattttttagcacacaaaatgagaaaagtcattaggtatgattaatcaagtattaatgattaataaatatatttgtgtaattttttaaagaaacttttatacatatatatattttaaaagagcaccctttagcactttaagttgtgtgctaactaacaacggggaatttgtaatttagagttgtagtttagaacatgatgtaattcatcgtataaatgttgttgcaatatagtataagttatacttctaggtactccctcgttttctaaatatataacaccattgactttttagcacatgtttgaccgttcgtcttattaaaaacttttgtgaaatatgtaaaactatatatatacatataagtatatcaaatgataggaaaagaattaataattacttaaattttttgaataagacgaacggtcaaacatatttaaaaaaatcaacaacatcaaatatttagaacggagggagtattattttttataatttagacaaaattcgtcaaaacccactcaaacccatgcccgcatccccccccctaaatgacaggtggcccccacccgcactcccctcgttccctccgcccccgcntaggcgccacagcttcgaattctccgccccctcgctcccataaaccccccgcccgccgcctcgctctccttatgccccccacctcgcctcgcgtcatccgccgccgcctcccattcccctcgcgactccggcttctcttctcccctcctcttgcgttcgtcgtgagggcgatgaactccgcggcggcggcggcggcgtgcgcctcggccccggcgtgggtggtcggcggcggcgccggcgggggagccagatccgcgcgggggccatgcgggatcagggtgtgcgggctcgggggcgaggcggtggcgctccgctcgctgcggatctcgcagggggcggcggtgaggcgggcggcggtggcggcgagggcggccgcggagaacggcgtggcggggagcggcgggttcgactacgacctcgtcatcatcggcgccggcgttggtgggcacggcgcggcgctccacgctgtcgaggaggtaagtgcggaccatgtttactgttcggtgtagagctctagccgtttctcgtcggcggcgctgtacccgtgatctattgacatttgaactgatgactgtatagaatgatctatgggatttccggtattatggagctgcgaacttaagtacttagctgaattcaaaatttcaaatgaactacttcgctagagctcatgctttgttgaaatttacactgcgaaatggtaactggaggtttttgttagtaagtaatttggtgctagcacaggtaaactgtttaaattgagtgctatcttgagctttgctttgggacttcagtggttagtccattgcagtgcgctgatagtctattaaatttatgctgagactatcactatgaaactagaaaatcttcctttctagttgaaatatttttttttgtcttgatggattgatgatcgtagaggtaaagaatatataatgtgcaactcaacgcatttgtaaaccaactctatcttgaatgcagcaccagcaaaatagtgacaactcggttgttctggtggttatctatttacaaatttcaatgttggcacactttggccctgttggagcctgccaagtgccaagcagtagcagtttagttggattattggcttacttgatatgttacttctttgttgatatatccgacaggccaacatacaaaaatgcacacacttttttgtttacaatccaaggcttttctgtagcatataacgcaaataagattgcagagttataaatgtaataacctgttcgttattactagtccactactgctgtctcaatgtgttaagtgttaactggcccaaatttgtgcagggtttgaaaactgcaattattgagggagatgttgtaggtgggacttgtgtaaacagaggttgtgtcccatcaaaagcacttcttgctgtcagcggtcgcatgagggagcttcatgatgaacatcacatgaagtcattgggtctacaggtattttgtttggatgaattactgcattagcctctttgtttgatgtgttgaaacttgaaaatagttcacataacaattgacaaatgagtggacttttaaaagatttgtgttctacagtattttttagtcaatttcttttaggtacgaccagtccattaaagctggttcacaaaataggtactgacacagggagtgtaaagcgtgcgaggttcctgttttcatgtttatcatttgtgtcctgaaattgatgtctatgtcaactctatggagcttaccttgtttcttactcacaatgcatcaggtttgctatatgtctatgagtctgtatctctgtgttttgtgagattgtccaaaatttaatgtcaccagttactaggcctattacctgtggcctttgggcatcggctgttttctcattcttgtgtgttgcattgtgtcctgcataaatcattaagcccattctctgtacaacaggtttcatcccctggatatgacagacaagctgttgctgatcatgcaaacaatctcgcctctaaaatccgaagcaacttgactaattcaatgaaagctctgggagtggatatattgagtggttttggtgcaattgttgtaagtcatccataagaccataacttcactgtcatgtacaatcatgagttatgcacatgagtgttacattctcatttttgggcaagaacagatgttaatatttctcttgacttatatacatgttatatgtaaaccactgagttaaatccttacggatagcactttgttgaattgtagatgcttagcttttggttgcatatcaatgtcggtgtgtcctacaatcaagtctattcaaatgttaccaagttatagctggaagtgcatttatgtgccccatgttttgttatggttcaagaattgacatatatactaaattagcagtaatttcttgtggaaagcagcaagtttattggttctcttagttatgagccattaaaatgtacatacatcactactagatgtatcatgttactatttgatgtggccaattcagtcgctgatggaataagctgacctattctttgaacttgacaacaatcatatcttgtggtagaaaatgcatacaggaatatctcatctgcgaaatatgacataatagaggattgccgacattaatctattcctatcatgatttgatcagggaaaacaaaaggtacggtatggaaaagttggttttccagacaaagaaatcactgcaaggaatatcatcattgctactggatcagttccttttgttcccaagggcatagaggttgatggtaagtactaccttttcttctcttgatggatcatgcatctcatttagttagctctagtttccagactgaacattgaagcaagtgatcaaatgctgaaagaagcatgtacttctagctcagttgtagtgaccatagtcttagctgtgtgccatgtgattactgaattgttttgtatatacaagctttgtggtagcttattctgaaacaagttttccttattacaatttacatacttaaatgtttttctaattgtccatgactgttggtatttattttggttaataaaacccattttgttgcaacttgcggcatgtgccataactagcataataaagccacacatgttttattagttttagacttctagaatcactagtggcaatagataaaacataatttactatttgttatgcctgaataaccttaaatgtgtgtctgtatttggatatcttagagatcccgatagaaagcattcgatcttggaagccacatgatctttgtgcccttctgctactgcttccatcttttgatgttataatctcagcatagaggagacacattaccattattacattatgtcctacagctgaatgacatggaagattagcacaattgggtttgcagacccaaatgtgttgcctaccatttcttgttatacctattgttcttacagaagcctgctgggcaacttttgtgcagggaaaactgtttttaccagtgatcatgcactaaaacttgagtctgtcccggactggatagcaatcgttggaagtggatacattgggcttgaattcagtgatgtatatacagctcttggaagtgaggtacatgaaagttcttgctgtgaataaattcaaggatatggcttagagaatcatacagtgagcatggaatcatgcaattattgcagaaacatggttctacaatgggtataactggaaaaattgcatctgtagttatctggatatgttatcctttttgctttgcatatagtgaccagtgaggtccaccctgttatttgattggatgcaaatttgactacactgttttcaacttacacaaatgattctattacagtagtattgtatcactgcatgctgatttttgttttcacatgccccctgaattgacagttttcattcttcaggttacttttgttgaagctcttgaccagctaatgcctggttttgatcctgaaattgcaaaattagcccagagagtccttatcaaccctcggaatatagactatcacactggtgtttttgcaagcaaggttaactagaccttctaccttagctttcttcataccgcagacacatttcatcatctctatgttaaaattgttgatgattttttctagattactccagcaaaggatggaaaacctgtgcagattgagctcattgatgcaaaaacaaaggaacacaaagaaaccctcgaggtaaaaactacatttaaacaatctttcagtccttgtacatagtatctccaattgcagttttactagccaactttttgttaagatacttcactcttcatatactcctatagctatatgacttactgattatcaaatgtatggacagttgtctcttttctatgtaacttattgttgtttagttcatctgtagtaagttgatactataaacatagtttttatttctccataatggcttatgtggaagatctaaaatgtggctctaggtggatgcagcccttatagccacaggacgggcaccattcacaaaaggacttggcttggaaaatgtaagtacctgaaggttgaaactgtttgctgtcagaacatttcctacagttaagtttcaagcatagtgaatcggaccctttttttcttcagatcaatgttgttacacagcgtggttttattcctgttgatgagcgaatgcgagtcatggatgcagatggcaatgtggtatgttgaaacaaatgaattaccatgctttgttcagaataatcctcttcctggcttgtatgggatctaacatgccatgcatttttatttgtaggttccgaacttatattgcattggagatgccaatggtaaactcatgcttgctcatgctgccagtgcacagggaatctctggtacattgcaaatctgtttagatttcatcttcttctatcgctcctatgttgcttatcgtatagttgcctgataagtaattcctatgaaaatgtagttgtcgaacaaatctctgggagggaccacatcctaaatcatttaagcatccccgctgcttgcttcactcatccagagattagtatggttgggcttacagaggtaagtcgggtgtaatcccatatagctttctttagtctgccctgtttatgcgttacttcttcatctacttctgttatattttctgtcttgatatttagtcttatattttctgtcttgatattttgtcttttccttgacgtaaccaattcgttatccttttactgtatttggtatgtatccattgcttcttgaaggggatctaaaccatgcaatctttatgatttccttgaccaagtgttatcaataaatattgcagccacaagccagagaaaaagctgataaagaaggatttgagataagtgttgttaagaccagctttaaggctaatacaaaagcattggcagaaaatgaaggagatggacttgctaaggtatacatgtttttagtttgtgccacttatttctatcagttttttttccttgcagggttatttctatcagttgtgttgtcttgtctccaaattggcacctgggtattgctgtcttgcatggcttcattcagtgacatactttgggcttgacaattgtatgttcctttctgcagttgatttaccggcctgacactggagaaattcttggtgtgcacattttgggtttgcacgctgctgacctcatccacgaggcatcaaatgccattgccctaggaactcggttgcaagtgagtataatgatattatttttcttcacttggttcgtctttgttagcctttcagcagtataacttgaatttgacatgatcactcccaccacgcaggacatcaagtttgctgttcatgcacacccaacattgtccgaggtgctggacgaactctttaaagcagccaaggtacacttcagcgctccatttttctcttgtgtttagaatccttgaccacatttctgaacagctgcaagctattcttttttttttccttcccaacaggttaattcgggtgtttctcattctgtaaatgaaccagttgcagcctagagaagggccggagcgcaagccaaagcatccaccacaaccactcctgaaggtccttagtttcgtcacgcgcctgctcacttcccagaaacgaaatcggcaaccatagttaagtgaggagcctctgacgaactcgaggcaaaaaggttcatagcgccgatctttctgtagcttccatctgtgtatgaacatttccagatttttgtagtttttcgtttggtttaattatacgaggggcttaattatacgaactcgaggcaaaaaggttgattgtcatgtaatatgtagccctggtgtagacttgatcgaaataatcagttctgctgctggtcctgtgtatcataaaaataatttatctgctcagcttaaatatgttatataggacggaatttcagaattcggaagaagagtttgtactgtactttgtagagtaaagagtttttggtacaattatgaccatggaaagttccttaattttgcagtaagttggggaaaccatgaaagagctgtcattaattaattactagtagctgttgttcatgtacagtttggttgttcattggttggttcgtgtatctgacgaacaaaaggagaaacctattgacatagacccaatttgaaacgcgataatttcatacatacaattttatggtatgaagactgaagtttcctaggcacttataagtatattttttagttaactattatataaataggctattagattatctatagataatttagagtcagtagatggttatattattaaacttgctctaaactcgtaatttgtcccgctaaaattcactttgctaggtagttatgcgggagacgtggaacacattaattttcgtgtttcgtgtggaacactcgaaaattttcgtgtttggaatcaaacggcatttcataaaatttgcaaacagtcacggttcgaggcggagaagttttgcacgtcccttcatcccaaaataaattcatttatcatccatcataaatattccaatacaaaagaggtgactagaatactcttactttatcaaatcccattataactatttatcactttatctaattctaatataattattctttacttttatagactccgttacaataaatactttagtttattttgagataaatgagggagctaaaaaaaatgatagacggatgaactagtattacctcaaaatttcgaaaattgcgcccgtcttccttcccttcccctcaatcctctccccattttccccgtcgctcacaaatctccgcttcgtcccccacccacccaccactccactccccgcagttggtggcccgcggcggcgcaagccctagcgtccacgcgaagcaaaccccccaaaaccctagctccgccgccgtcggcggcgcccgagctgcaacccccgccacgacgccatccgggtggctagcctaagcccctaaccaaaccctagcgaccggcgccgcagtcggggggagagatgccgcgggagatcatcacgatacaggtggggcaatgcgggaaccagatcgggatggagttctggaagcagctctgcctcgagcacggcatcggcaaggacggcctcctcgaggacttcgccacccaggttg

SEQ ID NO: 6506 - DNA, 8965 bp, Oryza sativa
tttgagatttactgctttcagcttgtctttctgttcttttgtgctgtagttgtgacttccttgtatgctacattgttatgatctgtgactcttttgttgtattctgcaaatcagtttatatattgtttgttccaatgttcttatcagaatgcataatggcataacaccttgttccaataattagctgtatcgttttttttgttcttattgtttgttgtttataataaactgttgcaatttttacttgcagctggaataccttgaggaacgtcgcctcaaggatctggtgaagaagcattctgagttcatcagctaccctatctccttatggactgagaagacaaccgagaaggagatttctgatgatgaagacgaggaagagaagaaggatgctgaggagggaaaggttgaggatgttgatgaggagaaggaagagaaagagaagaaaaagaagaagatcaaggaagtctctcatgagtggaacgtgatgaacaagcagaaacctatttggttgaggaagccagaggagatcaccaaggaagagtatgctgctttctacaagagcttgacaaacgactgggaggaacatctggctgtcaagcacttctctgtggagggtcagcttgaattcaaggccatcctgtttgtaccaaagagagcgccatttgacctctttgacaccaggaagaagcaaaacaacatcaagctgtacgtacgccgggtgtttatcatggacaactgtgaggagttgatcccagagtggctcagctttgtcaagggcattgttgattctgaagaccttcccctcaacatctcacgtgagatgctccagcagaacaagatcctgaaggtgatccgcaagaaccttgtgaagaagtgcgtggagctcttctttgagatcgctgagaacaaggaagactacaacaagttctacgaggctttctccaagaatctcaagcttggcatccatgaggattccaccaacaggaccaagattgctgagctcctgaggtatcactccaccaagagtggtgatgagttgaccagcctcaaggactacgtaacccggatgaaggagggccagagtgagatctattacatcactggtgagagcaagaaggctgttgagaactcccccttcctcgagaagctgaagaagaagggatatgaggtcctgtacatggttgatgccattgatgagtacgctgttggtcagcttaaggagtttgagggcaagaagctcgtctctgccaccaaggaaggtctgaagcttgatgagagtgaggacgagaagaagcggcaggaggaactcaaggagaagttcgagggtctgtgcaaggtgatcaaggaggtgctcggtgacaaggtggagaaggttgttgtctctgaccgtgtggtggactctccctgctgtctagtcactggggagtatggctggactgctaacatggagaggatcatgaaggcccaggctctgagggactccagcatggccggctacatgtcgagcaagaagaccatggagatcaacccggagaattccatcatggacgagctccgcaagcgtgccgatgctgacaagaacgacaagtctgtgaaggacctggtgatgctgctcttcgagactgccctcctgacctccggcttcagccttgaggaccccaacaccttcggcaccaggatccaccggatgctcaagctcggcctgagcatcgacgaggacgagtctgctgaggctgacgccgacatgccgccgctggaggacgacgccggcgagagcaagatggaggaggtcgactaagcgccatggttgtcattcggcccccatctcctggagccctagttctctatagctttatctgactctgtgctcttcgccatttttgctatgctggatgtatcggtattgccgtatcttagcgcctgaacatttcgtggtatttgctcaaacagttacgttttaaatttaaatatgctagttaattaatccagaatctgtattttcttattctgcattagcccttttatagtaactctttgttctgcattatctccactttgttcttagcttgaatgggcctttttttttctctgttgcccccatctctttcaatcgtagtagtacatctatctttgatacaatttttttgatatgctattttgaactgagcttcttgttgacaccggattacttttgattggcactgaatagcttgttgtacactgctcatgtcttctcgactgatctaaaatcctatcacttaacacatctgtgaaggattccatgttatttgcttaagagaacaaagcacaaagcagcccaatcttctcctcgctttgcctctctgctttaataaaagcaaagcataacgcattccttaacctgtcaatctgtccatccacacgcagccgctttaccaactctcccaagaacacacacaagacacaaactgagatgctcacctgtcgctgcgatccatttgccgctgcattttgatcatgccgtctccaacctcgtcggcgtcggcagcggccagggggagcgctggcgccggcgataccctacgcaactcctgccacgacttcgcgcgcagcctggcgcggctgccggccagcatcatggacggcctctccaggtccatggctcgccggagccgccgcccccgcgacacccagcctcaccctcctcttcctccgccgctgctgccggaggagctcttcttcgccgagttcgagcggcggtacggcggccgccacccgttcttctacgggtgccggctagccgaggcgctggggatcgcgcggcgggaggggaggctggtgttcgtctacctccacgacgccggcggcggcggaaacccctacgccgaccagttctgcacggggacgatgtgctccgacgtggtggtggagttcctcgacgccaatttcgtgtcgtggggcgccgtcgccgggagaggggaaggtgcggccatggtggcggcgctgcggcccggcagcttccccttctgcgccgtcgtctctcccgtctccgacgagagcatcgtcatcctgcaacaggtagtacaaaaccccataatattacagaagcaacagaatccaaagcgttccctaaatgtttgacgccgttgatctttttaaacatgtttgaccgttcgtcttatttaaaaacttttatgaaatatgtaaaactatatgtatacataaaagtatatttaacaatgaatcaaatggtaggaaaagaattaataattgcttaaattttttgaataagacgaacggtcaaacatatttaaaaaagtcaacggtgtcaaacatttagagatggagggagtattttgctccatcgtttcttcttcatcttatcagatacaacgaaaatttgaatttcagaacttagagtttaatttagagttgattttgatgtttcttttatttggtttaatttttcagcattgacttataaatatttaaatcgcaaataaaaatttgcccacaaactattttttgtcgttaataaacatcacagcttataatcaagtatcgtctctagtggtttcatccataaccatcataactgagcgaaaaccagtgaaatcgaattcttttgcgccaaaattttgaattttaggattttttttaatttggccggtttatcgaacggtttctaaatgcagaccagcaagacaaggccaacgaaaccgtgataactgagcggttatcgtcgcattttgaaacgctaaagcaagtagcaacaatactaacaattatgtcaacctatttgcacactaaactctacagcatattggttgcatcgatctatcttggcattttaagtttttgtattgattaagagatgacacaaactgtatcttctttcaggtagaaggcccggtttcgccttcagagctggtggacattcttcagagaacaatcgatgagcaacgtgcatcctccagacagtcttggcctgatgagcagctagctgcagcagtgagagcctcaagagctgatgaagaagagaggatgagatcagtagctctaaggctaagacaggagcaagatgcagcttatctcgaatcacttcgaaaggatcaggtagacacatgcatgttcatcatgttgaggtggtgttcttcatcatcagttcatgccctgttgatcagggtgagctcactgactccattgatgcaggagaaagaaaggtccaggaagagtgttcaggagggatctgcgaaaccaaaggcgagcaatgtgcttcgtccaagataccctggtcaatctgcaagggagcctaacaaggcagctcaggccagagctcctgctcagaatcagaatggaactgtggcttcacacagagcagaagcaaataccaaggtatgaccaaaaaaaaaggattatctcttgtcctcgtgtacagatgtacagtgcatttgtaactgctagcagcaatatttgggaaaaaaaagttaattacttaacatgaaaatttctggggtttagttattcagttgacaagtgttcagatcatgcattcaggtttttctgatgtctgaactccggttacagtgataaaaatatcaagtgttaatgtgttatccatctactagtatcattgtgcaaaggatttttatgggaactttggtgcagaactttttatgggaacatccctgagttaagaccagattaattgtagaactttttatgcagataatgataagatttcccaatggagagagaaggcagcaggcgttccatcatacagataccatcagggaaatctacaggtatgttgattccctaggcataccaggcatcggaaattatcagctcgtgagaagctatccaaggaaaacttatggtcgccagcagctggagatgagtctccaagatgcaggcttctatccaagtgtaacactgtacattgaacagcttcagtaaacatgctgtaaccatgaagatgactgcaaatttcgtgtaacaaattacgtacaaacatctgcatatgtgcatgtgtttctgcattcaactctactgaatgcgtactgccactttgcatacatcgaaacaagttacagtatgttgcaaaggaaaagccacaggcctgaaacttcaaagttcagagcatgatgttacatgttgggaaacttcaaagttcaaaacaaccctccatttcctgggctgcatatgaaccgtccgattgtatataagtggcttcagatcagcgtagtagttgtaagggtatcctcaatgattattgcaaaagtactccaagaagtaaagtgaaccgtgccaaatagtaatagtagattgaagatacaccatactacatatatgcgaagaatgggtaataaggtgagactatctaaaaaaaaaaagaaaagccaaacataagtcataccacaattaaaaagtatgtaggactcactacaaaatgcttactactatctccgttttaggttataagactttctaacattgcccacattcatatagatgttaatgattctaggcacacatatatgtctaaattgattaacatatatatgaatgtgagtaatgctagaaagtcttataatatgaaacggaagaagtataatttagtaataagcctatgatttgatagtagttaagagtatttactatttccttaatttatcttagctactagcgatacttaatccctaactttgtaaatactttttcaatacattgtggatgactggtaactatattgaggaatagtaaatacattgaggatgaaaaagtaaatactattttctcaagttaccggtatccattatttggatgaccggtaactttgtagaaaacaccctaacacaaaatcgtatgttcaaaatagcccccggctagccgaccgctagtccgctaccactgcgcgatccgaccgtcgaatttgaggtcgacattttccgccaataaaaccgcacattaccttcagaacagataaggcgccccacccgtcagtctcacggtttctgctttccacatccgccgcggccatggcgctcgtcaccgtccacgcgcgcctcgccgccgccgcctcctccgcctcgccgccgcttcgctccgccgcctcctgcacccgcctccgtgccctcagtacagtcaccggaacccgcctcagcattcggcaccaacagcgccggcgctggcggcggccgaggcgcgccgccgccatcgccgcgtcgctcgacctcaacgaggacaacgtccgcctcgccatcgacgaagccaaggccgaggcaagcttgagtcctcccctcctcttcttcttccctcgcctcgtccccaattggaatttggaacgccattgttgctgattttctgaatctttgcgcgaattcgcctctgctcctgctctctcagctgggtcagctgttcgacacatcggtgggaatcacaggtgaaacccaatcgtccaaacctgcgttgcttgcgatgaacacggatcaagaatccgggagtaatctgcgttgctgttgatgatggcagggcaagttgatctcgcggagctggacgggccgttcgtgaagctccggctcaagggcaagttctggcacacccgcgccaccgtgctcgcgcggatcggcaactacctcaagaaccgcatcccggtgagcatgctttggagtataaagtgaattgactgtttttcctcgtcagtttaagcttttgggttgaactggtcggtgcatatgcaactcaatactgttgcatctttctcacttctgtcatgttcttggctcctgcttgcgtgtggagctggagaaagttttgtattttggacttgttaagaatgttaggttagtgatttagtgagtgagaactgagaagtgattattgatttattgtttgggcaggaaatcttggaagtggagatagaagatgagaagcagcttgatgatagccctgcagccttctgaggtaaccaccatacatgaatactgtagctgctgactctctcagtagttaaatcttgtcatgcagtaaaatttgaaatcttacaaatttcaggtctagaaaagttgtggtgaaaactgaaagcacatttaaatcttccgttttattcactatgcacattttacttactgctctctccaatccaaaatacaagcatttccaggtctttagcaaaaaccaaggtagagtgaaagaaaaaaaaatctctttcagtaacttcaatggttaaattttgaattggttcttcttgccttctttcaataaataaataaattttgaactcccttcccaaaaatcacattggttgaaaatttatagatttccgtgcattggaataagtgcggaagtgcctcagaaatgtttatattgtggtataaatcttgaatcgtagatgcacttatattttgaaacagaggcactagttagtatggcagtatcattcatgacgatacgaactacctgttcagccggttgtcactgtgggcataacatagctgtatattgcagtggcattcaccagtcaatggctccctccaatgcacattgcacaaacctgaatttctgaagttaagctgaagaaccaagtctgctggaatgcactatcctacattcctaccttacttttctggtcaacatcgcacaaattcagggatctccaattcccctacattttgattgtggagatgcgtatgatttgagactattctattttactagcactcacgagtcgcaagaacctgaaaactgtactgacgggacctacttacggagaggtttattagacgcttttcctgattctgagcttgttggtatcacctttatgtgtatttatttaaaaaaagggtgtagcaatgatgtgctgctattctgagtactatatttgtgttcactctttcgaatgatgtttactccatccgtcccaaaatatagcaaccttgaactggatggaacacattctagtacaacgaatctggacaggggtatgttacatttgaaataccactgcatcagtgtgctcctgtggacagtactctggtagaggtataagttggctgctcgttcacgaaatgtactggtcatccatccaatgagcgtcatggtaattcaaattcttcaatttgaaattctgatatcctgattttctcagttcttacccatttgagtcatattttttatgttttgtgaactcattaaatagggttcttggaatgttgtggcaacgcagctgtggccatttcagtgctcttgtcaatctgtcaaatgtttgggcagcaatgaactaggagtatctgaagagaaagcagtttgcaaccctaggctctagctccgtggaacaaaccatttcgacaatcttgtactgaaatgtactgaaatcaaatactactatattcgctcttttcctttgagaaaaagttgtttgaggccacttctggttcctactccgatgtacttattggatggtgcaattgatgatgctggaaactgttgctttcaaattacagggagaagttgggcttgtctatcagagtaggtacaatagcaggctataagccagctgcaaatatattttaaggagataaatcaggagagagaagagcagcgggttacagatttgtagccagctgtagcacggactccaagacgctataacaggtgggactaggtattaatagtgtagtatgtaactattgtatgaatgagctattaaattggatatagataaattggagctagtagttggctatactattaaacttgctctcatgtttcagaccagaaaaaggtgagtatttcatcataaaaagggacgtatttgacgaagcatgtcagtgcctaatcctcagtagagtggagtactagcaagaaacaagaattccgaaagaattttgcacggaagctctatccaaatgtcccttcatccatcaacgtattggactgatttttttcagcgaatcaactcgttgctagtatctctgagtct

SEQ ID NO: 6507 - DNA, 11082 bp, Oryza sativa
gtctgtatttaggatattgaaatcatgatattttttatgagatttgttttccctcacacacatttataggtcactgcgccaaatcagcactgatggcccaaaccgtcaattgtgacaggtaaggctctcgtcagagatgactgattagtaatgactctacctcatctttaatggatgaaggcccgtcagtggaggtaaatatttgtgatgagtagtaacaaacacccgacaatgaggctgttcacctgtgatgggatggtattttagcttgccatcgaggacacttgtctaaggtgggttataattacaacctagtatcatatatgcatatgatgggataaacaaaattcagctcacacgctagtatccgtcactggtgcagattaccgatggagaaaaaaaaaagagggaaaagtccattttacaccctcgaactcttgtgcttatctaaaatacacccccgaactacaaaaccggatataatacaccctcgaactgtcaataccggacacttaaccccccagactgtttttaccgtggtttttgccacgtcggataccacgtcagccctagccacgtcagcgcaaaacataaaatgggccaagcccatattctctccccccctctctctctctccctctctatctctctctccctccctaccctgttcgctctcctctctcacaaccgttggcggcagaggtggcagcgcggagctgcgaaatcgacggctacggcagctgcgtagagctgcgagggcggcggctgcggcgtcggcgtggagccgcgagggtggtggcggcggggagctggtgtgaggccggcggcgctgcgaatcatgagcttgatgcccctcgcggaagaggccaacctcgcctgagccatacgcgcggggaggagtcatccctatgcagtgccgccaccgcttggtcgaggacgaggtcgagctcaagctctgcatccgccgccgcctcgtcaagctcgagttccaccggcgagctcgattcatggagaagatggagtcatggagctcctggaggcggcaggagaggtggacctttgagcttgtgctcgtcggtggtcggcgcgaaagggaaggctggggatgtgcttgagctccgtcgccgcaacgagttccctgctccacggccaccgatctcctgctcagctccaccactgctctctgtctgggaggaagaaggatggagagagaaagggaagaggagatgggggaagaagaagtggctactgacgtgtggctcttatttctattttcagtcgtatgtcatgtctagacttccgcatcgttgtcaagtagactgtaaccagctgaatacctacttgagggtgtaaagttacaggtattgaaagttgtagtgggtgaaatatctaagttttagagttatgggtgtattttagccaagacaaagagttggagggtgtaaaatggacttatccccaaaaaaaagagaacatcacaatccgggctcgttgccattgcatttgtcacgatcacaaattcacacaggaaggatggcaagaaatacatcacaccataaatttatttgcactctggaaaatgattacgaatcgacaatctgggcgcctcaagagatgctaggggtagaggaggggatggtgctgggacgttgagagatggcgacaggagcctggcatcggttcgagccaccatgaggtcgaaggccataagatcaggtgtccctctgacctcgggaaggctggatctgcgattcttagggcagcggaccatgcttaggagtagagccagaatgcaacgccattggtgctcaacaacggtggtggagatgacactggcgaggctcttggggataaaggagtcgacaccggtaggcgacacatggggatggaggaggcggtgtctagcggttaaatctatgtcccccgaccctgacctcgtagaggatggatccgatggtcgggggacaaaggaggcgacacttgcatcatggtggatgggaaagaggattcaagcctttaggggcagaggaagaagaaagagagagagaggaggggatggaggaagaagggataaggacgagacggggagggagagagagactcattaagggaggggagttgttttatttgattttttaggtcattactaacgtgttaaaaaatactctcatcacagatgagtacctcatccgtgacgggtgtaaactcaacacctgtaacatacaagagatcatctgtaacgggtctatatgtgagctcgtcaaatatgttttgtgctgagtctccatcacagatgagtccttccctataacagattaacagaccgtatccctaagcttcatctagatgggccgatgtggcgtagtcggtcgcttattggacccagcccactaatcaagccataaaaagtctttcctaccttttttagggaaggaataagtacactgaagatccctcaacttgtcattgagttacaaaatcgtcatccattcacaaaaccggatatatgacgtcatccattcacaaaaccggatatatgacatctctcaacttacaaaaaccgttcaatctagctcctttagtggttttgaccctggttttatcctacgtgtcagctgagtcagcgtggaacccacgtaggacccatatgtcaagatgcccacgtcatcaccctctctctcactcctcttctctgggcaaccgggaaagccggccggcgaggcgggagaggaggcggtggctgctgcaacgcggctgaaggcgagggcggcggccggtcgcgaatggtgtcgacagcgatgtgtggccgccggcgacgaagcggccccgcacgggcgggcgccgcggcgttggccacggaggtggaggcggggaagggcgccgcggcggtggccgcggaggtggagccgtggaggcggggtcgagcaccgtggagctggactcggagccccggcctgctctcgcgccgcatcctccctttctcagcgtcgggagcgtcgtcgtcgtcgtcgggcggcttgtctgggcaagccggccggcgctgctagggaggaggccgctggggcgaggcgggagagggggcggcggcggcgtctacggcgctgtgtcgcagccagcggcgaagcggccccgcgccggcgggcgccacggcgttgggcgacgaggagaacggcggagcaggcgagcaaggcgggcagcgacctcgctctcgcgtgcggcgtcggcgtcgtcttcatcctccgcagcgagctcccaggcgacgaggctgctcatcacccggaggcgctcggcgtcgccgcgacgaggctgctcatcaccctatcagcgcacatggggcacaccatcgccgagaggctctgcaagacgcagggccagccgaggagcgccggcttgtcgccgcgggctggggatgagagccaacgccagcggaggaggcgtacgaggggcggagggccgcgctgctgcgggcggtggtcgtgggcgcgacatgtgaaaggattttttagctcgccattaaggaataaagtaagaaacgcgtactctctatataaaatgagtacgttcaccgacgtgaaaggaatttttagctcgtcattaagagcttaagaaagttacttggaattctttggtttgttgacaatcacgattcatgacaaaagaagattgagagcctacgggtgcacgccagcgcgctgctctcactgtcgtcacccgcgtggccacgtcgatggcaccgacgtcgtcgtcgacgccggcgggcagcagggcgctggcggcggagggggtgttcgagtgcaagacgtgcaacaagtcgttcccgtcgctccaggggctgggcgggcaccggacaagccacacgcggctgcaggcgaagctgctgagcgaccccgccgccgcagcggccgagagggacagggcacgcatccacgagtgcgccgcgtgcgcggggtcgagttctccatggggcaggcgctcggcggccacatgcgccggcacaggggcgagacgggcacgacgaccgtcgtgctcacggccgccgacgtcgacgactcgggcggcgccaccgtgccgcagccgccggaggccatgctggacctgaactacccgccgccagtggcagttcctccctcgccggccgctgcccgcgcccgccgctcggccgcgcccatctgctctctgccagccgcctgtggtccgtggagaggggaggagagagaggaagagagatggtgaggggagggaggaagaggctgacatgtgggacccacgtgggtcccacgctgattgggctgccacgtcagacaaaactagagtcaaagtttacactggttttataaattggggtacgtgttgtatcgggacgattttgtaactcggtgacaagttgagggacctccggtgtactttttccttaggggaatgcctaaggtctaagccattgctaaaggctaatcttcgatgtcatcaaattaaagcccatgggccatggatataggaggacttttggcccactcggccagcttccgctgcggccctgcctgcctgcctcttgaaccgcgtggcgccgccgccgccgccgggattcacaaaaccaacggagcatacggactagaatcttcgccgctcgccgccgcggggaccaatggagcgcgcagtgcgggagctgtgggcggagtcgcgggacctgctgggcctccactccccggacgacgccgccgccgccgacgccgcgatgccccgcgccgagatgcccccgacgccgctcgcgtttctccgcgaccacgtctcgccggggcgccctctcctcgtgtcctccgccgccaccagccactggccggccgcctcgctgtggccgaccgactcctacctcaccgacgcgctccgctccaccgccgtctcgctccacctcacccccgacggccgcgccgacgccctcgccccgcacccgcgcccgagccaccccggcgccaagtgcttcgcctccgcgcacgtccgccaggtcgacttccccaccgccgtgcgcctcatccggagctccgatccggcctccggcctggtggcctacgcgcagcagcaggacgactgcctgcgcggggagtacgccgccgtcgccggcgacgtggacgcgcacgtgccctgggccagcgacgcgctcggctgcctccccgaggccgtcaacctctggatcggcagcgcctgctcccagacctccttccacaaggaccactacgacaacatctacgtcgtcgtctccggcgagaagcacttcctcctcttgccccccaccgagcaccaccgcctctacgtccgcgactaccccgccgcccactacgccgcggaagatgaagcggagctgaggcttaagctggagctggaggagcccgagaggatcgtgccatggagcagcgttgacccctacccgccgtcgccggaggaggcggccgcgcaggcgtcatccttcccgctctacttcgaggggccgaggccgatccgctgcacggtgcgcgccggcgagatgctctacttgccgagcatgtggtttcaccatgtgagccagagccccgggccgaacgggctcaccattgcagtgaactactggtatgacatgcagtttgacattaagtatgcctacttcaacttcttgaggtcattggagatcgatggtagttcgtcgaaaaagacggatgctttggaagacgatctcgaggagacgaatgattgaattgaaatttttgcggtaattctggatctatgcagaatataacttgattcaattgttgtgacttgtgagcattgtcagtttaatgttttggaggcagaggtcagggcatagatcttgataacctgtgtttatgttgtaccaattttcagggccaaatggcttatcaggtttgatttagtttcagagtcaacatattgatgtcaactttaaaattttttattcagatataggaaggtgaattttgtctaagatttactctccactagtcatgcttacattatgcaggtctgagaaatggccatcttatgtgaattatgcatgttttagtgccagatggatcagatgttgacagaatgaatatcaagcaattacatcttctgaatctgtgagtgttgtgtccggtatcataaacttgatgccaactctagattgcaaatacatactatattcatctttactcctatttatgagaactagtttaatttcaattcctagacatggtcttttgtttacctgttgttgtgataacatattgtcatccttattactgaacaagtgaacatgcaatgctttctattactcaacaatcagataattcactgtgcaatttccagaactgttagttttattcccaaatgtaggatttcacgagcattccgcacaacatttccatttgttcagctagcttgtgtgatatgtaaagtacagtattacaacctcctggtttctgccgtgtgccaataataactagcaaatgaaatagctcaatccagaataagaatgcaatgacaaaattataaatagtagacatgtaaaaaaaaatattgctgcaaaactgttgtgcttcaggctgccttggccagctccctgtccacagccaccttgaggaagctgccttcctccaccaccatctgaacaggcaggaacccgagcccattggcgacggcgagcatcacctccttcatctcggcccggaactcctccaagtccaccgtgccattgccgtcgtggtcgaaccgcgcatacaagccacggtacatctccacgagttcatcggagctcatggcggcctcatcaacaccgaaatgcttctcaaggaccctgaggctcatgagctcctttgccatctccgagtaggagaggaggccgtcacggttggtgtcgagggcggcgaaccggccatcgacggaggagttgaaggcgccctcgtcctcgacgaagctcctgatggtcttgccgtcaaggatttctacactcatgttgccggctctacaaaatgtggcggtctcagagatgtttttggtgtgtagcagatgagtgctacaaaatgtggttgtatcagagatgtttgtgtctttgttctagtactttggtttgagcaaatgttgagcttgtaacttctacttatatagagaggcgtagcagctggttttggagccactatgaccggcaacatggtatggggcatttccagtgcaatgttcccaacccctactgccttcggcgttgttgatgattttacactttcaaatggaagattcggctgtgtacttgtgtgctacgccatgatttgcctctaaaccaatggatgtgttagcacctggtttcattaaaagcggcaaaaatgatggacgacgatgccttaagaagtcggtggttagatgcaccggtaaagcctagcccactggtattgacgcccgcgttttctgttggactcgtgaccacaagagtcaatcccggttggactctgctggattctgatagtgtttgcttgccagttttcaattggaatgtctagattctaccatgtcggctgataattatagattaacccttttttaaaatagtttatctagatttactagtccgattaacaggttgctcaatgcttcatacgtagttggccgcaatttcgtcattgcaaacagttcatcacattggcagatgtggcaacgagttaaataaccagatcaaccagaacagcatgaataaaagggaggagattaaaaatttactactagtaacgataacttcttcattcagagtgatgatagagggttcaacatcccagtcgcagcttcgcagggttacaacttctttaagcaacaacccagagctctcaagcgtactaagtaccacaactacttctagactacggacataacatggtagctgggcatacgaagttccaagagattaacaactacggagtacttctaaactggacataacatggtagctgcgcacacggagatccaagagattgattcagctggtgaacactttccagtgcctcacgctatcgaaagcgagttgatgaacttcttcttcaacctcagctgaaaaagaataatagaaatgggaacaaatcagacattccgagtttccgaccaaagttgaacaaacactgtaattgtacggcttgctctgcatttgtgaggggaaaaaaactgtacagcgtgtattgcaaccgatgcagaacacagtaatcactagaataaacacaattcaaaggcaaaccactgaactgaattggtgttcagactgatgcgactctatccaaatttccaaatccgtgacaagcgcacacggaggcaaccaatgacgatttcaaatttccaatacaaagtacaggagtatgacaactatctaagacaaattcatctccagcattcagaccaaagcaaagccaagaacatgaacaatggtgtgttcacatacgaagaggaactttagaaatgctcacctccttgctgtggccacacttcttcttgcggcagtggtgagacctgatgggaaggcgtgcatagcacctgcatcaggagatggaacagggttgaaatcaaatcagttcatgttagccgcggatgcaaagctagtatcatctggaatcaaggtgcgggcgggcgggggcgtgcgtgagttcgtacttgcggcagaccttcttcttctctctgtacttgagcgcaagagcccggagggtgggctcctggatggtgtagccgcccctgctgccgccgcggaggcggagcaccaggtgcagcgtcgactccttctggatgttgtagtcggccagggtgcggccgtcatccagctgcttcccggcgaagatgaggcgctgctggtccggcgggatacctgtacgggttgtgcagagatggatacagttcatcagcttaaacagcagagagattcgaccatgcgcacacacggattcaacaatttccagcttagcagagcgtgatatgaaattaacactaccggaggatcaaatcaatacagcatgtaaaaggatacagaacgttttaggaatcgattcaagtagttcgaatcagattataaaacaacatacttttttgcttattgtaacaagaaaacaggggaccttttagatctagttaaccgtgcagtatagcgtgacagttataaaaaaaatcgcctccagagaaattggaaaggaactattcaatcggaaggttttgggtttttatacgcttttcaagatggatctactctgttacagatctaaaaaaatggtagaaaagcagcaacattggatgggcgatactactagagttcacgcattttgctcagtattccactaaacccacaaaaacttgcaactgctatacatccgaccctattgttcgaccctgtccgaccctgccgtatctgctaatcaatttactccaacgagccagctgctctccatgtgggccagagcaaggagcaggtaagtactggtcggatgctaagtcgtacataccagtcggacgtttaacaattccctatatccacagcgcataaactccactaaacccacagatttgcacacaaacacagtaacatatcagcatatcgagcacaccaaacaaagcagcaatccgaccctattgttcgaccctgtccgaccctgccgtatctgctaatcaatttactccaacgagccagctgctctccatgtgggccagagcaaggagcaggtaagtactggtcggatgctaagtcgtacataccagtcggacgtttaacaattccctatatccacagcgcataaactccactaaacccacagatttgcacacaaacacagtaacatatcagcatatcgagcacaccaaacaaagcagcaatcaatgcaggtcagcgagaatggggagggctaggaatggagagacggcgagtcggcgaccatggccggtgcgagcataccttccttgtcctggatcttggccttgacgttgtcgatggtgtcgctgctctccacctccagcgtgatcgtcttccccgtcagcgtcttcacgaagatctgcatcttgccgccgtcgaacgatctccccgcgctctcgccgatcggtggagtggtggtggtggtggtggagtggtgcgccgcgccgcagtcgtggtcacccgctcttatatatgggcgaggaaacgcagccgccacgaaagcgaaatatcccataaaaataaatagaaaaagaaaaggaaaataggaaacgcagccgctacgaaacctataaatgtcgtaagaaaaaaaaaagatgaaaaagaaaagagagaggaggaaacgcaaccgccacgaaaccgaaccacaggattgacacgtggcacgagtacgggcccatggagagctacaggcttctggctattgggctggtccgtgtatatggcccaagcagacacggcttaaattgtggaattttttttatttatacatttttttattaaaatatttacaaaaataattttttgtttcgaaaatttacaaatttaattgcctgccgcccttaagaagggcgatttttaaaaatcgccctctcaaagggcggcaagggacctaaatacaaaatttttatttgtgatcaaacccttcccaccggttttaattgcttaaaaactaataatgcttattcgatactccaaatgattttaaatggaaaagtgataaactacaaagttatagatctcatcaagatctacaactttatataaagtttatctccatccaatgtcgtttgaaatgtagatctgagattttttaaaatgtgttttatattttgtaacgaatatttggatatctaaaacatcttaaatgaaaaagttattaactacaaagttgtagatctccttgagctctacaattttgatataaagttttatttcatctgactttatataatataattttaaattgtaaaattatagagctaacaagttatgctggaaaatttacatttaggtcccttgccgccctgtggaagggcgatttttaaaaatcgccctcccaaagggcggcaggcgattagatttgtaaattttcaaaacaacaaattatttttgtaaatattttaataaaa

SEQ ID NO: 6508 - DNA, 11418 bp, Oryza sativa
gcgtcaaacatttcgaaacggagggagtatatcgtttgtcccaatgttcttatcagaatgcatagcagcataacaccttgttgaaataaatacttgtattgtttgttttgtttcttgtctcttgtgttctcttgctgtttgttgtttaataaacaactgcaatttttgcttgcagctggaataccttgaggagcgtcgcctcaaggatctggtgaagaagcattctgagttcatcagctaccctatctccctatggactgagaagacaactgagaaggagatttctgatgatgaagacgaggaagagaagaaggatgctgaggagggaaaggttgaggatgttgatgaggagaaggaagagaaagagaagaaaaagaagaagatcaaggaagtctctcacgagtggaacgtgatgaacaagcagaaacccatttggttgaggaagccagaggagatcaccaaggaagagtacgctgctttctacaagagcttgacaaacgactgggaggaacatctggctgtcaagcacttctctgtggagggtcagcttgaattcaaggccatcctgtttgtaccaaagagagcgccatttgacctctttgacaccaggaagaagcaaaacaacatcaagctgtacgtacgccgggtgtttatcatggacaactgtgaggagttgatcccagagtggctcagctttgtcaagggcattgttgattctgaagaccttcccctcaacatctcacgtgagatgctccagcagaacaagatcctgaaggtgatccgcaagaaccttgtgaagaagtgcgtggagctcttctttgagatcgctgagaacaaggaagactacaacaagttctacgaggctttctccaagaatctcaagcttggcatccatgaggattccaccaacaggaccaagattgctgagctcctgaggtatcactccaccaagagtggtgatgagttgaccagcctcaaggactacgtaacccggatgaaggagggccagagtgagatctattacatcactggtgagagcaagaaggctgttgagaactcccccttcctcgagaagctgaagaagaagggttatgaggtcctgtacatggttgatgccattgatgagtacgctgttggtcagcttaaggagtttgaaggcaagaagctcgtctctgccaccaaggaaggtctgaagcttgatgagagtgaggacgagaagaagcggcaggaggaactcaaggagaagttcgagggtctgtgcaaggtgatcaaggaggtgctcggtgacaaggtggagaaggttgttgtctctgaccgtgtggtggactctccctgctgtctagtcactggggagtatggctggactgctaacatggagaggatcatgaaggcccaggctctgagggactccagcatggccggctacatgtctagcaagaagaccatggagatcaacccggagaatgccatcatggacgagctccgcaagcgtgccgatgcggacaagaatgacaagtccgtgaaggacctggtgatgctgctcttcgagactgccctgctgacctccggtttcagcttggaggaccccaacaccttcggcaccaggatccaccgcatgctcaagctcggcctgagcatcgacgaggacgagtccgccgaggctgacgccgacatgccgccgctggaggacgacgccggcgagagcaagatggaggaggtcgactaaacgtcatggacccatggatgccattctgtcccttctagttatccctctcctagttctcttctcatagctatctgactgctgctgttcgctttctttttggtacgttggatgcatcagttttgtctttgtcttagctcttaaacaatgcgtggtaccttgtcatactgtttgcgttgcaatgctactagccgaagtatatgccagcttcttattcatacttataacgtctttttttatcaaattatgttggctgaatcccttggagtgtgccaatttccatcttgaacttgagtattccaagtagctgttgtgagcagcccgaccagtattctggaacttcttcctaataagcctggttgctgcaaattgatggaatgatggaccattgtttgcccgcagtatgctggaacttcttccatctgttattgtatggctagatagtggatggtaagcttagtatgcctggttgctgcaaattgatggaatgatggaccatttttagcctgcagtattcttgaacttcaatttgttagtacaaggctatttagtttgaatgagtgatggaatgtttgttcactgttgatgcctgcaagatagaatgcctcgaatgtcttcttgctttgatcaattaaccatctgcagggaatttcgttgtttcaatcatctttggtcgacctcgagagctttctgtttccgtttcaatcatcttttcgttgtttcaatcatctttggtcgacctcgagtactacttagtagtagtggaccagtaatttctgcccctccgctctagcacaaacccaactgacgaactgatccgccggttgagagatggagcacatatgcgtttttgcgttgtgaggacatcgtgaggtacgtgtcggctgatctgctggctgagctcacgtgcatctgtatcggatcggaggcagaggttagaggtacgtgtcgattgcccgtcgtgagtacttcctctgcttgacacctggtgcactgccatggcgaggtggccatgaaacccgaatccctagctctatccacacacataaaactagtcttggattctactagtagtaggccaaaagcaacatccattataaacagtgttggatactaccaggtcaagtacacattcagagaaacaaggctgcactcttgctgcagatcaagcggaggacttgcaatggaggcaaccaaggagacccagcagcagcagcagcagaggaagccggacgccggcgacacggtgcagctgccgatggacaccagcccgtacgtgcagtacaagaaggacgacggcctggaggactacaagctgcgcgcctacggcgcccgcggccacctccccgtctccgacgtcccccacggcggctgcggcaccgacgcccccaccatccccggcaccgccgtccccgtcgccacacagcgccgccaccaacaaggcgacaccgccgctgccgccgccggcaccggccgcgttgacaccgccaccgacgccatcaatcaccatggcgtgccatagacggtgtaagtgggtagactatgggtgttggtcggtgagccgcgaacccacttattttaatttataagtggatttgcggtttattttagcctacaagtggatttcacgccacttacactcgtaccataaaccaccgtaacatcttttcggttttcactgtgtgagctgctgcctcttgtggtagtatagtgttcactgttcagtgtccagagagtgataaaaaaataattaaataaagcctgaaatgtgctactatcaggcacactgtaatactgttactagcccgaactggtttgcatcaaaaatatttttaacggttttcaacttcttccatgtcactatcgatgatgcttatttattgcagttttttttcactattttttccccatatatatgtcactgtaacaaaacaaaatgatcgattgattcatcatctcggattgtaatcagctgcatcccttggcgccgaagccgatcctctggttggcaacgtcgtacgcgacggcgaacgtcttctgctgcgtgttcccgaggatggcgatggacgagtcgtcggcgttgggcgcgaacgccaggcacgcctgcgacaccttggagacgtagagcacgccggtgaagtcgaggctgacggtggcgccgccggcgaacgccagctccaccgtgggtatctgcgccgtccggtggccggtgaagtcgtagcacgtgtcgaggatggacagcgcgggcgccttcttgtactgcgccatggagcgcgcgaacgccgcgcggagcggcgcgtacgcgcgcggcgggaggcgggtgatcaccgtgccggagtcgatcaccgtgccgccggccgccgcgaacgccgtcgccgggatcctgatcgcgcggccgccgaccttgatgccgacgaggtcgatgtagtagaacgacggcgtcgcgccgtcggccagcgccgtgaactgcgcgttcgccggcggggcgccgccgagggacaggtagcccctgccgctcgacgacgacggtaggcagtaggtgaatccggggccgtagctcggcgcgccctgcgacggcagcgacaccttctccctgccgaggccgaacagcccgtcgacctggccgaacagcccggcgttctggtcgccgcacccgaagacgaagcccgggagcgtgtccgacgccgagagcgtcagcgtgtcgcgcacgaggttgccgtcggtctgcgactggtcgccgtactggacctcgtaccggcacctgctgtccgacgagcagcccgacgcgtcgagctcctggcactccggcgcgccgcacgccacggcggcgtacgtcgacgacagcgacgggtcgaacagcgggtcctgctgctcgtagcagtcggcgcagggcttgcactgcacccacgacaggtcgctgccggtgtcgaagatcacggcgtactgcttcgccggcgtcccgagcccgacggacacgacgtagttgccggtgccgagggagatgcccctctgcgccggcagcgacacgccctgctccgaggcgcgtgccgggtcgaccaccgacggcgcgcccccggcgccggcgaccttgcggtggatggagtcgaccctggcctggtcgcgttccaggatctcggcgtgggtgacagcgccgccgccgccgcgaggacgagcctgcaccggcgagcacggcccgtgccggtgcacgacgccgagagccgacgagttggacgccgctgcaagaaaaacagaatgggaaaatgagaaatgcaatttgtgcaaatgcaactcgaagcaaagaaagggaatgttcagattgtagctaaaataaatcttaccaaattttggcaagatggtaagatggtagtattgctaaaattttagtaggattatttatttatttatcatatttggcaataaactaaacgtatatattttttgacaacttaaaaaaaatggtatggttaaaaatggctttaatctgaaccgccccaaagctttttactgcactgaaaattttgtgtagtgatcagtcatcagcatgccaaaagtttactcgcatcaatcagcaacagattacctgatgtaattctgatcaatactactgtaaaacatattatgtttcccttagaatatcttataaattcgatatatgctgcatatgctatcacggtagctgagtttcagtggtactaaaatttcagaataatgcagatgctacttcagtcacaatacttgtttgcaggatacagactaaccatactccaaattggcctaacagatttcttattgggtttttcaattcctcagtttgatcaaatggacgagatttatataaagcaagttcgatcgagatggttaatggccgaccaggttacattatttttccgcagtaactgcttcagtttcagatacagttgcgaaaggagacaggctgcaaaactgacactacctttcgatgcagtgcaggccgagctcggcagcagcgagctgacgctgaagacgtgccagttggggtcgttcgtcctcgccgccggcccggcggcgccgccattaatccggcgaggagcagccaccagagctacagccacaaccagcgcgaacgctctcccacgaacaagaagcgacgacgaggacgccatggtgatcacctcgtcacagctcgcgatcagttggctgagcctgagttagctagctctcactccctcgcttaatttgtccgtgcagctgaagcgatggccattgctgctgcttatatagcatctcgtcagtagttggcaacgcataaaccaccactgctgttggtgccctggtccacaccacacgcgggcgtcaaagtcgtcctcctcgtcgtcggcggctcgtcgccgtcagccggccgcccgtgcgaaggaaaaagattaggttgttcgccacacacgctgctggctagctactagccggcgtccgatcaaggagcaccatggcattacacacacggcgacgactagcgatcgagctagtgacgaactgtcaactccaactcccaactcgatccaacttgattgcacgagcacgaacacgcgcactacggaggccctgtttagatttcaacttttttttcaaacttctaatttttttatcacatcgaactttcctacgtacgcaaattttcaacttttccatcacatcattcctatttttttaaacttctaattttagtgtggaactaaacacagactgagcgtaaattgccgtttagatcagtcgtacgtcaagtcggagccacttaaattaagtggatccccagcatcgctctaaatgtaaatgttcctatgatgtttagcaaagataaaggataagaaaaaagaattccggtcaaatttcgaattgtctggattcaccgtataagcacctgattgattagaatgcttgaattcttgcccattggaacctgaatgcgaaatgcttatattttaaaacagaaggattacgttgccatatatatatatatatatatatatatatatatatatataatttatttcaaatctagatcaatttggctacgatcgaaatgggcataggaaaatgacacctcttcccgttccgaaaggcaggcagagagaccgacctgtgtcacaaattgtgtaatatattgggtggtgaatgctgatatgttggaggttgctttcctgcctccaccacgccagaaagcaggaaatgcgtatgcatgcagtgctcgatttgctgatgcactgacaaagtgatcacaaacacagctggtgcgttgcaagcgtgtgtcattgctgcgtgagatgaaacgaaacgcgcattgctaattaagcgctgttcttgttgttcagtaatactccgtaattgtttagttggttcagtttagccctggttaggagttagttaaactatgtagttgtagtagtagtacataaacattgattcttgagaagttacagcgttgatacattgagaacatgacagaggatgagacattggcacacaaagggcaccaataagttacacacactcatatgattgatgcattccaatatgctccttagacagcatcagatttgattaattaactttgattagactcatgaacaacacatagcattttctgctagcttccatgcaaaatatttgcaaatggatagtgcagtgcagaagagcagaaacctaacaaggactgtcactttgtgcaacatcctgccgtttgttcaggctcgtaggacaagcaggaaaagcagcgtttgctcgtagttgccatgacaaaatcgagataaaaaaaataacccaaaagaactgtacctaacattatactagcatgctgcatatatacaagagaagatatacataattacatatatcatttgattaaccgggaatggatcgaagacggcctaccaaacgtgtacaagtgcattgcatctggtcagtcagccgcgtgcagaaatgggcgaagaaactgtacaaagtgcatggctagctaacatttactgtcacttcatcgatcgcactgagtacgaaagacgagtagacgacgaccatcattagtgacgtccacgctaattaccctctcgagtcaaacacaggtgcaggacattagtgcggttaatatcttggagtagttaattaaggcgttaaatcatgtgcaaccgcacgatctctcgttccgtccatttgtggtgctgaccacaggatggttgaaggacaattgagcagtactgctcacttacatgtgagcccgagaggctatggggttcacatgtcagtgagcaatattgcatgtacaatattgcagatgacctgcatggctgcatctggttgaagggtagaaacaccacttttccactttttactcccttgtttttcatgcatatttcttcaacaactaaacattgtgtttttcttaaaaaaatttactatagaaaagttgaatttttaaaatcatattaatctatttttattcttttactaatatttaatcatgtgctaatgaactatattgttttctgtacagaaagaagaagagccccatcggttgccttaataagccaaagcaaaagataaaatttgaatttttaaacttaattttgaagttgatttaaagatttttttcaacatagtttttttttcagcatcgacttttaaatcgttaagaacacatgtataaaaagttttaccaataaattagttttttattatctaatgaaccaaaatggcttattagaaaatatgagtaaccgatgaggccggaagtatccaactaatactcttgaacacatagggcctgttcattttgatgccattttcaaccataccattttttttgtcaaagttgccaaaaaatatatacgtttagtttgttaccaaatttggtcaatacataagaaatcctgccaaaatgttggcaatattgccatcttgttaaaattttggtattgccaaaacttggtaaggtttattttggctacaatctgaacatgcctataatagtagaaggggtttatttgcaaatatccatctccaacttcacgtgggactatctgagtggattaaagtggtttagaatctaataatcgaaacccattttgaaaagggttaaattatcaaatctctcctcttgaccctccctttctttccatgggcttcgccggcgactggaccctctactgtcttgaatgcgcttcatagcttgttttcatagacttcattggcgacttgatcctagtttgttttcatgggctttacgggccactggaccctcgcttgtcttcatgggctttatgggcctcattttcttcagaattttatggccttctatacgcccactacacctaatcacgcgcaaaatctcactgccggtccggcctggcccacccgcaacgactagtcaacacgcgctgcggcctcgccggcttctaggcccacgtagaaggttcgagaacaacgaggaccgcataaaagcatctcccacccccacgatctcgccctctcaaaaccctctcctaaccctagccgccgccgcagccgcagccgcagccgcgcgtcgtctcctccgcccgcgagctcctcttcccgccggcgagagatcaggagcacgcaaggcgcgcggccatggcgtcggagaccgagacgttcgccttccaggccgagatcaaccagctgctgtccctcatcatcaacaccttctactccaacaaggagatcttcctccgcgagctcatctccaactcctccgatgtaagtttgcgccgcccccgaaattaatcccctctcgtcgaggaatcgaaatcggtgcttgcttatgtgctctttgctgttgttgtacgcgtcgatctgtgagcgtgacggcatctgaggatcatatactgatagggcgtagacctgtttcaaatcaatgaggtgtgagcgttgactcgtgatttgtagagtttgtgctagtttatttgtttgttttactcatcgaaatgtgaatatggccacatctgagcactagcataaacttgttacaaatcagcgagggttgtgtgtttacccgtgcgtgtaatctgtatagtgtggtagtgtgctgatgcttttacagatctgtgtgtttgggtgatgaattcgatgtgacatgggtgtgtgtggtttctgcaggcattggataagattaggttcgagagcctcacggacaagagcaagctcgatgcgcagccggagctgttcatccacattgtccccgacaaggctagcaacaccctgtcgatcatcgacagtggtgtcggcatgaccaagtcggacctcgtcaacaacctcggtaccatcgccaggtcggggaccaaggagttcatggaggcgctcgctgctggtgctgatgtgtccatgattgggcagtttggtgtcgggttctactccgcctaccttgttgctgagagggttgttgtgaccaccaagcacaacgacgacgagcagtatgtgtgggagtcacaggccggtgggtccttcactgttacacgtgatacctctggtgagcagcttggacggggtactaagatcaccctctacctcaaggatgatcaggtataagattcagcacatttctcttgtgaattcctattacttgtgtgatatatgttgctgtccatgtgatgttttttttgtcagaactttagatgttctgtacatatgacaattggatgagttcgggcctgtatggttgagttggcatgctaccagtgtacatgatctttcttgactgttagcatgttctgaagaaatattcttgctactttaataagaggttgtcttgatgacatggtgctcattttgtagtacaataaatgaactgtatagattaggggtgtacagcagtttttggaatagtggtatcttgttctcttggttacatttactgaaaatcaacattgctgataaaccgtaattctgaactagtgatatgggtttctttggtagtaatcacttaattaaacaatagtattagttgtaacaatatatatttggtgtagtatacatcttactgttttccgttaacatgaaatgaattttgagatttactgctttcagcttgtctttctgttcttttgtgctgtagttgtgacttccttgtatgctacaataaatgaactgtatagattaggggtgtacagcagtttttggaatagtggtatcttgctctcttggttatattgactaaaaattaacaatgccgctaaactgtaattctgaactagtgatctgggtttcctcggtagtaatcacttaatgaagcaatagtattagttgtaacaatgcatatttgctgttgtatacatcttactgttttccattaatatgaaatgaattttgagatttagttgtatacatcttactgttttccattaacatgaaatgaattttgagatttactgcttttcagcttgtctctgttcttttgtgctgtagttatgacttccttgtatgctaacattgttacatagttatggtctgtctttgttgttgtattctgctaatcaatttatatactcccttcgttttgaaatgtttgacaccgttgacttttttagcacatgtttgaccgttcgtcttattcaaaaacttttgtgagatatgtaaaattatatgcctacacaaaaatatatttaacaatgaatcaatgataggaaaagaattaataattacttaattttttt

SEQ ID NO: 6509 - DNA, 9629 bp, Oryza sativa
acggtggacgagcagaaggcggccggggtggggatcctgctgcagatatcgatgctggtggtctccttcgtgctcggccacgtcctccgccgccgcaaggtctactacatccccgaggccagcgcctccctcctcatcggtatgtgttcccacccagttacagcattttgggcttgtggaaactgaagaatgccgatcgtcgctgagggtcctatcgattcatgtgtctgacttcgcgatcgttgtgtatttgcgacgccgtgcgatgctttgagctagcgcatttgatgcgggggtgatcgtgtttggtgttgtttactgacgccgaatgaactgtttattcacacgatgtttagtggcgagcagtaacggtgtgagtgtgtgattaggaggaacggcttcgactgtgcgtttatgcacaaatcagacgaacaaattttgcattcacgacgcgcgctgtagtctagttcgagctgtgcttttccaaaatttactgtcgatggttgaggattggttgtaacaggtgagggctttggaggataaaatgaacctttaaaaagttggcatgtagcgcaaacagatgtcttttccttcagataagcgtatttccgttacatttcagtagcttagcttttactgatttctgattatctaagataagtgatgtgacatttgggtttattctagctacgttttatttggatcatccggtggattatcatatactatttgccttggaaataaaacaccctagctaagatggatcttaccattttatttaatagtttgtagagcctagaggtacattgaaaatgttagaatcgtatgacaccatattattacgaaattatttaatagcttttcttgtcagggatgattgttggcggccttgctaagatatcaaacactcaaagaagtattaggtgataatatttcttattactcactgtatacaatttttccctgcaaaatatgacatcgctgttaagtctgaacattttgtggtgttcatttgctttattaattcaggagatggttcaattttcgggaggacttcttccttcttttcttacttcctccaattatattatatccttttttgtatcttgattttgttttttaattacttgtacggaaatttaccatgttttacttgactgaatcttactcagtctggattcagcttagcaccagtaagtgtggaattcttggatcctcttagttagttaaattctactcttcgttggttaaattctatcattctcagctaattatatcatattttttcctgatagaaaccattcttttcaaattttggtgccattataacatttgcaatcttgggaaccttcattgcttctattgtcactggtcttttagtgtaagagtatcttctatattgcctccattcctattcgctgatatttatttcatctataaaaatgtaatttatatttttccatttgtcacagatacgttggtgggttaatatacattgtctataagttgcctctggttgagtgcatgatgtttggtgctctggtgtcagcaactgatcctgttactgtactgtccatatttcaggttccttccatatccctatacagactatatttacaaattttgagataaaaggatcacataatgtccatcaaatcgcaggaacttggcactgatgtgaacctctatgcgctggtttttggagaatcagttctcaatgatgctgtatgcataaccctattattatttaatactagctgtttttttttatttctactgaaatgtgcatatttcttcgtgtctaactacggtttggaaattaaggtggctatatccttgtataggtgagaatgtattgcctgagctccttctgcctatatggctccttctcagaatcctgtcattaacaccttgaacttttcaggagtatggcttcactgagaacaagttcttctggacagaactattttctagctatccttaagtttcttgagaattttgttggttcaatgtcatcaggtactgtaccttaaatatttacaaatgcctttagcagaagaaatttcgagtcgcctatgtattttgctttttccattggatttcttgacttcgcttgcacttatgattatatatgagtatctatttgtactttaacatttgatatttcaattccatttttttatgtgcaggtgttggggttggattcatttctgccctcatatcctttattttgacattttctatcagtagagacctaatgtatattttttatttacacaaagtaaaactgataaacttgttacatgtatgtgatggtatcacctagttttttataacatatattaaattagtttaatatctgtaaagaaatgtatacctgtttgcaccctcctgaaaatttatttttgttccaaaacactgtaggggaagcccccacagttaaagatttattaaattgaaaaggaggaaacaattacaaaagttcaagcaaagagttaaatgctactctctcagaggggtttagtctatgtaatcatcctgaattcccactttttgctatcaaaacttagaatactcctgctggatcctcttagaaaccaatatgttattgttgcatgccttgagcattacctttccagggttgacaagaaaattcaatatgtttaacgtgtaatcatctttttggtctatttacaaacgttttccatttactctggagaacaaaaaaggcaacccccaccatgcaacaatatttaggctatgtacatggccagatcaacaacttcattgccaacgacaataagtcgaaaaagaaaattttaaaaaattcttgcaaaaacaaaacaaatgcattttttgaacttcatttttgcttatattatgttatccccgttgagactcaattgtcagtccttaattctatcaaacctcttcaagtatgcagctctaggtgttgagaagtaagtacattccgatttgcccaaactagtaccccacacataaactgctaatttattttttttttcacttccagccttcataatctggagagttgcttgtttgtccttttcccttacttctcgtaagcctatctttgaaatttgttccatttcatgttctctttaaatatctgctgtaaataattgccagttgtttgtaggtacatgctagctgaaggctttggtttgtctggtattgtctctattctgtttactggaattgtaagttagcctgtgacaatattttctctagattttattcttattacatattatagataagcaactttgcaggaagatattataaacatgcttacaagaagtgaatttttatttcaggttatgaagagatacaccttctataacttatcagaagattctcagcgttttacagctcgttttttccatctactttcatcactagcagaggctttcgtgtaagcaagaccttcaagtgcaataatttaacaagtccaaatactgaaactgtaatgcatttacacaggttcatatacatgggatttgatattgcgatggagcgtcaaagctggtcacatattggattcatttttttctcagttgtatccttcgcattgattacacaccaactcttacccatgcttgttacgaatacaataatttcttcttgtttccttaatttttttcccttttgcttatgcatccagatctttatattacttgcaaggtattttcttctccaacggaactgtctatcttttggtctgatgttggactagttgctgagtttttggagatgctttctgtgtatttatacaagcttaagccccatagctatataattgtgccgattttctgatattatcttattttaaagggccgcaaatgtcttctcttgtgcatatatattaaatttggcacgaccggtgcactgccaaatacctaggcagtatcagctggcactctggtatagtggtatgtaattatgtatgcccaaaaatgtcataaaataagtttcatgtttgtactgctaatattgttggttttttctttttcaggtcttaggggggcaatggcttttgcccttgcacttcagtctattcatgatcttcctgaaggacatggcgagacaattttcaccgctaccacatctattgttgttctaactgtaggttaccggttgtaattcttgtgatgttacataatagccacgactatttttatgcaaaggattttgtatgtatcagttcatgctattctatgaatcattctaaatgtctttttatgcaaacattgcaggtgcttctaattggaggctcaactggaacaatgcttgaatccctgcaagtagttggggatagtaatcgctatcgccatccatatgaggcaagtacttacaccgcgtatcataagtacatgcaaaaaacattatatttctctttgtttgccattaggttagttaaacaacgcaatcttatttatttgctggacattctcagcctaaatatcaaatgacattgcagttctatggaggatgcaattccattgcattccatgcactctccccatagggcttatttggatagataggtattacacacaatctttggatggtcacgattttttttctgttttcttgttcataatgaattagatctattcctttttttaaaaaaaaaactaattggttctctcttgaggtgcaacctgcttgttctacgtacaaaaaaccagataatagttatgcttaaatgatcatcatgggttattatttattcaataagagcacttactaacggaccgttggtgttgctgaatgccatatgcaccctaactatgtagctactatccgtccttgtttatctttcttacagctcatggattaacaccatagcattccggtggtttgccagttattgatgctgtacttacaatatgcagcataactttgatgggaacaatgctggctaccctgggcaacgttacggggaagaaacatcaacatcaagcaatttcacaatgaaactcaaagagctccagagaaggtacagcagttcacatttgatattgaagttgtatctactcattgctcttctttagtttgatttctaaaatgatgaacttttcattaaaaaatttcattgtgttaaagtaccaaccagtagtagcctttagttgcagagtggtacttttctataatttattatgtagtattgctgaggagcaggtgatctcctaatcgcttaaatatattttcctgccattacagcacctcttctttcgctttactggacaagcattaccttactcccatttttacctctcaaaacgaggacgataacagtgacggcgatgaggatattatcagtaagaccaaacctgcattccatctttctcttaactttatagtcaagcaatatcaaagatgctttccctcatcagaggcaaagcagtattggcttacttttttctccatccttttccgttcagcatttattcctggtaaataactatatgttctggtaaaacaagcagatgaatcattgaggaatgaggatatgtagaggtcctgcagatttggaggatcatgaactcatgattattgaatgcaaacatgacgcacgaaaatttttcaagagctgcgcattccaatcaagagcaaatgtttgagccatcagccatgtatacgtcacacactaggatagttcgacatgtatgtaagtaaagaggatcataggtgggaatgtaagattcgctaggttatctgctttctttaacgatgaagtttgatgaaggcacttttgctctaatcctatttttgatctgttgccatgcatcttcatggagttcagtgatgaaacttgacagtattgcttttcgtctagttatgtagaatcagcctatgagaatactaggatgtagcttcaaggcatgttttggttgattttctggggaattttaccctaattaattcctgcaaaaatttctattccaaacgtgcacttggcttccggtcacaataaccccacttatgtttttttccccctaatatatcttaaccaagagttcctgtcacgtcaaaatattttacaatatagtctaaaataaattaaaaatatttttttctataaaatgtgttacacatccttttttctttttgccttaatttgatgattttatatgttttcatatttgatttgattgtttttaatattaagaaatctataagaagtacaaatgtttcttttatatggcctagcaccgaatattcccaaatttccaatttccatcagcttccatagcggattggaataagttcgtttgttgttcctcatctttacatcgagtttatttggcatccctaaattgcaatactatactcttcactcttttatctttgcaagaccgttcaagtcaagttctaagataatatagatgtctgttttggctgatgtggcctcacatgtaagttgactcctcacctcttccctctcttccccatctctcttcctctcccctctcttccctcgcagcttgccggcggagagagggctggcagccgacgagcccatctgcatgaggtaccagtggaccacctcccacgaaccaccagtgcccgctcttctcctccgccatcacctgcatgtccagcatgcttaggtcgttcagcgtcgccacggtgtcgatcttgccatcttgggcaggcatgacatgctttgtgagtgcgccatggcggtggaggcctcccatcaccgccctgctcgtgtgccccatccttcatggtcgagggcttgccacgccgaggtaccaatcttcgtcgccgatagaggcatggggtttgttcagattgatgtcatttcaaaccatacaatttttttttgatagagttgttagatatgtgcatccatttagtttcttgtcaaactttggtaaatacacaagaaaacctacaaaaaatttgacaatattgccaaattaccaaaaattgataaggtttattttggctacaatctaaacaaccccatcgagccaaaggcaccggggcacgttgcgtggtgggtgatcgtccagaacttgagcggtcactcctccaacctcatgatgtagaacctgcaaagtagaggagagaggagatcaaaggaagtaggaatatttcgccaaatcaagtactagaattagagatgcagagggcatatactactcccttgacgttgttgatttttaatcaacgttgatcattcgtcttattcaatatttttaagaaaatataaaaatatttaagtcatccttaaagaatattcaatgataaatcaactcacaataaaataagtaataattacattttctttaataagacgaatggtcaaatgtatctcaaaaggtcaatggtatcatacataacctatgaaaaccttagaatcattttttttctgactacgatgcctcctgctgccttatgatctggtttgaatggttttgcaaaaatcatttattgtactgcagtttaggaatgccaactgaaaatcgacgtaaagctgagggacagcaagtggacttattcctagcggatcacagattattgaaggcccgtgacttccccgagaaaaggcccagcagcaacttagtcaagggccactacggcctcgccggcttctaggttcgtgtagatgcttctagaaccacaggatcccttaaatactctccctcctcttccatctcgcgtcctcttggaaacccctccaaaccctagccgcctctcgtttcttctcgtcctctccacgcccccgagatctcaggagcacaggaggaggaagccatggcgtcggagaccgagacgttcgccttccaggccgagatcaaccagctgctgtccctcatcatcaacaccttctactccaacaaggagatcttcctccgcgagctcatctccaactcctccgatgtaagtttgcgccgcccccgaaattaatcccctctcgtcgaggaatcgaaatcggtgcttgcttatgtgctctttgctgttgttgtacgcgtcgatctgtgagcgtgacggcatctgaggatcatatactgatagggcgtagacctgtttcaaatcaatgaggtgtgagcgttgactcgtgatttgtagagtttgtgctagtttatttgtttgttttactcatcgaaatgtgaatatggccacatctgagcactagcataaacttgttacaaatcagcgagggttgtgtgtttacccgtgcgtgtaatctgtatagtgtggtagtgtgctgatgcttttacagatctgtgtgtttgggtgatgaattcgatgtgacatgggtgtgtgtggtttctgcaggcattggataagattaggttcgagagcctcacggacaagagcaagctcgatgcgcagccggagctgttcatccacattgtccccgacaaggctagcaacaccctgtcgatcatcgacagtggtgtcggcatgaccaagtcggacctcgtcaacaacctcggtaccatcgccaggtcggggaccaaggagttcatggaggcgctcgctgctggtgctgatgtgtccatgattgggcagtttggtgtcgggttttactccgcctaccttgttgctgagagggttgttgtgaccaccaagcacaacgacgacgagcagtatgtgtgggagtcacaggccggtgggtccttcactgttacacgtgatacctctggtgagcagcttggacggggtactaagatcaccctctacctcaaggatgatcggggataagattcagcacatttctcttgtgaattcctattacttgtgtgatatatgttgctgtccatgtgatgttttttttgtcagaactttagatgttctgtacatatgacaattggatgagttcgggcctgtatggttgagttggcatgctaccagtgtacatgatctttcttgactgttagcatgttctgaagaaatattcttgctactttaataagaggttgtcttgatgacatggtgctcattttgtagtacaataaatgaactgtatagattaggggtgtacagcagtttttggaatagtggtatcttgttctcttggttacatttactgaaaatcaacattgctgataaaccgtaattctgaactagtgatatgggtttctttggtagtaatcacttaattaaacaatagtattagttgtaacaatatatatttggtgtagtatacatcttactgttttccgttaacatgaaatgaattttgagatttactgctttcagcttgtctttctgttcttttgtgctgtagttgtgacttccttgtatgctacaataaatgaactgtatagattaggggtgtacagcagtttttggaatagtggtatcttgctctcttggttatattgactaaaaattaacaatgccgctaaactgtaattctgaactagtgatctgggtttcctcggtagtaatcacttaatgaagcaatagtattagttgtaacaatgcatatttgctgttgtatacatcttactgttttccattaatatgaaatgaattttgagatttagttgtatacatcttactgttttccattaacatgaaatgaattttgagatttactgcttttcagcttgtctctgttcttttgtgctgtagttatg

SEQ ID NO: 6510 - DNA, 34639 bp, Oryza sativa
gtttccccccccccccccaagcggcggagccctgccgccatgggaactcctcgccgtcgcgtcgagctctatgtccggcgacatctcgccgtccacggtccgtcctctgccgccttctccctcaacctcggtcgccgtcgcgcggccaaccccggagcatcgccgccttcttggtcgccgcggccaagaacgccaccgccgcgaccaagggcgccaccgcacgcctccgttcccttccccggcacgcccgccgtgacgcgatgccgcctcggcatcgcgttcgtcgccgtgcgccgctgctcgtccatgcgccgccatcggccttcccatcctcaactcgccgccgacgccattacctcccgtcggtgagctccccacctccctttttccgctgtcccagcactcgcgtagctcgcgtcgcgcgtgctctgtttccgctgccgtgcgcaatcgagagccgccgttggcctccctctcggcgactcctctagccaccgccgttcttgagttccctctctacctccccaagccgctgtttcagccgccggcctcccctctcgccctcgcgtcgcgtcgcccgatccgccgctgccgcgctcggccacttccgctgtgcctcccctgccgtcggcctccctcctctccttgattcccggcgccgccaccttcctcgggcccccctcgacctccccaacccctccccctggccgccgaccttcctcctcgctcccgcgccgtgccgcccctcccgccgccgcaaggcgccgccgcgagccacagcccggcgaccatcgggtcccgcgtcaccgcgtgtgcgccgcaaccccataccgcgtccactgagcccgagcgcgcgagccgcatcccttcccatcgcgcatccacgtcggcatcccggcgagcttcgccgccgccgccggccgtcgtcacgcgtcgtctccccaatccgagccgtggaatcggttcgccttgacctcctctagccaccggtgttcgtcactcgcttcggctcgccgaagttcgccggattccgccgcgcgccgtgagccgtccgatgccattcccgcccctcccttttctctccccatccgacgtggctgcccacgtggcgttgaccgggcccgcccctgcccagtcagccggtcagccgtccccctccccctctctcccctggctcgtgggcttggcccattggccagccttcctcctcggcctaacaaaacaaaggaagtttacttttactccctcttccgagtccggtgctcacacaccgaagagctaaaagtccgcaattgctccctccaattgctcctctctctctctctcaccttcttattggccccactcgtcaatgagtcaaagataatcttgagaatgtctttccaatattccacaaatatttctctcttctataaattcagtaaatcattttatcttattccgtgggttaataaatctttttcccttgatcccataaatcaattctctattccaaaatttcatgaatcattttccttataaatcatttcctttggtcccgcacgtcagagacggtcaataatattcttgagaatattatttctataaatttcatgaatcaatctccccttgttccacaaatatcttccttcgccagaaattctaattaaacttccaaaattcgtatctctcggtccaatcgtccgattgaccccgttctacttccagtatttccgtaaaatcgagatctatttaatggcactattatttagtctaaatagggtctttttcttggtctcttgtttaggtttttgtctgtttgcgcatagttgcggttaccggattttcgtcgatcgtggatatcttgaagattcatgaagcttcgtgaagaccctgagcaaggcaagccacccttgaacatattgagcctatatttgaacttaattatattgcttgcaaaatattatgcattgataggattacacttaatttgtttgccccgtctgaaaggcagaccggtgggtctacccaacttgttgcatctgatccttccattgttaattgttatatcatgttcccttgtaaccatctagttgcgcctcgatattcgtgcactctgtgcgagtatcgacggttgccttcaaacttaaaatctgagtaacttcttgggtaaaacttggtttgcaaaagctttggaaaacccgacgcctgggtcggtgccttgtgaaagaaaatgagttttaaaaataaaactcgcgacacaaggccattcctgggcggaatacttgtgcggtcgcatctaaggaccgattcctttggaattacatccgagcatacaatagtgcgatcacacgggtggaatgggacgcccctggctgagtaaattgctaatcgggggagccttgatgccgagagacatgtggattcgccggggtggtgtcggggaggacccctgggcttcctggcacagtatggtctgggacctaacctgttgttggtctgggacccctctcgtcggcatatggtaaacctgtgtcggctttggaaatgccttgtcatgaaagcccttaggtcaccagacgtggccgttctacacgggctgggtgattcgggttagtaatgtcgtgtgggtaaagtgtaccccctctgcagaggttaacaaactgttcgaatagccgtgcccacggtcatgggcggatgtgaggtgattccttagcatagtttttgttttaccctgttttatgaaaaggtgttaaggtttgggaaacctaatgcttgggaagcatttagctgtccgggggacagtgggaccgggtgtccctggaagtgattggtcgtttggggaccactattatcgggaagtttggaaaattggtttggtttgggaaaaaccagatttgaagccaactctgggagttgtgcaaatcttgataaataaatttgttacttctcacctcccgaccaagctgagacttgtctcgctctggttgtggaaagcacacacttagattgttgaaaacttgaaaacaaaattgtttgcaaataacagccttcccttgaagcctgcattaaccacctaagtttccctggcttgctgagtacgaaagtactcacccttgctctatataaatatatatatatagttcctccgtcttgaagaaaagatgaagtgaagcgaagattagggtttcgtcctggttcccagccgtcgcctgtggtgttgggtgttagttcgttggttctgctactgctgctgctgctgttggtgtttcctcgtccgcgtcgtcggttgtattctcaggctgttctgagctacaacctaagttaaggtaaataagtcctctatttattttaaggattgctatgattcatatttgtcacagtgggtaccagcactatgtcctaggactggtaccgagatcgcggtttcgtaggaagcggttcgcgccgttttccctacgacacgctcctgtcaggtgccgttgtacggcggtaccagattggggtgtgacagttagccttccagtggttcgtaggcgccgctccaagccccgccaccgctcgccatggccttgccgccgtcggcgcccgctcccggaggccgcctctcgtcgccggacctccacggcgcctccccaccccatccgaacccagaaacgaaacccttgagccccggagatgctcccatccctttgaatcgaaccctcgtcgtctcgtcgtcgtttccccctttgctcgccgccggttgccgccaccgcgattcgccgtcgccggctaccctccggcaaatctgagccgttggctcactctctcttgtcctccttgtcgttccaatgtgctccccgttgccctcgccgtcgcatggtgtcccggtgaaactgccgccgtccgccgtccatctcggcctccccttcttcctcctcccgccggcccgcgtggctgccacgtaggcgccacgtcggcgccacctcggctttgaccgaaccgagccagtcagccgcctcctccctcccccaccctcgcgcgcgcggtccacagtgcgccaaccggctgcgcgtgggcccgccgcatctctggtccatccggtgcacgcgcgtgaaccgcgctcacccgaaaccctagtgccaccctcatgcgccgctcccacggtgagccgcgccactgacaagcgggccccactcgggaccccgcaaggtggactcagcccaccggccctctctctcccccactctccccgcgcctccttgggccgcctctccgggccggccggcccattagttcggccgagccgtgcctctcctctcgggccgcacccaagccgcccgaggaagtctaaatcatatccctccaatttctttccaaaaagggtttaataaattattaaatcctttttcctttagacagaaattccttaatccttagagaatccatatcttctcaaccgctcctccgattgactccgttccacttctaataattccgtaaaattgagatctatttaatggcactattatttagcctaaatagggtctttttcttggtcttttgtctaggttttcgattgtttgcgtatagttgcggttaccggatttccgccaatcgcaggttttctcaaagattcgtgaagcttcgtgaagaccttgagcaaggcaagtcaccctttgaccaattgctcctataattggaaaatcattattattttgtttgcaacttgcattattagaatcacacacttaatttgcttggcctcggtttgcgtgccaaaccgatggacctacccagtagtcgcactaactcctgtaggttgtactaccctgattccttgtcgctccacccttgtggtacttcggtatccgtgctctctgagcgcgtgtaccaaatatcccacatacaccgttgattgtcgaaaacttaggaaatgggtttgtgaagccttcaaaacccgacatgtggtgtcggtgtgtttgaaaataaaatgaattgtgaaaactcgcgatgcgggagccgtgcctacgtggcgctgtcccgtattcgcatataaggaccgattcctatgggaaactcatcgagcataatcaaagtgcaatcacaaggtggaatgggacaccctggctaagtaactagtcggttcagggaaacctcgcatgccaatagttgggaacgccggggcggggtcggacaaaccgggttcttggtaaggcaaggacaagaagcttgctcacttaccgatcaaggtggttggagataatttgtgaacgcctaaaatggcctatgtttacgtgaggatttgatccttctatgtggcatgaggtattcctgggtcggcttgggaaaggctttgtcgcgaacctcttacaccggccagtgtctggagtaagttcgtatcttgtgggtaaagtgtacccctctgcagaggctaactaactgttcgaacagccgtgcccacggtcatgggtagatgtgaggtggttcccgttgcgtagatttgtttgcctgtgctttgtgaaaagttgttgtggattgggaatcgtaaccagaatcagcctatgtggcagatggatgacctgagtggtcagaaacgaatctgtgtgattcgggatgtctgcgggcatcatagactaggcttcccgagtggaagcggattgcttagctgctgggcagctggactctgggagtctgcaaaaatgaaaaaggctctgggagccgcctaatcaagtgaaatggctctggaagccgataagtaatgatctgacccgggaggtcggtacattaccatttgagttgttgaaaagcatctcttaagtcgatttgagacgcaagtctcttttcgacccaaacttaaaaagaaataaatcacttagtgatttcaaaaatgatttcaaacaaaggatttgcaaaacaatcttgcctctcttccaagcttgcattaaacacctaagttcccgtgacttgctgagtacgaaagtactcacccttgctctatataaatatatatagttcctccatcctgaagctgaagatgaagtgaattgaagaatagggtttcgtcctggttcccagtcgtcgcctgtggtgttgggtgttagaccgttggttccgctgctgctgctgttgctggtgtttcctcgtctgtgtcttcggttgtattctcaggctgtcctgagctgtaacctaagttaaggtaaataagtcctctatttattttaaggatttgcaatgattcatatttgtcaccgtggataccagcactatatcctgggactggtaccgagatcgcggttttgtaggaagcggttcgcgccgtttttcctacgacacgctcctattaggtgccgttgtacggtggtgccggattggggtgtgacagcagagctggcggggtagctcgtgccctactccctccttgctaatcgatttagagtaggtacaatagaaagctatatgccagctataaacacatatcgaggagacgaaagaagagagagatgagcagcgggctacaaatttgtagccaactacaggcagcataggctccaagacaaaatgtatttatgacgggtgggaccatgtactaatagtgtatgaattggttattaaattaactacaaataatttggatccagtagttgactatactattaaacttgctcttaggtgcattctcctccgctgtatctactcgccaactccctatcatccactttgctacgagtttgctttttctctaattcaacaatttatcatccactttgctttctttataatacgatgttgactgtatcaactgtttcttcattcgtcattgaattggataatttaaaataaaacacttaaaacacccttcactacatttatagtatatggttgggcaattgattgaccaactaacagttttgaaaaaacaaaacttttgtgcaggctcttttacacaatgtagaagtttatgtttgcgtttgaggaatttttttcattttttaaacgatgacagctagccagcggccagcagattagcacaataatactatgaaaagaccaaagtgacgtgaccaatggcatcatacagtaacagcacaagcacacactacacgcactcattgttgtacggctaaagaggtgcactggggccgactgggtatgcgttgcccacgggaataaacagcacgacgacatgggtgcctgggtgcaccgatccatgggccctcctagttcccacacccacacacccacacccacacgtcaaagacccacggtttccaaccgagaagattcatgcgcggctgcccactccgcatattccgcgtgaatcctctgctctcctcgccccgttctgcccattttgcagctatcaaccatcgcaaaccaccggcccagagccgcatcatcgtttggcttggatccgcatcactgattcactgcacttcgcccgccgtctgcaaagtcaccgatctgtttggtacttacttgtacctttgctcacatggtcagacacgctatgttatgcgccgacttgcaaaaattccactgctacgtagcacactcacctataaattgcattcacccgcttcacactttcgccaaacaaaaccaaccgaaaacaaacattcctctgataattaagttatattatacttccaaagaatcatcgccatcatgagtgtggagatcctcgacggcaagacggtcctgagcttcgtggaggacgagggcgccttcaactcctccgtcgacggccgcttcgccgcgctcgacaccaaccgcgacggcctcctctcctacgccgagatggccaacgagctcatgagcctccgcgtgctggacaagcacttcggcgtcgacgaggccgccatgggcgccgacgagctcgtggagctgtaccacggcttgttcttgcggttcgaccgcgatggcagtggcgccgtcgacctggaggagttccgggcggagatgaaggaggtgttgctcgctgtcgccaatggcctcgggttcctgcccgtgcagatggtggtcgaggaaggcagctttctcaaggttgctgtcgacagagagctggccaaagcggcttgaaatatacctcaaccggcgagcaaattaattttcacatgtccatttacgattttggattgcttcttattgttcttacttcttgcatttgttgagctatactatgtatcgttttgatatttcagatgaaaacggtacatcgatagaacacttgaaaaatcctgtaccatttttatttctatttcattattataaataatcggaacacgacaactgattaaaaaacgaaaatagtatttcctccttgtcaaaatataagaatttctgggtttcaaaatataaaaattactagctataaatctaaacagctgcatatcaagattcttgtgaaaaattattatatttttgaacggagtagtaagatacaattgggaaattccatactattttcaaccttacacgttgagtaattcagacatgagacgggcaaacgcgacacgcgacgagccaccatctttccaggccatggccacgccatctctgtgcgcctcgacacgctctctaaccttccttccatgctcggactccatgaccagcctcaccttcgtctccacctcctcggcggtcaccagcccttccagccatccctccatctccacgccgacgcccatgtcctccaccatgagcaccttgttcatcctctgctccgcgtacagcggccagcagagcatcggcacccccgcggtgatcccctctagcaccgagttccacccgcagtgcgtcacgaacgcggcggtggcgcggtggcggaggatgctcggctggggcacccagctgttgacgacgaggccgcggccgctggttcttgcgaagaacacctccggtaggagcgcgtcgaggtgttgggtgctggttgcccgaaccacccacaggaagcggtggccggacttgtccaggccggcggcgatctccttcagctgctggtcggactgttcacatgcgtcggcgatgctcccgaagcagaggaacatgacgctgcggtcgggttgtcagtcgagccacacgaggcactgatgtcggctgctctcatcaccggcggcggcggcggctttgtcgaccagtggccccacggcgtacaccggcgggattaccacgccgtcggggcagcagcgcgggtcggcgagagctcgcagcgcccgctcctccagcgacacggacgtgttgatcaggattccgtcgaactccgccttcatgcgcgcaccggcaaaaatcatggcctcgaaatccttgttcacctcgctaatcggcccaaaaaggccagccaagtgagaagccgacatgggtcgaacacccaagaactcgacaggactagtactatctcctcccagatgcttcttgaacccgtcaacaagcagaggagcctgcaagttaacggcgaggtggccggcgttggacgggtagaacatcaagacagggactcccagcttcctcgcggcttcatgggcatgggcgcacgatgcgtcgatgaccacggcatggaggccccgcacggagcggaggaagtcgtggaggtgctcgttgtggcgtcgcacgaggtcgaagtagttcttgaagaactgatcgttgaaggcgagcgagggagggtccgggatgcccgggagcgtgtggaaggagatggtggagctcttggaggagacggcgcgggcgacggcggcggcgaggttggcttcgttctccatgaccgacgggtcgatgagcgccacggcgacggcgtagccgtggtccaggaagacgtcggcgagctccatcatggggttcaggtggccgacggcgaggccggggtagagaaccaccgtcttcttcatcgcaaacgcaccgaccgggagggtggaatagctcgtcctttcttcgcggcactgaagcgcaacctctcgagttctctgttcttacgaggaactgatgaaatatgactatgagagaaagtgcatcctgatatcctcattatgtaggttttcaggcttcagcaaattttctttcaaaaattatcgaacgtatacagtataactagttgggcggcccacgcaattacgcggctagcacccaaacaaaatcatatattttttaaatatgattttacttaaaatttattaaatagctatcccattgttttaagactttgaaagaccaaaccttatcattctcgtctttctaattatatagtttttaaaagtcacaccagttgctacctcttatgtcatcttcttctttatttgcttactcgatctaccactatttctattcattcttctttaaacctttaaaaattagattttatagtttttagagtttattgtcacgttgggttttatttttataatttttagatgtcccatcaaacgttgccattatactcctctacggcatgtccactatttcttctctttattgtcattgagattttaaaaatcaaacataattatcgtttgggttcatttgtactttctagaagtcctgccaaaccgtcagcggctttgccattgtactcctctacggctcgcccgctgcctcccttctttattgtcgttgtgattttaaaatcgaacatgattattattgggttttttttttactttttggaagttccgaacctttaaaaattagacttgtagtttcattttttacaatttttaaaagtcccatcaaacgatgccactacgcccctctatagcccgtccgccgcctactctttattgtcattgtgattctaaaaattgaacataactatcgttggaattcattttttattttctaaaagtcccgtcaaccgtcggcggctctgcaactatactcttatataccccgcccgctgcttcttctttttattgtcattgagattttaaaaatcgaatatgaatatcaatggggtttttttttttactttttgaagtcccggtaaccgccttacttgtttgcttcacggcctgcctgacgtctctccttttaatcgtcattaggattctatttggtgttttattaaaaatttttatatgtcatatcaactgccaccactctacacctttataggcctgttacttaatttatctcatcatgtgttttagatgttcttttctttcaatagtctttatttttatcacaaactagctaggtggcctgcgcaattgcgtggctagcacccaaacaaaatcatatattttttagtatgatttttacttaaaatttattaaatagttatctgattgtcttaagactttgaaagacgaaaccttatcatcctcatgtttctaattatatactttttaaaagtcacaccaattgctaccccttatgtcatctccttctttatttgcttgctcgatctaccattatttctattcattttttttggaacctttaaaaattggattttatagtttttagagtttattgtcacattgggtttcatttttataatttcgaaatgtcccgtcaaacgttgccattatactcctctacggcccgtccactgtctcttctctttattgtcattgagattttaaaaatcgaacataattattgtttgggttcatttttactttctaaaagtcccgccaaaccgtctgcggctttaccattgtactcctctacggctcgcccgctgcctcccttttttattgtcattgagattttaaaatcgaatatgattatcattggttcttttttacttttaggaagttccaaacctttaaaaattggacttgtagtttcattttttataacttttagaagtcccatcaaacgatgccactatgcccctctacagcccgtccgccgccaattcattttttattttctagaagtcccgtcaaccatcggcggctctgcaactatactcttatataccccgcccgctgcttcttctttttattgtcattgagattttaaaaattgaatatgattatcaatggggttttttttactttctagaagtcccagcaaccgtcttacttgtttgcttcacggcatgcctgacgtccctccttttaattgtcattaggattctatttggtgttttattaacaatttttatatctcgtatcaaccgccaccactctactcctttataggcatgtttcttaatttatctcgtcatgtgttttagatgctcttttctttcaataatctttatttttatcacaaattttagttatttataaattgtattcctaattgaaatcttatttttctttttcgaatttcagaattttttttataaaatagttaatatcgtattgtgttcttttaatgtttttattttttattttcaattttagttgttttaaaattgtatttctacttgaattttcttttaattttttctaattttagatattattttatttttattgtcaattttaattaatctcgtattgggttcttatatggattcttctttcaatattgcttatttttaattctgaatttcagctaattttaaattgtattccttcatgaactcttcttttattttcttttgctaatttcggaattatttatttttatttcgaattttaattaatctcgtattgggttattatatggactcttcttttattattacttatttttaattccgaatttcagctatttttaaattgtattcctacttggactctcatttccttttctaattttggattttatattatttttgtttttaattttgattaatgtcgtattagattcttatatggaaacttatttcaatatttcttatttttaattccgaatttcagctattttaaattgtacttctacttggactctcattttctttttttttcttttctttttctctgattaattgtggaatttctagcacccacagtgaacgtggtgcctcctttcaaagctgttttaataatataatagatattagttatttataaattgtattcctaattgaaatctttttttttctttttctaattttagatttttttaaaaaaatagttaatactgtattatgttattttaatgtttttattttcaatttcggttgtttcaaaatcgtattcctacttgaactctcttttcatttttctaattttggatattattttattttttattcaaaattttaagtaatcccgtattgggttcttatatggattcttctttcagtattgctttttttaatttagaattttagctatttttaaattttattcctacttgaactcttcttttattttcttttgctaatttcggatttatttttatttttattctgaattttaattaatctcgtattgggttcttatatggatacttctttcaatattccttattttaattccgaatttcagctatttttaaattgtattctaacttggactctcctttccttttctaattttggattttattttatttttattttgaattttgattaatctcgcattgggttcttatatggaaacttctttcaatattgcttatttttaattctaaatttcagctattttaaaattatattcctacttggactctcacttccttttctatatttggattttattttatttttattttgaattttgattaatctcgtattgggttcttatatggaaacttctttcaatattctttatttttaattccgaatttcagctatttttaaattgtatttctacttggactctccttttcgtttctaattttggattttattttatttttatttcgaattttgattaatctcgtattgggttcttatatggaaacttctttcaatattgcttatttttaattccgaatttcagctatttttaaattggacttctacttggactctcctttttctttttttttctttttcttggattaatgtgggaattctagcccccacggcaaacgtggtgtctcctttcaaagctcttttaataatataatagattgtgaaaactacatcgtaactacctactgtataatataacttgcatcgcatgtactctgatctccgtttattgttatttatcgctttgactttttctattaagttttttcaggtttaatcaagtttatagaaaatgttagcaacatgtataattccaaattagttttatttcatctaacattgaatatattttaataatatatttgttttgttttcactactcaccttgacattttgccctttccggaccgctacctgggtttccagtcatttcggctactgccaatatttttggaggaaatagccgttgttcctgatccttctagtcgggagcttcatatcttcaaggattgggtggagatggcgtaaacaggaaggaaaaaggaatttgaaatccgtcccttcccacggaatcatcgggcttgactttctttactttcccagccccgctcttgtaaaaaaaactcttttgttttgagactagctagtctctatggtttttggaaaactcttctcactctggtctcacttcgaggaatttctcgaaaaataatgctacatttttctataaaattggtgaacataaaaaatatttgactaagaaaaaagtcaaagcaacttgtaatatgaaacgggggtagttttatatataattttaaaccgttagattttgctttgagatttgtataagcgaaaaaaagaagcaaatcatagcgtatgcatacgcgagggagtttaatccgacatcttcacaatgtatcacataattttaaagttatatacatgttacatcgtagttacgtataaactatgtagatgtactgtaataaaaaaagtgactaccaattgatttttcgatagatttgaagcttgaaatattacataattttcaaccaatgaatacaaaccattttaataacaaaaacagaaggacaaccatgtcaaaaatcataagtctagagacaaacacaattgtaaaacctaattttagtgtattgtaactgagtgtatgtgctctataactaagtttaaatgtttaataatcaaatataagtactctataattgagtgtagctacaagttgaatctcaagtaacataaatcttcatgcaagatcctacggataaaagataataataaaaaaacagtagcctaagatctatcactctatggaaagatgtggagataggcccttgtattccttgtctaaaatatacgactaaacaaatttaggccctgtttggtagagctccagctcccaactcctaattaacttcaaactccaactccactagaagctagctccactgggagctataggtggtctaaaagtgtttggctaacttgctcagctccagaaatcctgaaagagaggatagggggtagatagacaatactacccttgtgttttttcactgttggcttaggattaactagtaatttgtccgtgctaacgctacagttatatttagttttatttggcaagtcatataaatggagttttagcaatgacacgaaatagatgtggggtaccataatgttcaacttttgtttcagcaatatctaaatttctatccaacttttttttttagaaacgaacgggaccataatgttcaatgattcatacaaaacaacataatcctgaagctttgctttctccttgagcatgatctaaataacttttccccatggcctccgcttgcctgaaagattgaacaatttaccattggtcaaatgcctacctgctgcaatgttatctacaaatgacaaacaactatattaagcagggatcttgtaaatgctaccaaacacatattttaccacaacttcgatttgagcaaagcgtgtagagatggacatgggtgcactgtaaaaacagtaataacttgagtgccaaacgctgcatttgcagcaagtttcaacaatagagtatatttttttctgaccaaatctttctagaaatctaagtgcagtgagaatatggttgaagtataaaaactaaaaatcaagcaataatagacacacagatcgggagaaattttaaccaacatctaggtaatcaatccccccaaaaaagaaccagatttgagggagggagtctagggtttggggttaccttcttcttgcaccaaatctgctaccccgccgccatattatagctcctgccgtgcgcctcctcgctgtggggagccactcccgctgccaagtgccgccgtgagttctcagccgccaagcccaaccgtcgtgcgtcgccctaacctctgcccaacgccgcccaaacctctactcggcgccctagccgcgagagaggaggcagccgccaccaccgctgccgtgcaccgtgtgccgtcactgctactgccgccgccgccttagtcctcccttccccttctctcttcgcggccttgcggagaagaggcgatgcgcttgaccacggggatgcgcaactcggctcgatgcggatggggaacgaaggggtagtgcggtggcattctgcgtgtaatttctttgaaaaataatgggtagcgctggaaccagttgagagtgaagttgtggagttgcgtttttgccgctccaccatgctagtgtaattttttggagcgatccacaccgctccgctccccgttttgatgaatccgaactgtttagcacaactccagctccaggtaagttggagttgggagctggagctgtgccaaacgggacattaatgtggagctagattaaattttattttaataatctgcacacatctatctcaggtacgtcatgtttattcccaactggaaagatttggactgtaatgaacataactttctagaagtaattattgacactgaatctccatcaatctccatcaatcgcggatgcagccgctttgaatggccttggttgtttgcttgatacggcttatagaaactgagtacaatttttcaagaaccagtcgttattaaagtcataaaacacagagaaaattgtgtgatcttgtagtcatattcaaaacaacagtcctctgtaaaacatttttgaaaatatttcaacgtactggtaggctgagttattttgttaggccctgtttagttccaaaaacatcacatcgaatctttggacatatgcatagagtattaaatatagataaattttaaaactaattgcacagttagggtggaaatcgcgagacgaatcttttgagcctaattagcccatgattagccataagtgctacagtaacccacatgtgctaattatggattaattaggctcaaaaaattcatctcgcggtttccaggcgagttatgaaattagttttttcattcatgtccgaaaaccccttctgacatccgatcaaacgtccgatgtgacatccaaaaatttccttttcgcaaactaaataggcccttagcttttccaactcatccctcttattttccgcatgtacgcttttcaaactactaaacgttgtgttttttaaaaaaaaaattctttacgaaagttgctttaaatagtcatattaatccatttctaaacgaatactccgttgtgtgtgatgattgctgagtagctaatagttaattgatcatgtgctaagtagctccattgcgtgtaggaggcattagttcccaacttccagtaccgagcacaaccttaataacttgactagcataacatctcgtcatctatgcttgttgacttattgggcgcaaaatttaactttttaagttatttttagattttaagggtttagttaatcgaatacttgactatattcgtttatttttctaggactgatcgataagccataacttaaccaattatagctgagctttagcagttactagtatttttatacttgctccgtcccataatataagtgattttagatgaatgtgacacatccacccgacaatatacttgactctttgcataaacatgacatccatcgcatatgaagcttagtgtcacaccccgatctggcaccgccgtgcaacggcacctgaccggagcgcgtcgtaggaaaaacggcgcgaaccgcttcctacgaaaccgcgatctcagtaccagtcccaggacatagcgctggtactcacggtgacaaatatgaatcattgcaatccttaaaataaatagaggacttatttaccttaacttaggttgcaactcataacagcccgagaatgcaaccgacgacgcagacgaggaaacaccaataacagcagcagcggcggaaccaacgaactaacacccaaacaccacaggcgacggctgggaactaggacgaaaccctaatcttcacttcacttcatcttcacttcaaggcagaggaactatatatatatttatatagagcaagggtgattactttcgtactcagcaagtcacgggaatttgggtgtttaatgcaagcttggaagagaggcaaggttgttttgcaaatcttttatttgaaagcattttgaaatcactaagtgatttatttatttttaagtttgggtcgaaaggagacttgcgtctcgattcgacttaagagatgcttttcaataactcaaatggtaatgtaccgacctcccgggtcaacaactcaaatggtaatgtaccgacctcccgggtcagatcattacttctcggctcccagagccatttcacttgattaagcggctcccagagcctttttcattttctcgaactcccagagtccagctgcccagcagcacaacaatccgcttccactcgggaagcctagtctatgatgcccgtagacatcccgaatcacacaaattcgtttctgaccactcaggtcatccatctgcctcataggctgattctggttacgattcccacaccacaataacttttcacaaagcacaggcaaacaaatctacacaacgggaaccacctcacatccgcccatgaccgtgggcacggctgttcgaacagttagttaacctctgtagaggggtacactttacccacaagatacgaacttattccgaacacccgtcggtatcggaggttcgcaacaaagccattcccaagccgacccagggatacctcatgccacatagaaggatcaaatcctcacataaatataggccattttagttttcacaaatcaaactccaaccacctcgatcggtaatctggcaagcttctcttccttgccttaccagaaacccggtttggctccaaccgaccccgccccggcgttcccaactattggcatgcgaggtttccctgaactgactagttacttagccagggtgtcccattccaccttatggttgcactttgattatgttcgatgagtttcccacaggaatcggtccttatatgcgaatacgggacagtgccaggcacaacccccgcatcgagagttttcgcagttcattttattttcaaacccaccgacgccacatgtcgggttttcaaggcttctcaaacccatttcccaaattttcgacaatcaacggtgtatgtgggatatttggtatacgcgctcagagagcacggataccgaggtaccacaagggtggagtgacaaggaatcagggtagtacaacctacaggaattagtgcgactactgggtaggtccgtcggtttgacatgcaaaccgaggccaagcatgttataggagtgattctaataatgcaagttgcaaacaaaatatattgatttttcaattataggagcaattgatcaaagggtgacttgccttgctcaaggtcttcacgaagcttaacgaatcttcgagaaatccttgattgatgaaaatccgcaaccgcaactatacgcaaacaatcaaaaacctaaacaaaagatcaaaagaatgaccctatttagactaactaatagtgccattagatagatcttaattttacggaattactggaagttgaacggagtcaaacgaagctatggatcgagagatatgaattttggaagtttaaatggattttctggacgagaaatgatttattggaatttatagaaataatattctcaagaatattattggcattcgctgatgtgcgggaccaaaggaaatgatttatggaatcttggaatagagaattgatttatggaaaagggaaaaaggatttatcaattcctttggaaaaggaaaggaaggagggatgcgaattggacttcctcgggcggcttaggcgcggcccaaggaaaggcgcgcggctcggccgagctactgggccggtgcgggcccattagggttcgggaggaggggggagaccggccgggtggacgcggtccacctcgcgggttccgggtggggcccatgtgtcggtcgacacagcgcatggtgcggagcgtgcacgtggcgcggggggctagggttagggtcggagtggcgcatggtttggtgcaccgggtggaccaaagggcggcgagccaacgcgcagccgctaggctctccgtggactgagcgcaccgagagggaggagagagcggacccgccttgactcggtctttgctgaggtggcgctgacgtggcacctccatggcatgccacgcaggccggcgagaggaggaagaaggaggccggccgagatggacggcgggcggcgggggtctcaccggagcacggatcgacggtcttcggtcatgggggagcacaccgggacaaagaggcggacgagaggggacgatcccatggctcggatgcgacggaggaggtccgacggcggcggattgcggcggtgaccgttggcggcggcaaaagaggggaatcgccggtggtcaacgagggttcgattcgaggcggcgggagcatatccggggctcggtgaactcatttccggcgccggatggggcaatggacctccaagggaggccggcgacggcgagctacctctgggagcgggcggcaatggcggcgaggccgcgccgggcggcggcgggcattggggcggcgtctatgcgcgttcgggacggctaccgagctactgcgcaagctagaggggacgaggatgagcgaggaagaggaacggagggctaccgcgtcgggacagggcgccgtgaccagcggcggcggcgtgggagagctctccagcctcgggccggggaaggggaagaagggatggcgcccagagtcctcttccgctccgcgcgcacgccggcttcccggcacgcgcaacagcgaggatggtgacggcgacgagtggcagagatggctcggcgtcaatggcgcggtggcgatggaagcgaaaacgagaggaagggagattggagagggggctcgattataaagggggcaatgtcggtttgggggggggaaccgaccttgcacggtcaaggaggaggagctggcggtcacgctaatggccaaggcggcggcaggcgatgacgcgggtggtgtcgggcaaaagtggaaaatggagggggaaaggggggctcaaacgggaaaaggaggagggagaggggagcgaggccgagggctctgcctccatccctgggacgcatgcgcacaggcggcagcgggccgggaggcagcgcgggcacaggcggtgctagggcttgacgcggcgagggcgcggcgaaattcaaaaggcggcggcgagagatcaacgccgggagggcgagaatgagaggggagaggaagagaagaacgaaagagagagagagagagagactctcggcttggcgtcggcgcacgcgcgtgcgccacacgtgcggagcgagggaggaggacggttgaggggaggtgggccgaggggaggggatccggcccatccaaaatatgaggaggcaaaatagactttcacagagaaattgaattgggagggatttggattttggatttcgaatttgatgcttggtcttagggacacaaggtggagtcaaggaaggaactaaaatgggaattgggaacaggtatttggcaaggattcaaagagagggattgaattttcggaatttgatttggagacttgaattggaagagaaattttgaggtggaggattttgattttgatgagagaaaacaacaggatttgaattgagatccacggcacgacttagactcgcacacaaagaacgaaatttccgcaattaggatttttcttaaactagtttttaacgtctcacgaaaagcggagcgttacacttagggatttagttgatggggcctaggactccaattaatttttacatgtaagatgtataccttatatgtatgacgtatgggcccccacaccatctaggaagaaggccccactcatctgttttcattctctaccaagaattgaatcatttactcccatcccctcaatccaattggcaatcaacgtcaaatcaagatggagaagcgaaaaattgatgtgtcctaagctcacaaaaattttttgcgtttccacgaagcctacaatcaccttcaggaggaggagcagcgcgtgcaacaagtggccgcctagacggcggatgagtccccactcacaaacactagtgaaccgtggtacttccttcgactactccctgtttggcaatagcagtgtatcaccctgctcaccaagtcgcattgcacatcatgacagatctgtgccgccacgccctagtcggctaattgttactcggtgtgcctaaattctaaagccctttccattagctatcaagttgtggttcaacgtaatcccttcctcactcgccatcacatcacccgatgtaggtccaagcatagaatgcttacactaggtgccccggtcaatttttatcatgtgccccggccccctagctacctgatttttaatttaacaaaatgtgaaagaacaatacatataattatgtcgatggattatattctaatcacaggatccatacctatacggtttgtctggaggacgtagaggttggatgctataaagagagcaagggagacaatgatttgtatataggttcagaccttttgatgatgggtaatagtcctactcttattgatcggagttgatgttaccattatatatcaatatctcacaggtacaaataggatggaaatctaatccaatttgctagtatatcaacttaaaacttggacatggtggttgatggttagctgttgtctagtttcttgagaatcgactcggtgaatttggaggtggctctagatctctcttcgctcgtattaggcttgccttgtaggtcttgtcttctggtatttatattcccggatgcccttttattcaaatagaactgaaaggtaaaatattgatacaatccgagtagttctgattgggcaacaaatgttttcttgaaaaccgtaaagctagcaaaaccttatcaactatcgaaacattgcaaaatatcggaatagaacctcggatacgttgcacacttgtgaaaagcgaacttcatgttaaggaattttgcctcatatgcaactattagtgaggattgaaagtaaaaagaaaataatttagatacttaatgaccatgacattgcttaaaaactaatactaacacataaggattacatctaagttttattacatttggatgggctgtctccattgacggttatttatttaaaaaattcggataaaatcagtacatcgatagatgaaaacccatctaacattttcatttcgattatcgatatttcaaaatataggaataatacaatcaatataaaaaatcagtacgtacggttgagaaattatgcactactaccattttcatcgttgtgcattgtccaactcggtcatgagtcgggcgaacgcgacacgcgacgagccgccatctttccaggccatggctgcgccatctctgtgcgcctcgacacgctctctaagcttccttccatgctcggactccacgaccagcctcaccttcgcctccacctcctcggcggtcacccacccttccagccatccctccatctccacgccgacgcccatgtcgtccaccatgagcaccttgttgatcctctgctccgcgtacattggccagcagagcatcggcacgcccgcggtgatcccctccagcaccgagttccacccgcagtgcgtcacgaacgcggcggtggcgcggtggcggaggacgctcggctggggcacccaggtgttgacgacgaggccgcggccgctggttcttgccaagaacccctccggtaggagcgcgtcgaggtgttcggtgctgggtgcccgacgaaccacccacaggaagcggtggccggacttgtccaggccggcggcgatctcccgcagctgttgctccgcgtggttcccgccgatgctcccgaagcagaggaacacgatgctgcggtcgggctgcccgtcgagccacacgagggactcgtgccgccggctggtctcgtcaccggcgccggcggcggccttgtcaaccagtggccccacggcgtaaaccggcgggagcaccacgccgtcggggcagcaacgtgggtcggcgagagctcgcagcgcacgctcctccaacgacacgaacgtgttaatcaggattccgtcgaactccgccatgacgcgcgctcccgcggccaccgtggtggcctcgggatccttgctgatcagctcgctcaacgagcgcccgaacaagtccgtcacgtgagaagccgacatgggtggcacgcccaacaactcgaggggagcgctgccttcttctcctcctcccagtttcttgaacccagcaagaagcgaagggatctggatgttcacggcgagggcgccggcgtcgcaggggtagagctcgtaggccggaaccccgagcttcctcacggcttgaatggcgaaaccgcacgacgcgtcgacgaccacggcgtggaggccctgcacggagcagaggaagtcgtggaggtgctcgtcgtagcggcgcacgaggtcgaagtagttggtgaagaacttgtcgtcgtcgaaggcgagcgagggagggtccgggatgcgcgggagcatgtggaaggagacggtggccgagctcttggaggagacggcgcgggcgacggcggcggtgaaggcggcgtcgtcgtccttgaccgacgggttgatgagcgcgacggcgacggcgtagccgtggtccaggaagacgtcggcgagcaccatcatggggttgaagtggccgacggcgaggccggggtagagaaccaccgtcttcttcatcgcaaacgcaccggagtggaatagctagcttcggcactgaatgaaacctctcgagttctctctgttcttcgtacgagtagcactcggaggaacttcttcctgcttaccctcttgttatttactcccttcgtcgaataaaacaaatcagaactgtatgcgacatatgttagtacaacgaatttagataaatatatgttcacattcatagtattaggtgtatcacatccaatacagttgagtttttatagaacggagggagtaggtttcaagtttccacaaattctctcgaaacaatcatcaaatgtaaattacaatgtaatttcaatttacacgtaagtaggatataacttgtacgtagcttttatataattttgaacaattaaatttacttcgagatttatgtaagcagagaaaggaaaatatctactacaacgtgcacgtacgtgggaggattcgatcccacgatcttcattttgtggaagcaacgtgttaccaagagatttttttaagttatatcattattagttatttaaattacaatataattggatatttgtcgacagaaaatatacggctcaaacaacaatactaactagccatgtggagctagaataaatcttatttatatactcgtaatttggacacacccacctcacgtacgtcgatacttgaaaacaacgtatcaggaagattgatctggactcaaatgaacatcgttttctagaaatggagtagttaacactgaatcattgatgacgctcacactcctttaatttaatactacagttgtgctgacactactacattatcgattttttctatcgataaaattgatttttgcaaatgggtgggtggccctctcgccatggccttagcgcttcctttgaatggcctaggtgtttatttgatacggcttatagaaacaacttttttcaagaatcagtcattagactcgtaaatcagagagaaaatgtgtactctctagcatattcaacatactaatcctcttaaaagacatatttgagaatattctacgcatgctagtaagattaataatataatgtctcattatctgttcgttgacttatgagatgtaactaaaatttaaaattttaaactcaattttaggtatttcatcgtaggctatttgatatgatgcatttcttttaaactactaagaataaaaatataataataatccacaaaccattataattttttggtttatgttttatggttgatcgataagccataacttaacctatcaaagccgtatatattagagtggcagtccattttctaagacattatatttaattatccgcacaaaagaaatcaatatataataaaaaatagtaattaccgttagtaaatttcatactcctaccattttttattctcgtgcgttgtctaactcgaatatgagttgcgcaaacgtggcacaataacgaaccgccatccttcgaggccgtgggttctacatgatcatctctgtgcgcctcaacgtgctctctaagcttgctttcaatgctcggactctatgatcagtctgaccttcaccttcacctcctcaggaatcaccagccctaccagccatccctccatctccacgtcgatgcccatgtagtcaaccttgagcaccttgttaatcgtcagctccacatacagcggccagtagagcatgggcatacctgtaatgatccccttttgcaccaagttccacccgtagtgcgtcacaaacgtgtcggttgtaaggtggcaaaggacatccagctggggcacctgtgtattgatgaaatagccgtatatattttctcctttagatatagaggtgagatttttattcactattaaaaaaaggtattgacaacgatgccctccccaccgacctcgaactccttcggtaggagcgcgtcgaggtattcggtgttggcatcgcgaacaacccatagaagcggttaccaaacttgtccaggcttgtggcaatttatcacatagtaaggtccctttgaattaaagaatttatggagaaatttcataggatagaaatcctataggaattttcctatttggccttttgattcaaaggattagagttttccaaatcgtataaaattcctatagaatagatcattacatgtagattttggaggaaacttagcaaaatgttaaacctcttggaaaaattcctttgaatctatctctctcatccgatttctgtgtttttcatacggtccaatcaaacaactattaccgtgtttggaatcctccgttttacacttatatctctgtcagaattttatgcttttcatattactctttttttttattcctactgttcataggagagatttcaaatgttttgctcgacaggtaaacccttagatcttgtctttttcacttgacatgaggttgcgacaggacgcactgtgccagcatagtcaagattctttaccaataagaaaataccaaagtgacaaacatgaccagggcactaaaaagtaaacagtaaacaatcagtgctcatttgaaaaacaggattttcaacacacaaaatagaagaagaaaaaacagattcaagtgtcgtatctcaaatcctgttggatggaaaagcttagaaaaactataggaaaaactgtttggatggagtcgtatgaaaaatacaggaattacacaaaataacgtatgaaaaatgcaagaattagaagagatttatagatacagagtaacgtatgaaaagtataagaattagatgatacaatgtaaatttttcaagaggttggatcttatgttgaaaaactttcaaaatccttatgatttgagaaaatcctaggattttgaaatgactattcctttactccgaacaaacatgtttataaacattccacgaattaaaccctgcaaaattcctccaaaattcttttgtttcaaaagaccctctaagtaagggcatgtacaatggttgttaatagtggtctcttagcgttgctaattaggaatacttattgatatggaagaaagagaaataggagagacaaaacatcgttgttatgcatgacaacagcttaacaacgactcttaatcactataatatggaaatatggttgcatgagggtaaaaaaatggaaagaatattaacaaatgaaatattttttgagttaatgattaaagcctttatcgactcaactattataaagatatggtctctaaataatcttatattgtttaagagaccatacttgtctctaccattgaacataccctaagtaaaccggggaaactattttaattacccgggtgattagaatccatataagagcagaccgctctcatcgaactttgccgacattgggtgcgccggcgcggccttgtccgttggggtatcatctccacatacaagccactaagcccacagtttcgggccgacgaaatcattcatgcgcgtctggctgcccactccgcatattctgcgcgatatcctcgtcccgtacgtgttgcccattttgccgccacaaccgtcgcaaattcgcaaaccgccggcccggagccaaccaaccaacggaagcatcggttggctccctccactacactgtactgacttcgcccatagcaccggcaaagtcaccgatccgcttggtactgaataaattggtcacgcacgccatagtagtggactagtatggtggtagctcaccatcgccgacttgcaaaaccagctgctacgtccgcgtactttttcgctgaagatcgagcacctataaattccattcaccagcttcactatgattcatcaaccaaagccaaccaaaaacttcctctgctgcttagctaaagaatcatcgccatcatgagtgtggagatcctcgacggcaagacggtccggagcttcgtggaggacgagggcgccttcaactcctcggtcgacggccgcttcgccgcgctcgacgccaaccgcgacggcctcctctcctacaccgagatggccggggagctgatgagcctccgcgtgctggagaagcacttcggcgtcgacgacgaggccgccatgggcgccgacgagctcgtggagctgtaccgtggcctgttcgcgaggttcgaccgcgacggcaatggcgcggtggacctggaggagttccgggccgagatgaaggagatgctgctcgccgtcgccaatggcctcgggttcctgccggtgcagatggtcgtcgaggaaggcagctttctcaaggtggccgtcgacagggagctggccaaagctgcttaaattaatatacctgaaccggcgagcatttaaattttcacacagctacgattttaattgatatatcttgtgttcacaatattgatcattgttatttgatagcctctgttgagctatatttcattgttacttgtgtaactgtgctctttgagatagacaaagataatatgatataaaaaaccagttttgatcaagagaatcggtttgaaagcttgtgtgtgtctactagataccagggtttcatctttcggtttggtcatttggaccagggtgcccgaaatatcgaaatttcagaaatttcggttcgaaattatatgaatttttgaacaaaatttgattaaattaaacaaaatattatcaaatttacaaaaaaaatgaaaaaaaaatcggtcgaaataatgtcgtatctgggttcgatccgaaattttgaacccatgctagctgccaggctttggattctgagcgccacgtcaggaacaataaaatatttgggcctctaactcttcgtgggctgatctgggccgtaggcagacgagagagcccatgacacgatctcatcaattccgtagtggccacgaactcacgtagcgcaaatgccgctcccgtttccgaatcgtgcgatttatctcctttctgtttccgaattttattagtagttgcgatattattaatacaggtttcgtagcggccgcgtctcctcctcccttatataaaggcagcgtttctgcaagttattacccaaatctacacgagagagagatcgttcgacgcatatagagagagagagaggcaagatgcagatcttcgtgaagacgctgacggggaagtcgatcacgctggaggtggagagcagcgacaccatcgacaacgtcaaggccaagatccaggacaaggaaggtaatataacacgatatcaagatgatatccctagcttcttcgtttgcatgttcatcttgtttaatcgttgatgtcttgatgtcgtctcgcgatgatcgactgcacgtacgtacgccgtacatttgctggcattgctcgtcccgttaatttagtgactcatcctttgtttcgtacgtcgtgctcttgtgcgtctagacagtagaaatcatgtgttttgcactagatgcgtggtgggttgatactgccgaaattgttcaatattgtagttgtagattagatcgatttgataaccaaaaaggaagccttgtacttttccattacattacataggtctaagcatgcgtgtgtttagtcgcagtaagcacggagcaacaaatccaatctagccatctgcttatagttcgtcttcgctgtgtacatgtttctattctgtcttagtagtttaaaaagatatgctagtatcttttatctcttgatagggagtgccttcatcgatgacattgctgcataactgtaattaaagactcttttttcttgttttcatggattaatattaacttccgagcccattcgactagctaaaattcattcatatctctttcactgttgtatatataggtatccctccggaccagcagcgcctcatcttcgcggggaagcagctggaggatggccgcaccctggccgactacaacatccagaaggagtcgacgctgcacctggtgctccgcctccgcggcggcagcaggggcggctacaccatccaggagcccagcctcctgctcctggcgctcaagtacaacgagaagaagatggtctgccgcaagtacgaactcatcttgatcctgtttgactaatgctatataattttttttttaaaaaaagaaactttacggaatgcttactaacaaagatctcagctttgaattttaacgcttaattcgtacgtgtattcctgttccacgatgcatcctaattaagttcctaaccgcaggtgctacgcacgccttcccgccaggtctaccaactgccgcaagaagaagtgtggccacaccaaccaggtgaagtggtccttttacttagttttgtcgtcaaagaaatgttttaacgtttttagatagtttgttttcaaaattggtcgtttggttgcatcagtcatgtacacggattcgtgttactccctccgttttatattataagtcttttttagcattgtctatattcatatgtatgttaacgaatctagacatataacatctatatgaatatggacaatgctataaagttttataatatgaaacgaattttttttatataatagatataaaatccatccactatttgtacatgttatttttttcgatttgtatacattgccgtacgttggttgtacggctgacctaatgttgttttcttccatctgaattttcagataaggccaaagaagaggtttatatccaagactgccaactgaataaaagagttgtcatgcatcagttgagtcgaagagtcttcctattcagttattagctcatatgttagcatcagttgagtcaaagagtcttcataaatgttagcctggctgcttatgctatttctgtttgtgagatttggttagaagtttttactgttcaaatctctatatacgcccctacttttctgtttttgagatttggtttgaagtttttacttgttcaaatctctatatacgcccctactgcgagacacctaatttcgtttacggttgcttaatttcctttcttttgcatgaatgttacgagaaactagttagagaagtttgatttagaacctcttatatataatataataggaaacggaaggagtgggcatgttccaaactcacatatataatcccagcgaagactagcagatgcgaagatcaggaataaacctttcgtggtttagctgatttgatcagacctcaccaaaatttctgaaatttttgaaattttgaataaaatttagttgtatttgaacaaatattaccaaaatttacgaaaaaaataaaaagttagaaaatttcagccaaaataataatgtattggagaggtctgaaatgaccgaaatttccaactttggccaagataacttgcccgatctcacaaaagtcaacacattcaaattaaccaaggtcatcaatggcaaatgactaatctcactaaatataattcaacacattcgaattaactgaggtcatcaatgatagattattaatctcagtaagttcctagtgataaaaaaaataatctatgactccagtacacaaataatgcttccgccgtttgttttgctggcaaccccacgagtgcttcccgtttctattgatggcggcgtggcgctagggcactaaacaccatgaacgtttgccataaatgcttcccctgttattttttttgcctcaccatgaacgtttgacatagtgtttcccctgttattcttttctgtaaggctagttcacaacatatgttcgtttgagaatttcggcaggcaaaacaagattattatagtactattagctattactgtaaacataaaacattgatgtggtgtggttgttttttttttcccaaggatgtaaacttgaatttatatatcaaagcgtaatgtcgctctattttgtgcgtgtgtttttttttcaaaaataatgtatcaattccttgtttaatgtatcaattccttttaagaaacatacataaaaccgatccaagtagctattagaactcgattccgctagttgcaacagccacgccacgcctactccgtacttactaagggaatcatgttcaaaattcggctaatcaatccacagaaatcctggcaaagatcaccagaatttctactaagtcatccagatcccaaccgtgaccgactcctgattcccggtatctacacagatcagtgcacgtcaataccgacgcagtcgttcgcctataacattggttgctttccaggcaagtcatgtgtctcatgcccatagcatacgactctctccaaaagaccaaaacccattggcccgtcccacgcatccactagaccaccacgcgccaagctgaagccggtcggcaattggcagctagcgtaccactcgatcaattccattagtaaactctcccctatataaacagcactcgcaagcatcgatctccactcaaattagccactccactccaagcaaaccgagtctcacttactctgagcttctctacacatccagtgctactccagtttaattagcatccgccaccatgagcgtggagatcctcgacggcaagacggtgcggagcttcgtggaggacgagggcgccttcaactcctcggtcgacggccgcttcgccgcgctcgacgccaaccgcgacggcgtgctctcctacgccgagatggccggggagctgatgagcctccgcgtgctggagaagcacttcggcgccgacgaagacgaggccgccatgggcgccgacgagctcgcggcgctgtaccgcgggctgttcgcgcggttcgaccgcgacggcagcggcggcgtcgacctggaggagttccgggcggagatgaaggaggtgttgctcgccgtcgccaacgggctagggttcttgccggtgcagatggtcgtcgaggaaggcagctttctcaaggtggccgtcgacagggagctcgccggagcagctgcctaaactgaactaattacagagcaaaaaaggagtttcatattttacacttccacgattttgttgtgattcattattctttttagataactagaaggccactctattgagtaatttcattgatacttaattacttatatatacacggaaggatacacggtgtaataatgcattagttttttcatgttattctcaaatcactagtcttttattattattattttgcctagcataaaagaagatagttgatcttgtacggatgtctacgtgaggaaatgaaataccagttttgggattttggattacatcagtaatataaacggtgaattcacaagttgaactccgtgactaaatcaattttccaaattttcttttagaattttactgcacaatttaagaattttttttatttatacttttttttattaaaatatttacaaaaataatttgttgttttgaaaatttacaaatctaatcgcctgccgccctttgggagggcgatttttaaaaatcgcccttccacagggcggcaagggacctaaatgtaaattttccagcataacttgttagctctataattttacaatttaaaattatattatataaagtcagatgaaataaaactttatatcaaaattgtagagctcaaggagatctacaactttgtagttaataactttttcatttaagatgttttagatatccaaatattcgttacaaaatataaaacacattttaaaaaatctcaga

SEQ ID NO: 6511 - DNA, 30285 bp, Oryza sativa
ggtttatagagacggagtgggagcggcaaggtcggttcgaggttggccgcggttttctcggcgctcggctggtgttcatgggcgccgcgagaacgagctacggcgaggatgcaaagggtggtggaggcggtggatcgtgtggtggaaatcgaaccgcgagcacgggaggattggcgcggggcgagcgggtgcggtcaaggtgggggcggcgaggcgctgcagcggcgtcagcggctctgccttttgaacaagaagccaaggagtggaggcagggagtgtcacgcccagaaattcccgaatagaatttcaagcagaatgtgcattaaaatccccgtccaggaccagccggggtacacaaacgacaatgttgacattcagatccacgtcttacaaacatcataaaagtcttacataaatgcagcggaaaaacgaaagacaacaggagctaagccttgactagaactgcagtgggaacaccactccacaggcatcctcgacggcacggacgaagcctactcctcagagacacctccatctgacacatactcgaactctggggttgggaaaaatagagcaagactgagtactacccactgtactcagcaagtcataccggaataggggtatgatgcagggaatcatcaaagaagagctgaagtggttcatttgcataaagcgagcatttataaacagaagtacaccggagcatcggaggaatcggaatctagcgacatacaaagcaaacattgcaaacaggctataagactactgaaacagggaacaaaaccatttttaatggattctacacatttttcttgatttactgagacttgaatgggcttaaacggagctcggatgaattagttatgaattttagaagattcactgtgtttattactatacaagaaaaaccttaaatcatttattgcgcaatatattccagggctgacgtcatcaattgggctccggcggcgaatctctacggaggaggggtggacgaggtggacctcggccgcgcgaacccaacggcggcgacggcacggtgcggcggcgagtgtagcggcggctagaggcgaccggagtagcggaaacggcggcggcggatgggcgcacagcgcgggagcgatggggagctcgggagagggaggcgaaatggggaaaaagcgagacggagcgacgggggagcttaaatagggagagagagggccggacgtggccgggagaggcgggaatcgccggccgacgtgggggagtgggggaggcgagagaggcgggattcgaaaatcgaatcccggccatctcgggcgcgggcgcgagcgggagagagaggggagtgggtgcggggaacgcggcgcacgcgcgggcgtggtcgacgtggcccggaggaggcggaggcgtggacgcggcggcggtttcgggcgcggcggttgctggcgcggcgtcggccggaggtgggggaaggacccgacaggtgggccccacctgtcggcgaccccgggagaggagggcggcgggcggcctggctgggcctcggcctgcagccggcccagcagggagggggggaaggaagggaaaaaaaatgggccgacggcccatttgaaaaaaaaagaggaaaaagagaggaaaaagaaaaagaaaaaggaaaaaggattttccctggaattaaaatattgcttgctcaattttaattcgttaaagttatttctagagctctgaaaattccactaaaaatcctgttaatgaatttcgacatgtagaactcaagaaaaattccacatgcccaatccgattattatttgcattactttcttagggttttctcttgatttgcacctgcattttcttggggttgtttacaaattaaatttggcttgggaggagaacttcggggtgtgacaaacctaccccccttaaacggaatctcggccccgagattcggaggagctggtgaagaggtgcggatgggcggctttcaactcatcttccctttcccaggttgcttcctcttctgaatgatgactccactgaactcggcaaaatcgggtgaccttgtttctggttctcctttcactggtatcaagtatgcgaaccggcttctccacgtatgttaggtcctcctggatatcaatgtgttccgaatcagcctgttcttcaggtacccttaagcacttctttaattgggacacgtggaacacgtcatggatgccgatcatattggatggaagttctagctgataagcaacttccccccttcgttccaggattttgtatggccccacgaagcgtggtgccaacttgcctttcgtctgaaagcggtgtactccccggagcggagtgacacgaagatacacgtaatcccctgcctcaaaagtgagctcccttcaacggttatccgcgtagctcttctgtcgagactgggcaatcctcaacctttccctgatgattctgactttctcttccgctttcgctaatacctctgtcccgaacaattgacgctcgcctgtctgatcctagaagagaggtgtgcggcacttccggccgtataaagcttcaaacggtgccatctgtagactggcctggtagctgttgttgtacgagaattccgcatatggtaagcttttgtcccaagctccaccaaaatcaagagcgcaagctctcaacatatcttccaagatttgattgactcgctcggtctgaccatcagtttgcgggtgataggccgtgctgaaatttaaacgggtccccaattcttcctgcagcttctgccagaattttgaggtgaactgactccctcggtcagatacaatctttttgggtactccatgtaggcacatgattctcgaaaggtaaagctccgccaaccttttgcccgtatatgtggtatgtactggtatgaagtgagcaaccttagtgagtcgatccacgactacccagattgaatcgtgacccgatgatgtccggggcagtcctgttataaagtccattccaatctcctcccatttccattccgggatttgaagaggttggagtaaacctgctggtctttggtgctctgccttcactcgctggcaaacatcgcagagtgcgacgaattcagctatttctctcctcatgctgacccaccaaaacttttctttgaggtcttgatacattttagtgctgcctggatgaatggagtactgggtctgatgagcctcggtgagtatcagatccttcagttccttgtcgtcaggtacacacaatctttctcccaaccagattgtgccatgctcatcttcgtggaaatcccgggcttttccgactctcatgttctttttcaactctgctatttcagaatcgtttacttgagctgctttgacttgatccacaagcgtaggccatgccttcagagcggccacaaacccgtgttcaacaattcccacgttgagatgctcaaactcctgccgcaattcctcacacataccctcgatgcacagggcagtgcagtaacttttccggcttaaagcgtctgccaccacattggctttacccgggtggtagtgaatacccatgtcatagtctttgattagttccaaccatcttcgttgtcggaggtttaggtccggttgggtgaagatgtatttcagactcttatggtccgtatatacttcgcagcggttgccaatcagatagtgcctccagatcttcaaagcatgaaccactgctgccaattccaggtcatgagttggataattcccttcgtgtggacgcaactgccgcgaggcatacgcaaccactctgccctcttgcattaggacacatccaagtccgtgacgggatgcatcacaatagacttggaagtctttcatctggtcgggtagaatcaaaactggtgcggatactaatttctttttgagctcctcaaaactcttatcgcactcagctgtccatttaaacttctcatctttcttaagcaactgagtcatgggtcgggcgattctggagaagttttcgatgaatcggcggtaataacctgcaagtccaagaaaacttcgaatctgcgacacggtcttcggcggggtccatttggtaaccgactccacgttcgatggatcaactgccacaccctgagctgtaatgacatggcccagaaatttgacttccgtcgaccagaagtcacacttgctgaacttggcgtatagctggtgctccttcaacttctcgagtactagacggagatgttgttcatgttcttcttcggactttgaatagataagaatgtcgtcgatgaacaccacaacaaacttgtccaaaaattccatgaacactttgttcatcagattcatgaagaatgcgggtgcgttggtaagtccgaacgacataaccgtgcactcatatagcccgtaccgagtggtgaaggccgtcttcggaatatcctcttcccgaattctcaactggtggtagcctgatcgcaggtctatcttagaaaacactttagctcctttcagttgatcaaacaaatcatcgattcgcggcaaaggatatttgttcttggttgtgacctcgttgagtgcgcgataatcaacgcacatcctcttcgtcttatcctttttctccacaaaaatgaccggagcaccccaaggtgaagtacttggtcgaatgtaccctttctgcagctgctcatcaacctgcttcttgacctcggctaattcgttggccgccattctgtacggtctcttgtaaattggagcggttcccggtgccaagtcaatccggaattcaatctctcgcttgggtggcatggtagtgaggtcttcggggaacacttccggatactcgcagactatgggtatatcttccaatttcctcaaactcttctccacggtgtccactgggatttccgcttcaatctgattcaaagagacctcttgctttggtgagactagtgatttgtacaccacggtttctcccttctcgttggtcaaggtgactgtgcgattcgcacaatcgatgacccccttaaacttggtcagccaatccatcccaagaatgacatctaggtctttggattcgagaagaatgaggttggctagaaatggtgatctttgaatttctattgttatagaagggctgaattgaaccgaagtggagctattccctggggtatgaacccgcattggtgtgctaagttcctctcttattaacccatgcatcccgacaaatttctttgaaatgaaagaatgcgttgcaccagaatcaaaaagtactgttgcagggattgagttaacagggaacatacccagtacgacctctggtgctgcttgtgcctcctccgcagatgcgtggttgacacgagcctggataaaccttggctcggcacgcctaggcttcgggcatttgtcagcgaagtggccaagctcgccacagttgaagcaggaccctggttttgctccagtctccttcttggcttgcgcgggcgggcctgactgtgccggtgccattggtgggcgtggagctgcaccgcggtttgactgacctctatggtgggtctgactgccaccggcgccctggggaaagttgctagggttgaacgggcggtactgacggacgatcatggtggtaggtccaccctgctgcccaggagcgaagcgcggcctctggtgacttccctgaggtaccctgaactgagcggccttcctcttcctgtccatcttgttgcgttgatcctcctgacggattgccttgtcaaccagcctctcgaaatcggcgtaatctccagatatcaactggttggttagctcgtcatccagacctgccatgaacttttcctgcttctcggcgtcggtacggacatcctctggtgcatatcgcgcgaggcgattgaactcatggaggtactccgtcacagtcctgttgccctgatgaagtgcccgaaattccctcttcttttgtgccacgaccccgtctagcacctgcgccttcctgaagctacggcagaactctgcccaagtgacttcagtacctggtgggcgggtggccatgtgattgtcccaccaagctgacgcaggaccttgaagctggtgtgtggcgaaagcaaccttctcctgatcattgcactgcaggagattcagcttcttctctatggcatggagccagtcattcgcctccatagggttggtggtgctggagaaggtgggtggcctgacacgtagaaactctggcaacttggactgagggggagggggaccaaactgctggtgctgctgttcggcgtgctgcagcatcctctggtgcatctgctggtgctgctgctgcatctgctgcatcatggctgccatcatctgtgtctgatgtgccatcacttgggctagcgtcggattctcgggaagtggtggcggaccattgccggagttgctgttgggatgcacaccctcagtgcgctcttcgctgttgctgccctcgcctgttgcgcggctaccattcctggtgtagaccatctggagggaaaagcagacgggggaaaagaagaaaaacagatgctcaggaactaagctttattacataggaatttaaactgcaattgttctgatctgaattaaaacacttaaagagcaagcaaaaatccttattaagacagccatatcataggcacatgatatcgaccgtcgactaaccccaaacaagcaacctaaacacacaaactaacaagcagaagctagacagtcggtaaactaatggaaaacgagcctaatgctcggaacggctcctgcggtcggtggaatcgaaggcgtcctcctgctcgtcaccaggtccctctgagcgacttccggaccctggcagataagtctcgccgctgcccgactctgagccactggagctgctgctgctgagatcgcggctgccactgggagtagcagacaaccaacctccgttgcctctggctgggcccctggcggctgatgctggagcgaaggagagagcggacgcgggagctggagctggagttgcaggaactgcgggcggaactggaggtgctgcgggagctgctgatggaggtgggttcctgggcgcaagctggatgcgcacgggtgcagtcgtcgtcttgcggggcgtggtgcggatccggactcctcctggcgcgggaagaccctttaactgagcgttctccctcttcagagcgacgatcctcatgagcttcccatcattcaaggccttggtcgccttgtgcaggtccgagtgcatcctatccaatcccctcatcacagcacacatgtgaccaaaggtggtgtcgttctcgccggctgtcggacggaaagtactgacatcatcactgctggctcgacgagggtgaaaccagtacgccgtgtcgtggaagatgtagttgtggcgctcccgtagtctggccatcatcaggtatgctgcctcctgacaggcgtgatctgctgtgcctccagatgcctccaccaccatgttagctaggcaggtacccacgtagccgtggacctccagacgaacacggtgaggaagctcgccactgagcggtggaatcgtcgtgtactctggcgcgttggggtagcctaccaccagcgtcatacatgccaactctgccacaaagtcgatcatgccttctccgcggtggttgggtgggtggccggccatctagggaagacaaaggagtaggatcaatgcatgctcaatccaaatttaaataaagcaataaaagactcaaataagggaatcgaataagagcgaaatttttatgcatagatcattttacatgagagcgaataaataagacggactcacataacgataaaataatgagaaattagatacatactaataataacaaataaagcataaataccttgcaacccatgttcctgagctatgacctaatgcatttcacccatcagatcccaactgactgacgaataaatctcaacagttttactaaaaccctggactgacttgttttgaaaaaaaatctcacttaaacgagcgaccaagatttttttccttgaaccacaagaacagatcccaattttcccggaataaaatccaattgcaaagaacatatgcaatgaaaaggattcagagggctcttaggtttttccatttggcttgtcctacggtcaacctggctctgataccaacttgtcacgcccagaaattcccgaatagaatttcaagcagaatgtgcattaaaatcccgtccaggaccagccggggtacacaaacgacaatgttgacattcagatccacgtcttacaaacatcataaaagtcttacataaatgcagcagaaaaacgaaagacaacaggagctaagccttgactagaactgcagtgggaacaccactccacaggcatcctcgacggcacggacgaagcctactcctcagagacacctccatctgacacatactcaaactctggggttgggaaaaatagagcaagactgagtactacccactgtactcagcaagtcataccggaataggggtatgatgcagggaatcatcaaagaagagctgaagtggttcatttgcataaagcgagcatttataaacagaagttgaaagatttaaacagttgtaataattaaacaatatcaactatccactgtccaacgctaacccacgttgcgacaggcccaaccatccacctaaactatccaattttaaaagattacactagggtgagactaatcacggtgaatctggttgaccgcccataaccgcgggcacggctattcgaatagttttactctgatcagaggtgtacaactgtacccacaagacacagccccacgacacgtttccgtgcgccgacatgccaccacgacatatcagaaagaggccgtgacaggacccttcgcataaccccctctagccaagcacaccacacctcaggtttcacccccgtccccagcgggcaacgggcagccccctctcgtgcctaggtgaatccggaagcgacagaggccgtcgcagggcccgccccgctccatcacgcccacccttgcctggatgcgtcgactagaggaaagctatactacaagcccagccgttgcccacgctggcttgtggtaagtacgataagttcttccagggcatcccgcgaaccggtccttaactgccatgggtgcgacctgctaaaccatgcacccacagcccaccatgtggtttattttaattaaccaacaccaaagcggtgtcactaatccaacaaagccattagaaccaacagtctaaacattaatgtgattttccccattgtgaactagttgaactaagcatggctaagcaattcctagtccaaagtctattcatgttataacccaagctaacaaaggagcatggtatcaaaatagcatggctgtaacaataggtaaacatcccatagtaacattataaaacaatgcaatatttgaaagaaaacaatagagcatttgcaatataggatcaacatgttcaagtgacaagcatgacttgccttgctctgctgctggagaaacctcagcgactatttcgaagtacaccggagcgtcggaggaatcggaatctagcgacatacaaagcaaacattgcaaacaggctataagactactgaaacagggaacaaaaccatttttaatggattctacacatttttcttgatttattgagacttgaatgggcttaaacggagctcggatgaattagttatgaattttagaagattcactatgtttattactatacaagaaaaaccttaaatcatttattgcgcaatatattccagggctgacgtcatcaattgggctccggcggcgaatctctacggaggaggggtggacgaggtggacctcggccgcgcgaacccaacggcggcgacggcacggtgcggcggcgagtgtagcggcggctagaggcgaccggagtagcggaaacggcggcggcggatgggcgcacagcgcgggagcgatggggagctcgggagagggaggtgaaatggggaaaaagcgagacggagcgacgggggagcttaaatagggagagagagggccggacgtggccgggagaggcgggaatcgccggccgacgtgggggagtgggggaggcgagagaggcgggattcgaaaatcgaatcccggccatctcgggcgcgggcgcgagcgggagagagaggggagtgggcgcgggaaacgcggcgcacgcgcgggcgtggtcgacgtggcccggaggaggcggaggcgtgaacgcgacggcggtttcgggcgcggcggttgctggcgcggcgtcggccggaggtgggggaaggacccgacaggtgggccccacctgtcggcgaccccgggagaggagggcggcgggcggcctggctgggcctcggcctgcagccggcccagcagggagggggggaaggaagggaaaaaaaatgggccgacggcccatttgaaaaaaaaagaggaaaaagagaggaaaaagaaaaagaaaaaggaaaaaggattttccctggaattaaaatattgcttgctcaattttaattggttaaaattatttctagagctctgaaaattccactaaaaatcctgttaatgaatttcgacatgtagaactcaagaaaaattccacatgcccaatccgattattatttgcattactttcttagggttttctcttgatttgcacctgcattttcttggggttgtttacaaattaaatttggcttgggaggagaacttcggggtgtgacagggagctcgctacccgggaggggaaaaagcgaaaggaggaggaggaaagggagctttgctccttccggtttgggaggaaagggatgagaacgagccgcgcctcacggttttggatgcatgcggcatggggcgccgggcccgagaggatgacgccggcgatgactgcaaaaggacggggacggtttgaaggcaagcgcggacacggtggtcgtcggggcaggcgacgaccgagggtggcgatggcggcacccaggcggtcggccactcgcacgggcgcgcgggaatcgaaggaggcggccggaattttgggcggtgtcggcgggaagcgacgccgagagagagagagagagagggcgctctctgagggagtcacgtgcggcacacgtgcgatggagaggctggcgaaagaagaggatgggccgaggatggtttcggcccgagcgagttggagggaggcaaaatagacttttactggaaggtttgatttggagagaagtttgatgtggagattgaatttgaattcaatttgtgtatttgtacacgagggttcaaggtggatccaagggaggggtcaagaaagggcttcaaaagcgggaattttggtatttttgggatggatttatatttggcggcacgaaggattatttcagaggatttcaaaaatggaagatcattattcaaaaatggaacaagggagatagcggtagaatgccatggatagatagatagacagaaaggtaggttgataggtagagggacggatagacagatggattgacagatggatagataaacagatagataggtatagtagatagatagatggatcgatcgatagatagatagatcgagactcagagagagatgggatggaagagaaggaagaggtggatcggaaaaagaaagaaggaatccaacctatgagggaggttaaatagactttcacagagagatttaattgggaggttttagagttggagtctagattcgaatttcggggttgatactcggtctcgggagaataggaaggagtcaaggaagggaacaatattcggagacgagtcaaaaggggatggataatttagagaaagagagtgtaacttgggagtttgagtttgactactcaacgagatatgtgggtaaggattttggagagaagtctgaatagaagggttcggacttcaagattatttcggaacggaaatcattttggggagaactcaaggcgaaggggattgaatcttgggatttagagttcaagggtggaagtgatctcgatttgcatattcagacttgggtcagaagttcgagaaagaaaacagggtagattgatgaaccaatacagagagaaagatagatgaatcaaaacctaagaggttgaattcgaatttgagaatcggtttgaaggaaccaaggagagagtttatgacgcgaaggtgaatccttggacggagttagggttcgggcattcgacaaagttcacggatggggttccaggaggggattccgaatagaaggaatcgagcttcgggactacattgggatggaaattttgaggagacgatctttgataacagggtatcgagacaagggagggatttaaattgagatctttggcacaacttagactcaacactcaaggaatgaaattttcgcaattaggatttttgccgaattagtttttaacgtctcacgaaaagcggagcgttacactaactgagctaccacgcgagttaaaggaggaggagggcgagcgaggaagaggaacggagggctatcgcttcgggacagggcgccgtgacgagcgacggcggcgcgggagcaagctctccgggagcggccgggaaaggggaagaagaggtgcccggagctcctcgtcacacgtccatgcacgcaccggcctccctggtgcttggcgacgaacggcgacggtgcgagccgagcagggcgacaaggcgcggcaggcgaagacgagagggatagagaggaggaggagcttggcttgggttttataggcacgggaagtcggttttgggggaggaaaccgacttaggtggtcaagggagctcggctggcagtcgtgctcggagctagcggccaagcggcggcagtggaggtggtcacgggtggccgggctgagagggaaaaagcaaaaaggggagaggaaaggagctcggctccttgccgatttgggcgagcagagggaggagggagagcgcatgagagaggggagccgaggctctgcctccacgtcttggacgcacgcgcgcacaggtggagcgagtggcagggcggcatgggctgctgcgcggcgcaggcagccagggctaacgtggcggcgaccgagcagtcggccacgcgcgggcgagcgcgtgcgcgacgcgagggcgcggcgaaattcgaaaaggcagcagcgggaatcggcgccgaggggagttcgtcgggagagagagagaaacagagagagagggagagggagagagggtggggacagggagggagaggagctctgcctccattgtttggaaggacgcgacttggagcagcggacagggggtgacgccggtggtgaccacggaggtctctgcctcccggttttggatgctagcggcgtgcagcggcagagcggcagcgcgcgaaattggtccatccaaaatagagggatgcaaaatagacttcttccaagaaattgatttggagaagatttgaacatggaatttgacttggacttctggattgggatctggatgagaggaagggtctaggaaatgatcaaaaggggaaattttggatattttgggggtcgggcgaaaatttggtgaggatttcaaagagaggacttgaattttggaatttgatttggagacttgaatcggaattggaatctcgaggtgggcgattttgatggcgacgagagggaacaacgatggagattgaattgagatccatggcacgacttaaactcacactcaaagaacgaaattttcgcaattaggattttgccgaattagtttttaacgtctcacgaaaagcggagcgttacatctgcacccttgaatcgagcagggtgagaacgatatcatgcaggaatccggaaaactcaaatcataccttaatgggaaatcctctcatttttgcatgtcacttaaaaagtcatcaaaaaatttgaaaagatttgataggatagaccaatatgtgatatgccacttcacaaacatgcaaatttaaattcaatttatacaagtggaaacaaaaataacaaatttgactatgaagtgaacgtgcaattcacgatcaaatttattatttttgtttagaattatataagttgaattttaactcgcatgttagcttaaagtggtggacgacaccctcgtcagctactacaagagaaagtcaggaaagagtgagagagaaggaatgagaaagtcaggaaagagtgagaaagaaggaacgagtgtgtctatctcgggaagaggaggcacctcagggttcatgccttgacttaggctcggtttagatggcaaaaatttttgttttaaggtatcaaatcagatatacggtcctagttgtaatgctgccagcggccggctagggcgaccagtagcaggccaggatggcgagcaatggtgagtcgacgaccaacggatgagtgcctgagtgtgagtggcaggagtagacggcgactcgatgagcagtggcgagaggagattgtgttggatcaaagacaaacagacacacagccgtacagatgccgtattgcggttaggaaaaagaaagaaacaaaagcgaaaaacgggagtcgagaaggtgtgcggcgccggcgtggttgtgattgacgctccgaggcgtcgtctcgcttccagtagcccagacggcgcgccgttttcatgggccttagaccttccacgacttgctcataggtcacgggtgatgcacgaatttaggccgaggggtttcccatgtgatgaaaatagggggggtaagtactaaagctaaaaattggaccaggtgcctgagaacccccttcgtctattgggctccgcacctacggccacggcctcgtcgtcaacagctgggagccccagccgagcatcctccgccgccgtgttcgtgacacactgcgggtggaactcggtactggaagggatcaccgcgggcgtgccgatgctctgctggccgctgtacgcggaacagaggatgaacaaggtgctcatgggtggaggagatgggcgtcggcgtggagatggagggatggctggaagggcgtgtcaccgccggcgaggtggaggcgaaggtgaggctggtcatggagtccgagcaaggaaggaagctgagagaccgcgtcgaggcgcacagggaagccacggccatggcctggaaagacggcggctcgtcgcgcgccgcgttcgcgcagctgctgtccgacattgacgacgcccgtggcaagcagagtagtgtcagcgtttagctccactttagaacacgaaaataatttcacaattcccactgaaatcatgtttgtagtactcgaaatcgtttcatcgaaacgttgattttattgctgacaccaaataattcagatcaaacaaaattttccatcccggattacatagctgaaaggctgaaatgccatttcagcaagaggacagtacgcacttgattagtatacactctgtaaatactacaaaaatctctcgatacacctgcaaatctgtaggcagaatctctgacgcctggcgatggcgatggcgatgatcaggcagctttggcgagctccctctcgacggccctcttgaggaagctgccttcctcgacgaccatctgaacggggaggaagccgaggccgctggcgacggcgagcatcacctccttcatctcggcgcggaactcctcacggtcgacggcgccgtcgccgtcgcggtcgaaccgggcgaacaggccgcggtacaggtcgacgagctcggcgtccgtggcggcggcgccgtcgacgccgaagtgggtctccagcacgcggaggctcatcagctcaccggccatgtcggcgtaggacagcctgccgtcccggtcgccgtccagcgccgcgaaccggtcgtccaccgtcgagttgaaggccccctcgtcctccacgaagctctccaccgtcctcccatccaaaatctccacgctcatctcgcccgatcgaattcttggctagctctcagctggttcaggtgttgtaggtgtttgacgagatgtgagaacgagttgccgctatttatactgtcgaatccgcgtgtctacaacgcgttaattaatcagattattgcgcatggtttttggcctggtaatatgctgtgggatgtgccaatgttgacgagttgtttttcgccaagtgaagaaatgctaaacgtaagcaaagttcttgttcgcctcgagggagatacgctagctgttgtataaagaaaaggagaggaagcccatggattcgggccggtttaggcaggttgcagatcatatgacagtgacagtgagttggaatatcattgacaggacgcggcgaatctgcgccttgctctgtgcgtggttaaattaaacatagcattgctgcagaggcagaagaagcgaagaacttttccttcatttattgttgtaaaaccaagcacttacgcaaagcttatgttagcatgtgaatatagtacgtgcagttgcagttgagccaaatagtactcccttcgtcccataatataagggattttgagtttttacttatactgtttgaccatttaactcatttaaaaaattttaaaattattatttattttttttgacttactttattatccaaagtattttaagcataacttttcgtttttcatatttacacaaattttttaaataagacaagtggttaaatattgtaagcaaaaacttaaaaactcttatattgtggtgacggagggagtaattggcaagctaactttggtccgtagctcaaatcaggtttggcaacttcatcactttgaggaaaggcgtccggcagaagcaggcaagcagcagcatcagcagcaagttggtcgagatagaggataccatgaaatgaaacagcatgtgccaagcccactttaccacaccgatggtccttactccttaaacttgtgccgatttgtggttggtctgccgacagacatcacctcgatcggccactggtttctctcgatttcaagaagtttctatgatgcccatgtactctcatcatgtgaggcccatacggtgaccaacgaataggactcctacggccccatcttttatgtatgcttatgtttaattattaaccaaaatttaaattttaatattaaatttaaagctgattttgagatttttttttcatcgaagtttatttttcagcctttacttttaggtcgttaagaacacgtaggtaaaagttttattcacaaattatttatcgttttgggtttgtttgtgggtcccgataggatgtgcttttggcataaaattacaatttgtcaattcaaaagcatacatattcagttaaaaattgtttcaagttgacttttatatttaaaatattcggtttaaattttggtccccaaaattgtttgcattaaaccatgccaatgaatgaaatgtctaccacgcatcttgtttttttttggcacagtttgcccctaaaacaatttcgccctaaaagtgtgcgtagggtagtttagacgccacaatagaaagttcatagaatatatttttttctttttgaaattgttttaaaattcttctaaaattcattagcaaagtgcatatatcaaataattttgggatggtttggttttaagcctaaatttggcttaccaatatttggcaatttcaatagtgtttagtgtctatttggtttaaagccaaattttggcatgcctaagaaaatatgccattttaatagttaacttaggctattttggcttcaatccaaatacaactttaccttctcaaaattagtcataccaaaacttaccaaaaattggtaaggccaatttaggccacaaaccaaaccagccctttatacataaagttttaatgtataaaatttatgcaaaaattagtagtgtacgtgttaggctagtataaacccactcaaattccatgggccaacgggcctcctaagggaaagggaaaacgggcaggaaacaaatgggccacgaaagtttatgcacgtgggctgtattggaaatttggaatgcatttgcgtaggcctcggacacggcctactaaatagaactggactgcaaaagcccatgtccccaaagcccaaaaatctgtgagcccaatagcctgcttccttgatgctctgaagtctgaattgacaggcatggcatgccttgcaagagaaagaaaattgctttcgatttgcctttttctttgcgtggatggatgcattgtttgaacgatggcggcagatgtggatgtttgtccagcaaagcgtgtgcttcgtgacaaccatttctccccgttctacgtcaatcctctccttttcccgtgttcattttccggtggttatcgtgtcattagtccacaataattgcattccagggacatctcctgccatgctgaagaataaggcatcgtcatctgcatgcaggaatggaaacacatagtattagttttttttattttttctggtcttggattcattaaacaaagctatcaaatgcaatgcttttcttcggtgtgatgggaaggaatcatgtttcatgtggacaaacatccctgctacgaaaatgcagagtcgattatttaggagatgtagtaattgtttagtgatttgtttccttctgatggccgtaatgtgacctgaatatgatgttaaagattttggggatagtcaaaaagagaaagaaggttacatgcgaagttctcagggattgcatcaccctacagtttaagggggtaggttaactagaagtgatccataagggcagcaaccacttaaaacaactgttctattcaagttcattagagaagtcagaggtagtgaaaggagaaggtgactttatgctactgagtagtgagtactagtataatcttgaagtaggcattgattgtttaatattaaggagtagtgcattgcttactgcagttctagaagaaacaaaaacaagggctctgttcttggcagaatgactttaaatggaagaaatagtatattttaaccaatgttcacgtttcttggaaaggagaaaaacaagttgaaaattggattggtttcattaattataacctgctggcctccaaggaattttatttccacaatgtgatatattaattaagaaagctcaatatagcttgatatgcacaaaagatatgatattgttgaaatgtattggagatagtctgtacacaaagttatatttttttatataggaataaaaatcattctgtcggtagtaatttttaactgagtcatcgatatagatatgaaaattccaatatgctgtcagatccgtcgattttgtagtcaatggattttaaggatctcacttgattggaaatgacgaagcggtacgaaatctattttttcttaaagcctaattggcaatgacagctcatgaaatgagttttcatttctcggatgattaacgagttgttacctaccgctgaacaattattattctacatttgatgcaagggaagatgcttaatcccaccagatacaagctgcatcaggccatcacacgagtcaagtggtcatctcaccgacactacaaaatcagctcaaatagctcattcggttatgatttccaattattcgaatccaatttttatatactatgttcagtatattttattatccttgctgcttttttttttgggggggggggggggttcacaagaaagaagtacacaattaatcacaacaatactctatgaaaattaaaagtgtacaatatttaatttgtcgccgggcattttctgtttaatctgcaacaaaagctgccagttacacatagggtgcagttgaaaaggtgactagaaatggaagctatcgtacctttttaatgtgattatactttaacatgaactctattcaagagatgtattcttttcttttctggaaatatcattatcgggaagcaaaaaaagctagctgatagcagtttgccacattttttcatggaaaaaggttctatgtttggttcctttaaggagaaaaaatgagtttggtcttagtactttgagtatcaagcaagttgggggaatccttgatagaaatggagcattggttgcgttgtcaaatttataaaccacacatgataccctaaggcctaagctgaattggattcttccgagaaatagccttgataatcaacttctatactatactcatcagtgtcttctgaagtttgcagtacatggtctgagctccagcaaagagtgattccctttcactgcagatagtacttcaaattggaatttctgtgctctgacctttgaggacacacccttacttctcagtacattgtgcaatcttctttgtcctgcatgcatctgtacttgcaaaatatgctaaaatatttttgtttgtctaatggatctaggtgccagacagtgaatagaaaaattacattagtcatcttacagttttgaacaagaacaattaaaaaatgccaaagcctgcaagttggttttgagaagtcagatttgcgagaaatacaacactgcacaattacaagttggactttacattaaaactagtatcttggccagacagtacacactccagggaaaaaaaagagtgcgaaaaatacacgtttgcgccatttgttcccatattacatacaccaagaaaaggcaaaacattacaaacatcaaatgtgaagaggaatttatcagtaaatgtgagataaatgctaccctatttctctcaaataaatcgaaacaaacagaatggaaattatcgtgtacacttatgtatcggtgatccgtacacgatatgcacgaggtacaaaaacttaaaactaattctacaagcacttaataatggtactaacactaaacaagcagtgcaatttactcaagaacagggagggaagaaagctaggacagaaagaaaagggcagctaatacctggccagctttcattatgcacctcttggttgagaggtgtggtcgtggtggtgcctactgacctgcaatgcaatggccgcaacagccgccaccccccatatgaatctcataatttattctcttcctttccacacaaacaccaacctttctatatagcatcccctcccctcaagtctcaacactttgccgtccagttgccctcttcttctcttctcttctccttcccctgctctgctcaggtttgcagaatctgaattctcccctgcatttgcaatgcaatttggagttgttgttaccttttgcaaatttcatagtttcatctcattgagtcattgtggttaatagcttggggctacttattgttgaatgtacttttatgcttatggtatattttgatctttttcatatgtaattcttgaatgatcttgagaaattaagattttttttagcacatgagggtatctctttttctttaagtcgaagcgaagattgttgtgtatgcttggtgtagactcttgaatgttcagctttggtagttggtccttctctttttgtctttgtgctgtgctgagatctaaaagacataagtatcttttttgttgttgaagcaaccagtttatcatgtgtcctgattttggtaggtgacactatcagactactactataatgtgaccacctaaactagatctaatgatcgtgatgtcactaagcagttcagttcaaatacagatagatctcagccaaaaaacaaacaaacattttggtttttatgatcaagaaaattcatcttgcattgatcactgtacaatgtacattgcttaaatgatctcagggatcaggatcagaggagaagagaagatggagttcaaagcagccatgttcgcggccgccgtcgtagccgtcctcctatcgtcgccgtcaccggcattggctcagaagaagagcccgccggcggcgccgtcgccggtgtcgcttccaccgagcttggctccggcgccggcgccggcgccgcactacgtcgacctcgccgagctcctcagcgtggccgggccgttccacacgttcctcaactacctggagaagacgaacgtcatcgagacgttccagagccaggcgaacaagaccaaggagggcgtcaccatcttcgtccccaaggactcggcgttcgccgccatcaagcagtccaccttttccaacctcaccggcgaccagctcaagacgctgctgctgtaccacgcgttccccaagttctactccctggccgagttcaagaacctcagcgagctcaacccggtgaacacgttcgccggcgcgccgtacacgctgaacctcaccgacgacatgggcaccatctccgtgcagtcgatgtggtccaggcccaagatctcgagcagcgtgtacgccacgaggcccgtggcggtgtacgcgctcaacaaggtgctcctgcccatgcagatcttcagcaaggacccgccgctggcgccggcgcccgccccggcgccggtgtccggggcgtccgacctcgcgcccggcccggcgtccggcaagacgggcgccggcggcggcaaggcggactcgacgagcgccgcgtgcggcgtcggcgccggcgtcgtcaatggcttggtgatggcattggctggtagcttgatgctcctgtggtgatgatcagagagagagagagagagagagttcttggagtcaaatttgcaacagcagcacattgttcatgcttctccacacttgattctattttgaattgatttgaaagagccattcttttggacatagtaggcaatgtttgtaggatcgaattggagtatttttttttacaacgtattacgatcataattcataattactcatctgctgatggatgaatgaatatgaaaaggggtttctcttacatttctactacatctcttctgctcctctgtttgacgatgacatttcactagttcattattcagaaaaacaactacgtactactataattgatttttcaagaaggaaaggaagatcactactactccctccgtctcctagtaatttatccaaattcgttatactagggagggatatcttcggttacttttttttttttagacgaagggagtactccgttgtgaccgacagtgtaggtctttgatgaatcagtcccttccatgtacgaaatgattcatttcaaatcactcccattgatgctcaccaccaccagccacgtgagccatgtcatggtaagatatgttcagtctactacagtacactgatgattgatgaggttgttccatcttggcataaacaacaagtgtgagatgaaccgtcattggcgagtggttgtgccgagttgaaagattcacagataggactataggaacacgtagtttatgttcgaaattttgaaggattcttcgcttgcctttggcgtgtcgatcgtccgtagaaatttagaggccaaccatgtgcgacgagcatatggtgtgctcgtctcctcacatgcggttagttttttttgcgtgtccagagattctgttccggtgagaaattaatgttctcactagttcagatcttcggttcgatccccatttgactcgtgaattattagtctaagtttttgaacatgtgttcgtttctctactggagtaagagtatgttagtagcagtcagtcagtgaaacactcgggaagtacgtttctcaagtcaactttactacagcaagcccttataactctaggtacttatcttttcgcttttcgcttatgattatacttatcagccaaaatttaaatttttaatcttaaatttaaagttgattctaaggtttttcatcgaaatttattgtttagccttttttttttggatcgctatgaatacgtaagtaattatttttcgtttacaaatataccgtttcatgaaacgatggctccatactaactttactacggaaatcaccaccaccagcagcagcaagcaagcaagcgaacaccggcgtcgactcttcggtcgtcggcgccgagccgtctctcgcgagtcgcgcctcgtgcatccactcgcacaccggcggtgtcgtgcgcgcggcgcggagacagtcgcggttacgaggccgtgggggccttttttccgcgaaagggacggagatgatggtgcgtggctgttacaggggctgtggcctgtggcgtccgcgaacggaggcccatgtgcaaactcccggaagtttatcactgccgcgcgcgggatcagaggcagcgacacgcgcgggccgtgggctggtcgggtgaaccatccgttgccggttgagggctcctttctttctttctttctttttttcaaaacgaatggaggagcgtcaatataaacaaactgtacagtaaggaaaaggagaaaaagtaacggaattgctagaaaacttccgtaagtttttctctcaaagcttgcagatttgtagtcatcggatcgcttcgagatttgtacatactgagaaaaaattgctagaaaaaattatcacacatgtcacgtgtaaaatcccgatgatagtcaatcaaatcatagttaaatacaagttttatataggttacagtataattacaatacagttatatttctattatactatagttacttctaaaagttcttcactaaaaaaatttgcggcggtattttagatactcccaaaagtaaaagctagatccttaaacccagctagtgactagtcaaccaagtagccaattttctgaggcccttgggcttctccctgatctttgtgactaggccggttgcccagagctacttgtgctgaaaggttcttgattcatttacttccaaatccctcgcgagactagcagtattaacgtgcggtgcggactgtttgatttggtgctcctttcgaacacatgagtagaaagtcacaaaaaaagaagaaaaacatattaattaaatgtcatggcatatgctattatatgaaaatttaaaacattgtaatttgtcaaatgagttgtttggatgctcaacatgaattttacaaggaaaatatccgcatggaagtatgactgtaaaacatctaaaggagtaaagtacaccgtactatctctgtttcatattataagtcattttatctatttttatccagtcaattttttttagatttaatcaagtttatagaaaaaatttagcaacatctataacactaagttagtttaattaaatgtaatattgaatatatttttaataatatcattgttttgtgtttaaaatattgctatatatttttaaacttgatgaaactttaaaaaataattagtagaaatggttgaaacgacgtctaatatgaaacacgggtgagtacgacgacattataagactacaatgattaaagggcatcacaatcaatgaatcaaatcaaacccattaaaaaacaaaactcaaaccaactagttactcccaaaggagaactggagatcgtacagtcgtgcaagtttctgtttttattgattaggattatacttccaagagcacggcttgacacatttttcacatatgccatatctctacactacacatgacgcctatttcattatttaaaaatatctacaccacaactatcatattcgcacgaacagagaggtatggaaattaaacgcactaatagccctctggactctggagcatgggcatctgcatacccgtttaatgccatcagcatcaaactaaggtgttgctaggcaaatcttcatataagttttaaaattttatttcagattgatttcagtggtttacttagtaattttcgttcattttcgttgcttgttaatctacctaaaattacttataaaaaatcatattcgaaaattcaaaatcaaattaggtcgtaatgcacgtcaaagtcaagtgcggtatgttaagggtctattgggttcaccgattgaaaaaacagaactgaataatatttcctccgtatcgaaataaataaaattaatattggatattacatactatagtactacaaattttagatataaagtaagtgcctacttcttctgtaaaaaaacaaacctagaattggatgtgacaaaacatagtataataagtatggacatacttgttataaaagtggctccaaaatcacatcggaaaccaaacacggaagaaaacgctataagatcaatgtgtgttttaattcttattctgtgataaacaattggcatgttttggagataatcaattttcaggtgatgatcggattcactgttattttatgtgaccggtccgaccgggtggaggttgccagtcagaccggtgctatgtgtgtggtcagaccggccaggcccgcggtctgaccggccgacgctgagtcggtttcggtttcgggttgtttctttggatatccgtgattgtttcatggttatggtttctagatggattctatacgtatgtaatactgttgtttgctactaatgagtcaagttgggaatagcttggtctcggaatatggtttctgtcacgcctggaaattcactaataatttccgaactaatttgtgcataaaatcctcatccaggaatcaactgatgtacacaaactgacaatttaatatacaaatccatcataataataacgttacacacttacaaaagaaaagaaaacagcagcggaataacggtctagcgatggcttcagctccactcccacaggcagctcaactggggtataagccaaacgtcttctccttctggatcctttttcttcaactgaggttgattgattattgcaagaatgagcatatgacatacttaacaagccacacagcaaatatgcaaatgcacaaggataccaaaggatggcacaatatagtctcatttgcgaaagcagcatttagcaaagagttaagagtagtaaaacagtagagtaattaattagaaattttaatcaacactgaacagcacacccatgctgcacaggcccaaccatcctgaacaaccatacccggctatacagatctaactccaaaccaggagctaagcaaattattaccaggtataacatccataattattgtgagaggtgtgagactaatcacgaaaaacattgctcaacccgcccataaccgcgggcacggctattcgaatagttttactctggcaagaggtgtaccactgtacccacaagacacagcctcaacatcatgtctaccatgcgtcgcgatactggaaagtacccgaatagaggctgtgacaataccctctgcacaacacaactcaccacagtgcaccattcctggatcataatcacccccttataaaacaaggcatggactccccagcgacccccgtggacttatctccgccacttctcagtctggtgctccgcaatgaaccatgctatacaaaaggtaaagccgttgcccacgttggcttgtggttggcacggttaatgtttcacaatagtagcttgcgaaccggtccttaattgtcatgagcacgactctcaaaaccatgtgctcacaacccaccattatcaagttttagttggcaagtaattaattaaccaatcacgattgactatcgtgaactattattaagccatcattaaataatagtgagtcataagttatcccaatagtgtgctaatgtttctaagcatggctaagcaatcatatctaatatctagctgaaccaatatataaagctcaactagtcaagttataataacccaaggtatcaaggaataaagtaatcaatgcaaacaggccataacaaaggaatagattcacaccacccagtgacattcgaaaataaatgcacagttgaaataaagagagaatttaaatataggatcaacatgctcaaaggattgtgtttaggatctgtgtgacttgccttgcaatattcggtcttcaattaatcttcttgaatacttccggcgcactcgcgaaccttcgaaacgacggaaacgacaagctaacacgcaaaacgaagaaaaagactaataaaaaccaaataaacagtacataaaaaataaacaaacatgtagatcataattttagatgaattatgagacttgaacggcctcattctgacttcatatgaatttattacgaattttacaagatttaatctaattaaagcccatttaaaaagaattaaataaatttaattctatttatggataattttaatatgtagatctttattttatataacttttgcaacttgaaccacgttaaactgagttacaatgaattagttatgaattttcaaagattaaatcggattaaatcctttatatagattttaattgaattatgacgcaataatgaattatttttgaaaaggaaaagaggattattgcgtcagcgggtcgggttcatggtggaccgggtgcatggcggcggctcacggaaacgaacggccgagatcgatccaaccaaaacgaacggccgagatctatcggtccacggccagagcacgggagacgacgacgatgacgtcagcggtgacgtcatcaccggcgacgactcgggcacgcatgcccgccggcgaacgacggcgcggtggcgcgaaaggagagcaccaaaacgatgcgggcgacgcggcgaactcaccggtgaccaaaacaacggcggaagatcaacggacggcaacggcgacgaggaagaagcggcgaagaccttcggcttgacgacggcgatggtgttccagcggtcgacagcgacggcagaggggcggacgagatcggcgacagcttggcgatcccgatggcggctttcccgagcgacgacgacgaccggagcgacggcggcgcacggctagacgaacggcggcgacggcggcgcaaaagctcacggggctagggcactacagacggcggcgggcgaaggcgagagtggctgcgggtagaggggagctcgggggtccttttataggggcaaggaggcagcggcgaaggcccacggcgaccggcgacgcgaaggaaagtttatggttcggagagagagacgaatctgattcgagatcgaatccacgagtttccaaactgaattaggcgatgattccaaaagagaaaaggtagaggagatcgagaagatcatttcccctctattgatttcaccggatcgggaaataggcgagcgaaaaaggaaaggcggcggcggcgcggctcggctagggttcggccgggcgacggctggaggaggaagacagccctgacaggtgggccccacctgtcagcgggcggatgcgcgcgcgggtggctgctgccggactgggccgactgggccgagggagagagaggttttgggccggctttctgcccaaagccaaaagagacttttaaaaaccttttttaatttaaattattcatgaaatgcaattccatttattaaaaatactttcttggctcaaataaatcccagaaaaatctaggaactaaagattcaagagaagtatttaacaaaattttatctagcccaattttatattgagatttagcaaattaaaattagatcttctcttttaggcttttaagatcatttctaataattccttttaaacaacaatttataatttaaggattttcaaacaagaaaagctcttaacaattataattagatcattaatgatcaaataattactgaactgttctttgtatcatttaggaattgagctccaaaaaatccgagaaaatttcagagagtatacttaatcatagagaatttaataaaaattaaatccatccatgctttaaatttaggaaattttatttcccacatttaacttcacttgtaaattaatgaacgtttaatataaattctaataataatttattaaataatttataaatcctgaaacaaaaatcaggatgtgacagtttctttgtttgtttcatgtgtaggtgactcgatgcctcgggagagtatttgcggaaatgatcttctcgatctcctctaccttttctcttttagaatcatcacctaattcggtttggaaactcgtggattcgatctcgaatcggattcgtctctctctctgaaccctaacctttccttcgcatcgccggttgccgtgggccttcgccgccgcctccttgcccctataaaaggacccccgagctcccctctacccgcagccactctcgccttagcccgccgccgtctgtagcgccctagccccgtgagcttttgcgccgccgtcgccgccgttcgtccagccgtgcgccgctgtcgctccggtcgtcgtcgtcgctcgggaaagccgccatcgggatcgccaagtgtagcgcccgttccgtcgtggcgcctagcgggaaaattatctcttaaaaaccctaattgtgaaatttgtttctttgcttgttgtctagtgtccgtgccatctcaagatctcaatccccgatctatcgtcgagtccaatcccgaatccaatccttccaaatcaaattcctccgcaaaagtctattttg

SEQ ID NO: 6512 - DNA, 54519 bp, Oryza sativa
ccaagtcctccctctccgctccctcgctgccacttcccgcgcgccgtgttcgcgtgcgcacgcccgcgcggatgccgcccgttgcaagccgcgcgcgcgtgccgagtggccgaccgcccggtcgccgccgccgtcagcctctgtgcgcgtctgtcgcccgtgtcgtcgcgccgctccaaatcgcccgccgtcatcgccgtcgtcaccgcccggcccccgccactccgcgcgcaagccgccaagggacggaggcagcgcccctcctccctctgccgcgtcgcccccgctcccctcctcctttttcccgaatcggcaaaagggcaagcccctttctccccctcctttttccccttttcccccaccggcgtcatcctccctgtcgccgctttggccgcgaccgccgagcgccagctcgcgccttgaccgccctaagtcggttcccaaaccgacattgccgccccctttaaaccccagctccttcccctccaatctccctcgttttcgcctcctcgccatagctgccgcccccgtgctctgttcgccgtcgccgtttgttgttgcgcgtgtcgaaggagtcagcacgagcaaggacgcggaaggggacttcggccgcgccctctccttcctcttccccggcccgaggccggagagattactcccgcgccgtcggcctctcgtcacagcgcccctcctcatctcggtgatgcctccctccgttcttcctcctcgctccatctcctccccctagctttcggtagtagctcgagtagactccccgtagttagccggcgccgccccgaccgttgccgtcgctcgtcgtgtgctcgccgccgtcgccgctcgagctccgtagcacccacacgtcgccagcctcgctaggcgtagctccgtccaatccgacgctagcatcgagttcccgaaaccgcgtagatgctctcaccgccgggaatcgatccctcgtggcctcgccgccgtttccctcttcccccccctccgccggttgtcgccgccgtcaagcttcctccggcaaatccgagccgttggctcgtctcccctcatcacgagcaaccgcccggtgtgctcgcttttgtccgtatcgccgtggttcgctccgccgctcgccgccgccgcccgccgtccattcgcggccgggtcatcgtctacctcccgccggcccgcgtggcagccacgtaggcgccacgtcggcgccagctcagcctagaccgggtcgagccgaccccggtcagtccctccccgtgcgcgcgttccaccgcgagccgtgaggctgcgcgtgggcccgccgcatccgcgtccaccgcgaaccgcgcgcgtgcaccgcgtccctcccccgcccgcgcgcatgagccgcgtactccctccgcacggtgagccgagccgctgacaagcgggtcccacccgggaccgcgcatggtgagccctgtccaccggctctctctctcctccctcccgcgcgcgcgcgtcttgggccgctctgggccgccttcttgggccggccggcccgttaagctcggccgagccgccctttctctcgggccgcgccctagccgcccgagggaagtctatattccctccctctccccttttcttttctttttcttttccaaaaaaaaaaggatttaattaaatccttttcctttagaccaaaaatccaataatcttagaaattcaatatcttcccaaccgtaaatccgtttgactccgttcaaattccaaaatttctcaaatctcgagatctatctaatggcatgcttagaggtcattaatagggctttattttcgccgtttgttgagttgtcccgttttgcgtatagtttcggagcccgaagacccgcagagcgaggatttcgaggatcaagctccagatctcaagcaaggcaagccacctttggacatcttgagcctatattcgaaatctaattatattgcttgcaaaatattatgcattgataggattgcacttaatctgttgttccgtctgcaaggcagattggcagacctacctaacttgttgcatttgatccttccattgttaattgctataccatgtccccttgtaatcatccagttgcgcctcgatattcgtgcaccctgtgccagtatcgacggtcgccttcaaacttaaaatctgagtaacaacttgcgtaaaactggagttttacaaaagacttggaaaacccgacacctgggtcggtgcttgcgaactaaatgaatttccaaaaccgcggaccgggaaacgtaccgggtgtatggtttcccgctctcgcacttaaggaccgattccttggaatttcatccaaacataagacaagtacgaccacatgggtggaatgggacacccctggctgagtaactagcttatcaggggagccttgatgccgagagacatgtggattcgccggggtggtgtcggggaggacccctgggcttcctggcacagtatggtctgggacctaacctgttgttggtctgggacccctctcgtcggcataaggtaaacctgtgtcggctttggaaatgccttgccatgaaagcttggaggtctcccgacgtggctgatccccacgggctgggtgatccgggttagtaatgtcgtgtgggtaaagtgtaccccctctgcagaggttaacaaactgttcgaacagccatgcccacggtcatgggcggatgtgaggtgattcctagcgtagtttggtttgactactgcttgtgaaattgctgtgtgaaaaggggttcggtgtttgaaaaatctgcagctgatgggatcagctaggcccgggtggccgtttgaaaagttgttggcccgggtggccgttgaaaaagctgttggccgggtgccaaccttgtttaaattctaaagactgatacattgcacatactccgaccggacgagacgcactgtctcatccgtgtcgtttgagaagcactcacttagttgtttcagaaaagagttcaaataaaattaattgcaaaaacaccagcctttccttgaagcctgcattaaacacttatttcccatggcttgctgagtactcccgtactcacccttgctctatataaataatttcccccccagttgctgaagaagatgaagcggatcctactgatgaggagttcttccaggagcaagccggctacgatgagttttagggtttcggcctagttcccaagtcgcgcctgtgttgattggtccaagtcctggcttccgctttccttttgtaatgcagttgtgagctcgggatctgtccgcagcccaacatgactgtacatctactctataataaagagacctctgttgctgtgatattctgtctccctgtgataccagcactgttccctgcgactggtatcgattaacaggttaatttggagcgtcacgggctagttccggtcgggactagttcggggcgtgacaccaagccgtcgccgatctcgtccgcccctccgccgtcgctgtcgaccgctggaacaccatcgccgtcgtcaagccgaaggtcgtcgccgcttcttcctcgtcgccgttgctgtccgttgatcttccgccgttgttttggtcaccggtgagttcgccgcgtcgcccgcatcgttttggtgctctcctttcgcgccgccgcgccgtcgtttgccggcgggcatgcgtgcccgagtcgtcgccggtgatgacgtcaccgctgacgtcatcgtcgtcgtctcccgtggtccggccgtggaccgatagatctcggccgttcgttttggttggatcgatctcggccgttcgtttccgtgagccgccgccatgcacccggtccaccatgaacccgacccgctgacgcaataatcctcttttccttttcaaaaataattcattattgcgtcataattcaattaaaacctatataaaggatttaatccgatttaatcttcggaaattcataactaaatcatcgtaactcggttttgagtggttcaagttgctaaattcatctaaaatcatgatctacatgtttctttactttatatgtactgtttatgcttgtttttgtactgtttatttggtttttattagtctttttcttcgttttgcgtgttagcttgttgtttccatcgttgcgaaggttcgtgagtgcgtcgggagtgttcagaagattaattgaagaccgattattgcaaggaaagtcacatagatcctaaacacaatcctttgagcatgttgatcctatatttaaattctctctttatttcaactgtgcatttattttcgaatgtcactaggtggtgtgaatctattcctttgttatggcctgtttgcattgattactttattccttgataccttgggttattataacttgactagttgagctttatatattggttcagctagatattagatatgattgcttagccatgcttagaaacattagcacactattgggataacttatgactcactattatttaatgatggcttaataatagttcacgatagtcaatcgtgattggttaattaattacttgccaactaaaacttgataatggtgggttgtgagcatatggttttgagagtcgcgctcatgacaattaaggaccggttcgcgagctactattgtgaaacattaaccgtgccaaccacaagccaacgtgggcaacggctttaccttttgtatagcatggttcattgcggagcaccagactgagaagtggcggagataagcccacgggggtcgctggggagtccatgccttgttttataagggggtgattatgatccaggaatggtgcactgtggtgagttgtgttgtgcagagggtattgtcacagcctctattcgggtactttccagtatcgcgacgcatggtagacatgatgttgaggctgtgtcttgtgggtacagtggtacacctctggccagagtaaaactattcgaatagccgtgcccgcggttatgggcgggttgagcaatgtttttcgtgattagtctcacacctctcacaataattatggatgttatacctggtaataatttgcttagctcctggtttggagttagatctgtatagccgggtatggttgttcaggatggttgggcctgtgcagcatgggtgtgctgttcagtgttgattaaaatttctaattaattactctactgttttactactcttaactctttgctaaatgctgctttcgcaaatgagactatattgtgccatcctttggtatccttgtgcatttgcatatttgctgtgtggcttgttgagtatgtcatatgctcattcttgcaataatcaatcaacctcagttgaagaaaaaggatccagaaggagaagacgtttggcttataccccagttgagctgcctgtgggagtggagctgaagccatcgctagaccgttattccgctgctgttttcttttcttttgtaagtgtgtaacgttattattatgatggatttatatattaaattgtcagtttgtgtagctcggctgattcctggatgagaattttacgcacaaataagttcaaaaattactagtgaatttccgggcgtgacacacacataaagtactattcatgttctatcgtttaataacaataaaaatactaatcttaaaaaaaaatcaaataagacgaacggtcaaacgttaaacatgaatagtgtaaagctgtatttatttgggatggaggaagtataaattataaggcctatattttttacacagtcttcaacgacatactttgaccattaatttatttcatattatatcatcaacaactataaagttaatattacatgaaagtattttaaaatgcaatcttattattaacatatgtaatacttgttgtagatattgattattagtcaaaagtcaccgattttgattttttttaaataaggacgctttataattcgaaacggatagagtagtaggatattttacatccaattattttattttacagtggggtattatttagttgagtatgtttcttttttctcatacaccttagagaaaacggaggaaaagggaaggctgggctgctccgtgaaaaggaaagatttggttgcttaccagattctctattgtatagctcggctcgttttctaattccagcctctcgtagagtgaggtcgatactcgtagagtaggcagctgcttcaattttatccaactcacatgtaactcttttagtaacttatgaatacaataagtaaattgtaataatgctcggcacaccaacttcacatcatattaaataacttaagcttcctttcacacatgtattccctcctttctaaattgatcatcatataatggaattcaaaatttctcaaattaattattatataaccgcatggacacatatttcatcagaatacaattaatgtagcatggaaaaatatacgcatgctaagttgtgattggcattgtgttttaatcgatgcatacattatgggagaatgtgtgcatgatgtcttaattgatatgatttaaataattattgggtcctgtttagaagattagcccagggctaatgtttagtcatgaattggtaggctaaacattagtctagggtagtatgtttggatccatgggctaattcaaggctaaaaggtggagacagagggagagagagaactgctttttatggtccccacataaaattagccccattagcaccccttggaggggctaatgttttaaggggggctaattcactttagcctcaaattagcccacctgtttggatcattgagggctaattcaggagtaaaaggtgggggctaataattagcccatagaaccaaacagggccttggtcttgtctcttggtgcataatatatagtataataatcaatttgggaaggagagagtagttcactccctctgcactcatcacttttctcgcaaagccaatgctcatcgtccgctctcactttgtctctcctttcctcttctctcctctctcatacagcttaccactgctcagggacggagctacattgaagagtggcggtgcccaggaacctgatcaataattttttttaattttttttaaaattatagttcatctatttttatcatatatgtaccccttcaatctaaactcagacgctcatatcagactaagctcagcctaaaatagagtaaagcaagtgagtgttatttcttcccatttcgttctagctccacccttactgtagctgaaatggtttctcctatggttagtctaggttgtactactgttgcactcgctagtagcagcgctgcagcagcagcaaattcgagttcctttctttgttttttatctttgttttcttccttccttggcataggccggtttagctgagtgcgtcgtgtattaaaactctattttttcaatttattgacatacaatctagcagcagcagcaggcatcgagatgggcgcagcggtgaatgccccctgaaacggaatggaagccgcggacaagacgacgacgaggcatcggagcaagagccgggccgatgttgtgggattcggtcccgccagcgtacgaccaaccccggccgctccgcgcccgcgcgacccgcacgtgagagcaccgcgcccgcgcgcgcaccaccacgcgctggaaatgctcgccgtccgtctctacgctaggcagcctcgcccacacgcacacagccaaagccaagacgcccatccatgtggtgtggcgcagcgagctgaactgctgaagtggtagtggtggtgtggtccatcgatcgatctgtgcagcagcagcataagctgcttggtggtgcgctcccctctgcgcggcggacccgccatcgttgatcaacatcaactggggcgcgatgctatctatcatcaaacaaagcccgggccattgtttgtcatcatcgatggatcgtgtggggatattgcatcagagctaagcaaacacagacaatgaatggtccagtggggaggtaaagagatttatcctggcgatcgatggtcgggtactggtgtctggtgcagtagtggtttttgcaactttgcatgcagtactccacttgcattgggagggtattaaggattggtgtacggcatcaccccacgcgtgcttttccacgcttttccaggacaaagattttgatgagcagggacgaaaggtcaccacaccagttcaccacaagcctacactacacactagtactacatgtctacatgtaagaacgaaccgtctccatttttcatctttttgttttcgtttttgctattttacctagtacgatatattttttaggtttttgcctttcaatttttcacctttacatcaagattcgtgttcctatacagagcacttttatatacttggttatagagcacttaaacttagttacaaagtacttcctccgtcctaaaatgtagacattttttaggttggcacgggtattaaaaaagtatgtgagaatgattggagaatgtgtatgattagttgaaaagaaaaggaatgtgaatgagaatggttgtgattggttgataggaggaggtaggtggaaaaatagcttcattttgggacaagacactgtgttagaaatagctatattttaggacggatgtagtacttacattgagctacaatgaatcaaaattagattttacaactgtttttgtttctagatttatgatttttgacatattcatcatattctctttttttaacgaatcggcgaaccgccaatttcatggaatacatgagtaaaattgtacaggcacaagacgcaagaataaaaaaaatgtgcaggctcaaggcctttggtcgaaatgcttcgcgcccgccaaggttcatgtttttttatcgcttcctccttaattttggctgttaggctagtcgtcaagagctctttttgctggaaaaccctgcggttccttttgttccaaatctcctaggcgaccagcagtattaatgttcgaaggagccttcggtgcttcgctagtccacgcagtagcctcccatcactcagagcaagtataatagtaggctataagccagctaaatgctaaggtggaggagaaaaaagaggagaaagaggagaagcgggctataaaattacagccggtttggacactctttttatccaccacggagatcagataaagaggcgtgtcggtgatatgggcccgggggtatcaggtttagagggaggaggccgcccctcgatgccacgtggccctcccccgaggggagtcaggcccgaggtggggtggcggccactccttccccaaagactagtcggaggaggctgccccccaatgccacgtggccctccccacaggggagtcaggcccgaggtagggcggtggccactccttcccagaaactggatggaggaggctgccctccaatgccacgtggccctcccgcgaggggggtcgggcccgaggtagggcggcggccactccctgaccgagactagagggagaaggccgccccaggtgccacgtggctcccctcccgaggggggatcgggcccgaggtcgggcggcggtcaccccctcccgtgactaggggtcgggctcccccgaccccctctctaggtcaccacgtatggtgggttaggtgtccgcctccaggggcccacctacccgcatttatggcgtcccgagcggtcgcgccacgccgcatgtaatacggtgtgcagtgcacccaaccggtctgtgaccagtcgaatgactgatgggacccaagatgtcaggcgcaccatcgcgtgtgtcaggcgacgtgtagcccgacatatcccatcaaataatgatggtgagaggttctcatcctcttatcccagccggagtcggtcctcccgctttggtcaaagcaaggctcctgtttcccggtgtaataggagcccagaagtcttcacccattaaatggtgactgacaggggcaccccccgtgtcaggcggcaagatttgacaggacccatcatcaagacgacgtgtgcttggcttcccaagtcaagagacaagacatgcatttaatgcaaagattataatacttatccaccggagctaggttaggttgttgggcccatatggtaaccccttgaggtataaaaggaggtccaggcctagtggtggaggggggacttccgagcgaactggcgtttgggtctcataaccccaagcactggtgttctacattcaatcaatcatgcacaggagtagggtattacgcctcatagcggcccgaacctgtataaacctcttttatctcatcgtcttggaggggcctaaccccctcaagatcacacagctccgctcaccaagccctcgaatctcacccgctgcccccggccgaactcacaaaggggggcctcacggttccctggtggaggagttcattctccgacatctggcgcgccaggtagggggcgcgttcgtgatttttgaggttttttcgagcgccggcgtggtgagtgtcacaccgccgctacgggggaaggcgcagcatcctctggagtgtcgcgccaccccaggcagggggcaaggccccccacatccccaccgggtaagcttggctaccaggtctttgtggcgagtcttcggaatgtccgagggcccccaaagctccagccctacctcaccgagaagtacgatgatggcgccgacccctccaagtccctccagatctgcatggcgatcatagaggcggcgaggggtggcgaccgggtcatggcgaacgtcttccccatggccctcaggggccaagtgcggggttggcccatgaacctgctgccgcctcggttcactcctaggaggactcttgcagttttgagctccgggtgccgtcgaagcccgggaccccctgtgctggctcttctttagcgactggctttggtcctgccggctggctacggtgtccggcctggctcaactgatcgtcctttcaagcttcaagtattttcaatttttcaattcattagcttgaaatcttatatttgtttccccccattctattctcatggccctgcgacgcccgcgtgttgcgcatttgtttgctccctcggtggtaagagcccaacctctctcccatctacatgaacgattcttcgctaagtgtgggggctaagttttctagccttcagttgagccccgagtgccgtcgatgcccgagaccccttgtgctggctcttccgtagcggctggctttggtcccgccggctagctacagtacccggcctggctcaactgtggatggggattgctggctctagagttttcggctctcacactcatgcgaaagtaatcgtccatgtagaaggaaaagagattggaagcaggccaccgaaaggaaagagcaaacagaatgtgtagcgtggggacacaggctcgtgggaacctgacctcgtttgctaagtggtcacaggcttcccaagatggttcggaacccatggtggggggtcctcttcgagctaaaggtttgtgtttgcttcattcatacaagcaattctttgctataagtgtgggggctacgattcctagctctatcctagccctgcgtcgagctctgggtaccgtcgatgcccggggccccctgtgctagctcttccgtagcggctggctttggccccgtcagctggttacgacgctcagcttcacttgatcacaggcgaagattgttggctatagaaagttcagtcctcacactcgcgcgaagataatcgtttgcatagaattattattgcttatatttatctctcgcctatctcttcctcacggtcccacggtacctatgtgtcacgcgccggcttgcctcccttggtaacaaaaagtttgtattcgcttcatccattcaaacgattctttgcttaaagtgcgggggctacgatttctagctctatcctagccctgcgtcgagctctgggtaccgtcgacgcacggggccccctgtgctagctcttccgtagcggctggctttggccccgtcggctggttacgacgctcagcttcacttgatcgcaggcgaagattgttggctatagaaagttcagtcctcacactcgcacgaagataatcgtttgcatagaattattattgcttatatttatctctcgcctatctcttcctcacggtcccgcggtacctatgtgtcgcgcgccggcttgcctcccttggtaacaaaaagtttgtattcgcttcatccattcaaacgattctttgcttaaagtgcgggggctacgattcctagctctatcctagccctgtgtcgagctctgggtaccgtcgacgcctggggccccctatgctagctcttccgtagcagctggctttggccctgccggctggctacggcgcccagcttagcttgatcgcgagtgaagattgctggttagggaaagttcagtcctcacactcgcgaaaataatcgtttgaatagatgaagtagaacatgaacagagattaacaaatggcaggagcaagcgaggtacgcggcgtaaagacacgggcccaagagaatctaacaacgtttgctgaatatatacagaaaataagttcacagcctaaggtacgggctagcgaatcgccctcaggctagggcgaaaaaggcgcatgggtcctagtgccagcaaagaaagaataagagatcgggcccacatgtcatttgactaacagagtggcgtcaaccctgaccacctaggaaaagttttggtcagggctaacgccgggggctactgtcggtgatatgggcccggggtatcaggtttagagggaggaggctgccccccgatgccacgtagccctcccccgaggggagtcaggcccgaggtggggtggcggccactccttccccaaagactagttggaggaggctgccctccgatgccacgtggccctcccccgaggggagtcaggcccgaggtagggcggcgaccactccttcccagagactggatggaggaggctgccctccaatgccacgtggtactcccccgaggggggtcgggcccgaggtagggcggcggccactccctggccgagactagagggagaaggccgccccaggcgccacgtggctccccccccccccgaggggggatcaggcccgaggtcgggcgtcggccgccccctcccatgactaggggtctgttgaagaaaaaatcgaacacaccggcctgggagatctgcttagctcctgtgcaggtccaaagattaatgagatgcgggcgtgccagtcagtttaatcctgcaactgacaagatttgcaaataatagatcaaacagccgatcggctgacaagccgatggagtagttccagccgatagccgataatagccgatgccgataccagccgatagcgatagggtttaagcaatcggctatatgtcaaatgtagatactgatataaaggcaatcggctaatgatgatgtaatatagcaatataatcctgtataaaccaatcggctaacaatatgatatagtagaacaagtattgatccgaaggttaaagcacccatcggctagaggtccgatgtcatgaaatccacaagattagattaaacaatgaaacctttgttgccatcggctaaatccaacttatatgtatatgcaatccttatgagccgatgcaacgtccagataactcaccggctgaaaccccgatgaatcccttattggcaatcaataagcatgctagagattatggttctaagcacgacttagtagatcaaacttaactaatgcaacactaagtatgaaaagaaacacaatatctagacaatcaagtcgttgactgattttcagggtggtaaatgcctaggctaatctaatatagcaacgcgatttagccgataccggcagaaaccctaaagcgagagacagccgatagagctaaattgatatgctaagactagattaacagagacatgataaataggtaggcaaatatatcatccaaaccagagcaatccaagaggtcgaatatactgatgcagccttgaacgacgccgatgtagatgagacaattgcctggaccgacggaacattggacttatcccttcgccggagatcgaagacgatgcagccctgcgttgggtgccaagttctgccggaacgtaaaaaacaaaagtagaagtaaaaagggtggcgatgcgccgaattatattgatcgtagcgataaactacatagaccccgggtgtacatatttatacccatgggttgatacaagtccttgtcggataagaaagtacatagaccccgagtatacatatttatacccatgggttgatacaagtccttgtcggacaagaaagaaactttcctaaagataaaaggaaaagataaaatccttataggacactaaacacactttcctaaagataaaaggaaactaacaaactattcctaattaatagataacttgccatgccgcattctctttgaactcggtttcttatggataagcttcctttagtagatcaatttccttaaccgaatatagcaagaatccgacaactgacgacttgacaactctcatcggctaatctcaggacttcgaagccgatgctgactctaagccgatgactactccgggcttaccaaatttcactgttaacagggtcgggctcccccgaccccctctctaggtcaccacgtacggtgggttaggtgtctgcctccaggtgcccacctacccgcatttatggcatcccaagcggtcgcgccacgccgcatttaatgcggtatgcagtgcactcaaccggtctgtgaccgatcgaatgaatgatgggacccaagatgtcaggcgcaccatcgcgtgtgtcaggcgacgtgcagcccgacatatcccatcaaataatgatggtgagaggttctcatcctcttatcccagccggagtcggtcctcccgctctggtcaatgcaaggctcccgtttcccggtgtaataggagctcagaagtcttcacccattaaatggtgactgacaggggcacccccgtgtcaggcggcaagatttaacaggctccatcatcaagatgacgtgtgcttagcttcccaagtcaagagacaagacatgcatttaatgcaaatattataatacttctccaccggagctaggttaggttgttagacccatgtggtaaccccttgatgtataaaaggaggtccaggcctagtggtggagggggggacttccgagcgaactggcgcttgggtctcgcaaccccaagcactggtgttctacattcaatcaatcatgcacaggagtagggtattacgcttcatagcggcccgaacctgtataaatattttttgtctcatcgtcttggaggggcctaaccccatcaagatcacacagctccgctcaccaagccctcaaatctcacccgctgcctccagccgaactcacaaaggggacctcacggttcactggtggaggagttcattctctgacaaggcgtttttttttcccctcctcctcgccctctctctttattaacgtggccccatgtaaacccggctctttaatccccccgcagcgaaatcaaagcgtcggtacccagtacataatacctccacggtactcgtactcgtactccccaactcatgtggcaaacaaacgtaatcttctcatcccaccgacggatcgatcgatccatctctaccaaatgcgccccgcgcgtacgaacctatcgatcggtgtacgacgtacgcgcattccgcgaataatccacccctgcccctgcccctgccctgcccctgcctgtcacgctacgatatttaacgtggctgttggcctccgtttgacaaccacgcacgctgcgcacgcattcgttcgtgcgttcgttcgttcgttcgcacgcattgatgcgcggtccggatcccgacgccgctggcacgcgcgaggacatgcccccgtgcagctgctgctgacctcgatcgctcgcgcccggttttttctcccccctctttataacccactgaaagccgagtattattccaatgcagcagcagcagcaatcataaaatcgcagagaaaacgagagagagagagagagagaccattcttcttcttccacggcctcgctactctcatgagcaaggatgaggagggtgtggaggaggagcagcagcagcagcagcaacggcccaatgccatcgttgggatcgcaggagtcgccggcgacactgggatggccggccggtgagctgaatccaagataggatatagggaggatcgatatataggcgaagaaatatggaggggagttttggtgatggtgatggtggtggtgggttttcggtcgacggccggcgctgcaatgcggcatacaagggaaagccaggcattttctctgctgttccaagtactacctttcctttagctttcctctccatggaagaaaaaagaaacggttgcattattcatgtgttttctctgttgttaattaactcttgaggttgattaattacttcggtttttttagctaggcaagttaactagtagtagtttctgctacagatggtcaatgaagatcatgctaagacgacagtcacactgtatatctgcattgattccttccttctagattgttatgcattttcagatctctctctctctctctaaccaatacgtagctattggaagaattaatgtatgtccaattcatctcatcatctgtgtttgttgttgttgttgttgttgttcgaatccctgcttttgcacagtcactactactgtttcttttcggtgtcggtaagcactcagagtgctagtatgttcgtctgacagaaagttaattaattaacgcacagagaaggagataatttacagagatcatggacagttccggtcagattttgcggtgctgcatttagattcatcatggttcatggatcaattgtccttgaaagaaccattaatgtagcaaaaatatgtggtagtactgccatatattctggtacttgtgttccaatctgtctttgctttcttttttgtcattggatttttgaggtgcctttagcgtgcagccttcgctcttgactattgcaccccggtaccacgtaccattgatgttcagttgggagaagttcatgatttggtggtagttgacgaatgctactacaattctcgagtgtaattatatatttgtatcgtactttctattattgcacccttttgatgcaattctttttctttccaagttccaacctaatggtacttgttgattttgattatatattcattctagtgcatgagtatctaggcgcctaggcctggacacaattctgctgtgttcttctgtactgcttgctgaatgttgcctgctctccaaaattttctgaatcctttccattagagtggtttctttaactgcatactcgagtaatacattgtacgaatacgcgtatatattcaatttagttgcattttttttctaataatgaaggattgaaggtatataactacttttggtctctacaccaggattacaatttaatctcaaggctacaccaaaatagcatcacttgatctaatcatagttagggggtaaaaaccatatatcttgctgtgagcctgtgagcatttggagccttatcccacgtggtatattgtaccgtgaacagaatctaactctttggcaatcaacgaattcatgataatgacatgagagaaaaagctccgaattgaaatttgaaagggatgccctagctctagtgtcggtacggtgctttgtacatgcaggggtcattgcccatccttcataaatcatatatttatggctcctttaaaacacagaaataagaaaaaaaacttcatccaataagactgttgttatagaaagtcagaatataaataaaaaggatgaaatggtattaagaggtctagtggacccacaactaaaaagacactctttgggacaaatctaaaacctataaacccctctttttaggacggagggagtataggattgcatgtataaatataaaacatagatgaaaaatgtaggaaaaatatactccctccgtactcgtaaaagaagttgttttggacagcgacacggtctccaaaatacaactttaacttcttgtttctataaaaatatttattgaaaagtgatatatgtatacttttatgaaagtatttttcaagacaaatctattcatataatttttatattttcaaactcaacaacttgagagttattcatgatttatattcctatggtttgatttaaacattgtcctaaatgacttcctttacgagtacggagggagtaagatagattgtttagaacaaatatgaacttagtaaaacacaagaatcataatgtcgttggtcaatttatcctcaaattatggttctttagagctttcattattttatttagcttggacttagctaataaatgaaaacaaaaaaatagggcttggtagatgttcgaattcatatggaatctctagcaaaggaaaatttccctctacctttcctatgcccaaatccttcattccaaacaagcgaatagtgccaaatacaatacaaattgaaatcatccatatttcctacaaaattcctacaatccgaaggagccctcaatgtggcccttaacatgagggttggatctcatgagaacttttctcaggtctatctctctcccaaaatcctatactttttctatggagcatccaacaacaagttacacacaatttctgcattctaaaactcctatggatcaactagctagtatgccacgtcttcctacatttttcctgtttctgtatttttgaattcatacgctccaaaggaaccctaaagaaaacctaatttccttccaaatgaagcatgcaaattcttaaatagtactaccaaattttatatttaggacatgcttttagagccatgtatacaattttaggtctcctttgaatttcagaaatttaatttggacgatttcaatccttgggatttttttctataaggtcattctttttttttcaattttcagatcgtccttttgcacgagagaatatgattgacaaaatcctaaaagtttattttatatacctccattccgtacggaatttttcatatcataaccccaatgcactctctcactctctctgctcttacgaatttttccttactattgaaaataaactaattctaaagaaaatcatgtgctccatatatatagctccaaatattatttatgcgtgttggagtcctatagatcaagttggaaatggcgttctactcgtacatttatccctttcttatgcgtttttaacatacttgtgtttgtttcaaagagcctctatagaccaataagaaacttcttttttactgtgaccgtgaagcttagagcaggtataatagcagactataaaccagctgcaaatatattttaagaagataaatgagatgagagaagagaagcgggctacagatttgtagctagttgtagcacggactccaagacgcagtgtgtatgacagatgggaccaggtattaatagtgtagtatgtaactattgtgtgaatgagctattagattggctatagatgaattggagctagtagttaactatactattaaacttgctcttatgtccaatacgggtgaggatcatctatcataacatcagcatcattacagtcattggtatgtgggtcactacctcctattatcacacatatcagtatatataatgatggtgtcattatgaagcaatataggctgtgtttagttcgtgtgtcaaaatttttttaagtatacagatacacacatgaagtattaaacgtatactaataacaaaacaaattacagattccgtctgtcaactgcgagacgaatttattaagcctaattaatccgtcattagtaaatatttactgtgcatcacattatcaaatcatgacgtaattaggcttaaaagatttataacacgatttatatgcaaactatacaattgttttttatctacatttaatgctccatgcatgtgtctaatgacaaaaatgttaaaagtttaaagaaaaaaattgaaatctaaacacggccataatccaatactcccatggccaatggctgcacgctttggcattggtaggaaaccttcaggcccaaccaaagaggcatttgaccaaaccgtccggaattcagtggcctcgggatccgttctttttcccgagcatgcgtgcggcacagcgaaattagctactcccagcaacaaagatggatcgttactccaacttgatatggtttagctaattagctagctttacacagcatcatactatcatactatactattactactataatcgtcaccattgatttctttaatcaagctatctaatcctatgtgccccctgtgttgttgagctgctggttttgactttgttggcaccgagatatatgtcatgagaattggtgtccgagacttgaatggttggtagctttgacgctagcttttaggatagatactcctatgatatcagtaaaaaaaacacatacacaaaatgaaatattaacagtgtttggatcgttcagatagctagctagcccttgaatacttcggttgtatgcatctcagctgcttcattatttcttaatccatcatgtattattctagtatctcgtggtgttctgtgtcagatgggcctcgttaattatagcttagcactgttgtttcaaaaatctgcggcttgcttcgcgcaacacattgactttctgcctgcatctgtaggcgtaagatctccttggtttgatgatccatgcgtggccatgttaatttgggactgatagggatccgtgcttttgtcagactgtcagtgtgcagcgttgatcatgagttagtacacctaatatgttcatcttcatcgatatctcaaacatcaattaagaataaactgaaatggccatacctctattaagagtctgtatcttatcatgccttgttaatcttgactgtctcataatcagccaaccaccttttatattagcgaccgacggcgaagaagaaaggtgatcaccctaacaactagctagctactcaccattttttgaaaaaaaaaacaaagaaaaaagaagaaagagaagaagatgtacgccattatttcgctccggtcaataacccgtaaaaaagcgtgacaatggaataaaagttaggttttatttttagacttgtacatgctgttgaggatttaaaggcaaagactaaagaagacaataaaaaacacatagaataatttaaatttaaacgttggctatggcttactttattaaaaaaaactaaacttagaagagaaatgtgatcccttctaatacaacaaatctcttcatctatttaaatttatggtagaggagtcacgcctctttaacattgatttttttttttggatagtgtgagtaatgcgctaggtacacgtacaccagtacagttagtacagcaacgtacagtgtgcgtctctggaggcgtatacgtatccggtttgatgagggcatggcccatgctagatcgccttggctttccatatcaaaggacacagggtttttactcgaatcggcacaacggtgacaccgtgacagaatgcaacccaagaagcagctgcttgacgactgtaaaaaaacggaagatctgattctttttttcacctgtcgtacgtacgatcgacaggcaaacggaaccgacaaatctgacatccaaaggaacatatatactcccatcttatcgcgtcctggctagtaaaggggtacggatctcattccagggaggcgagaagatcctcttcttccgtgctgattgtcaccagcttgtgattcgtgagtacctatgatttgctgtacatgtgtagtaattggtgtatacgggcatacggcatacggcattgaggagtgaggaccatgtttttcaccgtgtacgtaactagtgcatgtaatcctgtttatgcttcacggcttacactttgtgcagcaaacaagaaaatgttgtacacgaacagagcagaatttatccaggacagggactaccgtggccctgtgcctgtctgcaagtaaaatccgatcatccagagttccagactgcttgcaaatctggactagaaggagagggcatcattcacagggtgatatggacatatgggacaagggcatgcaggccgaagggaactctcacaatggcacaaggaatgtttcgaaccaactgtgtacaaacattcacaccaaataaaaataaatgagatcacatgaatcaaaatccaagaaaaagagcgtacgtggattgaaccacatacacttttgaatcagaatagtgcatcaacctgcctactcaaaataactccaggtacaggttttattttatattttttttaatcgaacaaaacaatcaggcagacaatgtacatcgcgagagcgggctggttacgatcgctttgctttgatcacaaagcgaggccttccttccgaaatgagattctgctacacctgtgcaccgcgccgcttttcacaggcccatcgaccgttttcacgggcttttcggcgtcaattatcgcggtggtattttgtttggagtcgattgccttttgttcctttctgctctccagaacagattcaagcccctaaaatgtgcacaacacagatatggattggcataaagaaaccgaaattacctgaatggaggacaaacatctgcatattaattgtgtattaccttcactgcctttctttcagactgagccaactctgtgagcttgagtttttcattagcttcctgtggaatggagagcatagaaggatcattacagcacaatgagcagtatgagccaaaagaaaagcgaactatccaagataaggcatccttagaccttgcatgcaatcctgaacctttataaatgatatctactcacctgaaaaaacttggcatttattccatcttttagacctccagctatttggcagaggtaccatacaccagcattagttgcatcctgtcggtaaacacaagaggttaggcaaaaggaaaaaatcagcacgttaaatattgatgggtatgtttagccacctgtttattatcaagcaactcgatcttcccttcctgataatgtcaaaggagaacataaaggtcaggataaccaaagaagtgttctgacacaggttcatgctcaagggttataaactaataaaactcaccaatccagcaaccatctgttggattgctgcaatatcaaatccaatttgagacagatcatctttgacatcattcacctgtgcatagagaacagaatcatgtcttttgcataacattgggaagaacaaaacttttctgctttcgagaagaaaatgaaaaatgctgtaaaatttatctttccatagatgagtacttgcagatttacagtagctatttttaagaaggtatattttaatgcaactaaagaccattcattgatgacaaatatcattatgcttatgcttgcgcttgtatatattcttggcttcatgatgttgttttatggtttatgggcaagatcgatcacttggaatatgctgtcaatgattatagtaaaagccaacaattccaccatatttcaatgcatatcctataatagccatgtcaagtgcttcctggctttatcgagggcacagtttttagcttgaaacaatattggcatgacaaagaaaatcctgatccaccttttcagatgcgactacacaaatcaaactaataagagttatgcacctcaggtagaaacacaatttaataataaagttatcagatgctaattagacttgatgtaatgaaaaaaatgaaacaataattattgctccagagaaaaaaaaaaaggaacttcaaaaatttccatgtgtaaaaagttgaagggctagcagcatcacaaatcaacaaacctcgtttctaataattttggagacctccacttgctcatccattttcccatctaaattttccaggcgctgacttagatgcctttttgttgcctgaaattaattgaatttagaaaacactagtcagcatatgcgaaggaaaactacttcaaatatgtaacgattcagcatgtaaagcatacagctaaagctgaagacacttgatccaattgcttcgacatactctcaacagctttggtcatgttgcgtttggtaacaaacatgacatccgataaggacaatccctgcaggaagatactataatgtaagaaaagtttaacacatacagttcatcattgtactagtaatttagtctacaaacaccattaggacaagacagatttgatggttttacttaaatactagggcctagggatcatgaaaagagtctctcaacccgaaactgtgattcttgatagaatatttggtcacagaatcagagaggtgttattacatgactaagaaagcaatttaatcccccgcccaaaaaaaaaagaatgtggtttattcatgatgtctcaaaatacatacaagggtgccaaatgccaattatatatcaaagttggatacttggatccacatagaaccactgggactgcatggaaatactttacagggagacttaggtagcatagttcttaagacatataactacaagaaacaaggtaaacaagcaaatggggaacatcatattactctcttcattcagttactaatttattgaaggctgtaagtataataaaaggaaaaggatagtaaggagtgtttgtggagaaagaaagcaaggaagaaaaatcagaatataaaagctgatagatcaaagtggcattgtatattcctgattttaccttccaccacatatagcagtaacccattgctccaactgcagctgcaggcagtatgtaggaggataaactgcctgcaaaagggatgcaaatgctagtgaataaacaacacggataagaaaaagatacatgtcacatggggacaagtagctagtgagatatgttcatgaatgttgtgagaaacagctgaatgtaccagcattcctatcccatttgtcattacattgctattattgaccaatcaacatgattcatactgtaatcgctgaagcatttcagcttcatgaattactcaatattgaattagagaatagagattgacactctttaacgagttttagcaaaaatatgactattgaccactttttcaccaaggggtggtagccttgtagaggagctgatacaagccaataattgtctatctaaaccttaagattgacaaataatctaagtaaaaagatgtaacaaaagctttatatggatagactctttgcatgactgctagaagagtgaaactgaaaacagaacgaggagaggatcaaacaagaacaaacctccagagtcggagttgccactcaatatggtaataggccttgatatagtcaaatctctaacttcttgtgctaaatttcgaatctgcagtcaagcgccagcacacaaataataaaaacaacaaactgcagtggtttttactgaaactggcaactttattgaaattgaagtctgcattgtaacttccattcaactgttgattctatgaaaaatatgaaacgatgcatacctgagattgaagaagggcgatgtcataggcactcgaaccttctccttggtttacacctttcataagctcctaaaaacagggaaaaaaccatctacttcaataaacatctgcgattttatgagttactacaaattatagatgaagaacgcatcatcatagccattgggtgattaacttaggcatgacattccaattggtgcatcgaaatgattcgacattgaaattaagcgacaaaaagttatgcccatgtgcacgcccaacgtttgatcggtgaaatgtagctgtaatgcatttgataaattggagtcccacaaacagatatataaatcacaacatcgcttgaaacacacacgggcaacactgacgcgcctatattagcgtattggcaacttacgatcgataacgcgaagcaatcaacagaattagatgcccagaatccaactactctactcaagaaacatcaggcaatccaccgacctgaagctccgccaacacgtcagatagccggccattccgcagcacgatcgagctcgtcaaccctgcagctcgacgccggccaaaaaccaccgcatcaggatcagaacacagcggggcgatccgcatctcgaatcgatgctagaaaatatagtagagcgggaggaggaggaggaggaggaggagggggaggttgcggtgacgagacctgcgccgacgaggatgaggaccttggaggtggcgaaccccgtctgcatcgccatcccctcccgccgctcctgcctccggggctccccccgtctcttcctcgcgtccggcggcggggtcggtggcgaggtcgtcggcgaccgcggggaggagagagagagagagagaggaggggagattggcgaagcttcgggaaggggaaagctgacggcgaaggcggaggaacgtggtgactgacatgtggaccccaccgctctcgggcccacctgtcagtgaccacgtcagaggggtgcgcggacaactgggcgagtggtggggttggacccggcttcgcttctgtcgatggtttggcgagcccgacccgagccggtttacacgtggacggaccggatttacccattggggtatttgaacggggatagcgcatgccacgctgtgctctagaatgccaagtcagtgcacgtaccacggcattactgcgtgaggcctgagcgtggatttttttgttatgtcttgaacctttttatttttaattaaaaaaacaattgaaaaaacttattttaaaaatttgaatcttttagctacgcatactgtcatgccggtctgcctaatgttccatcgttatttggtcacgccggcctaacggatgtgacaatgttatttggcctcgtcaccctgactaacgtgataagataaaactatcacgcccgttgtggtgacgtgtcgatgttatattgccacgttggatggaatggcgtggtcaaaagatccatattttgaagtaagctttggaatggttggatgaaaatttggatattcatgacatgcttttcaaactactaaacggtatgttttgtgtaaaaaaaattttatatgaaagttattctaaaatatcagataaatatattttttaaatttgtaatacttaattaaactcaattaattatacgttaatacaatctcgttttgtataaacacttaagcttcgtcttaatctgtatgagtttcaaaaatcaccttagcaatcaaatgtttgaacacatacacggagtattaaatataaacgaaaaagtttagatcctctagcaaaatttttcgccatgtcacatcaaatatttaaacacatgcacggagtattaaatataaacgaaaaaaactaattacacagattgcgtataaaattgcgagacgaatcttttaagcctaattgctccataatctgacaatgtggtgctacagtaaacatttgctaatgacggattaattaggcttaataaatttgtcttgcagtttacaggctaaatctgtaatttattttattattagtctatgtttaatctataactaatataaatattcgaatttttccggtcgtcacactggtttttcgtcccgcttcgtcgccccccctcccccaaaatcccaatccgaatccaatcaaaccccggaaaaaaataacaatcacaatcggagttcaatcacacaaatcatgatgcatgtacacatatatatccaaaccaaaaccaaaaattagatcaagggggtcaccaccgccgtcgccattgccgtcgcagagacggctggccgccggcggcttccctcctgctagatccggtggaggggagagcgccgccaccgccggtccctcccgttagatccgccggcggtggcggcggagggcgctctccggtggtaggggagagggccgccgccgtcgtcggtggtgggagaggactccgccgccgccgctgctcgcgggagaaggggcgccatcgccgccgctcgcggggcacctctcctcccgctagatccgccgccggtggtgggggagggtgccgccgacgccgctgtggggggtgggcgcgccgccgctgacgccgccactaccgccggatccatcgctgccggatctagggcgggagggaggcgagaggggaggagggagccgccgccaccgccgacggactcacccgccgacgccatcgacaccgccatcgccgctggatctggggcaggagggaggcgagaggggagaagggagccgcagccgccaccggatctgccgcgggagggaggctagagggggtggagggagccgccgcccccaccctcggatctgtcgcggccgccaccaacccgccaccgccgacccgagagggagaggaggaggggcgccgccgtggctttgactgagaggatcacctccccgggagccgccggtggtggggagaacgccaccgcgctgccggtggtgggggaggacgttgccgcgccgccagtggtgggggagacgccatcgccgctcgcggggggagggcgccgcctctgctcgggagggagggcgccgccgcggaccgccgccgctcacggggggaggggtgccgccaccgctcgggggcacggaggggagggcggcgaagtgaaatgggagggaggggagggaaatgggctagggttttggcggctgagagggagggggttttgtttccccgatatcgacgctcggccgtccgatcaaaaccctagaaatcggacggccggtgtcatccgggccgaaatcggcccaagagggatcgagagtgaggccacttttctggctcaagcccaggttgcggcttggggaggggaagtgagcccacgcgtgcgcaaaaggccgtgggccgaccggtaagggccgaaaataagtctattttaggtccctcgggccgaaaaaaagagagaataagttcatgtttagtgctcattttttcagaagcattacaattatagttatttctcacacttactttacttgtaaatttatttaattatacacatatacctacttaaaaatatcaaatatttcagcgaatttgtattttaattaattgcatatttttctgatatgtacgcttcccgttgcaacgcacgggcacttttgctaaaccaaacaacacttttggttaatatacacactccgtaatcacccggtgcaacgtacggacacttttgctagtactttaaatatgtgttcatatatccaatatgacacactaaaaatttacaccctgcatctaaacacagcctcaatcatgaaatattgaattcctatttttcaagaggatatacgcggcatgagcccatggacaggcatttaccgccgctgttccccgcctagccacgtctctgccacgtcaccacggccactccccggggaagacgaccgttcaaacccgccgcgactacccgacggcggcgcccatgccgccgccttctccctcacgccactcccactccggccaccgcctccacctcctcctccccaatccctagcctctctcgcctcgccggcgccggcgtcgccatggcggcagccgccgcccctctccccaccctccccctcctcctcctcctcctcaccttcctctccgccgcctccgcgtcgccgcacatctccgccgtcatctcccagtcgggcctcgacttcgtcaaggacctcctcgtgtcccgcgccgcggaggccatcgtgcccctggaggtgcccgacatcgagaggtccgtgagcatcccggtcatcggcaccgtggacatggtcgcctccggcatcgtcctccacggcgtggcggtcgacgactccaccgtcgccgtcggggacgacgggatcgtggtggccgcgtcgctgtccagcgttaatcttactatggggtggagctactcctatagcgcctgggtcgtcacgatctctgacagcggtaatgcctcgattcaggtatgggtcgcggtattcatgcgttcaattgttgttgtttttttcacagttcgagagatgatgctagattggagggggacttccatgattgacaagttaatgttcaaaattagtggtttagtgtctgaatttgcgcttattggcatgtatggaatgaaacatgtatgtaaagtagaatccagcacgttatgaaattgagtagctttgaagacactttcaaatctagttctttagttggtacatgagtaatttacattgataggcacaatagctggttacttgttgcacggtgcatattggggtgacatgtgggctgcctattaggagcagctggcatttgtgcttaggatttacttcaagatgatcttaactttttctctagatcattttagctcaatggagtttacaattctaagcacctaaatagcagcattgcagcaggcaagcaacatttcaataacatagatatcctatatgctcctcagttaatttgttggaattataagctgcttcttttttaaaaagtaaaaacgtctcagttgtgtttttgaaagtttacaccgaaacaatgtcacctatggcacttacaccttatttacctgtattatttgagtactagacacccttgacatgtatatatacgaaggtacaagatgtattcatgattccttttcgctaaggttgatggaatggatgttgggatttccatggggatgaagaatcaaaatgggtctctcaagctgttcgttacagaatgtggctgtaatatgaagagcttggacatatcactgaacggaggagcatcttggttttatcaggggtacgtgcttcacaattttacatatgcaaaaacttgtcaaattaactgaggttgctctgtaaattgcttgtttggtcgttagatcagagggcgctcatcccttgctcagtccctgaaaatgagataacataggcttttgatatctgctctgtcaacaagccctggttcagtccctgcttcctccagcccttatcctgaaagaggatactttttcttccccactcatcttattaagcctttttctttgccggcttagcttccgtgcccagatagactttgactatactataaaagagagctagatgatctgttatcaagtgagaagaaaggctggtccagaaccaagcgaacaagggcttgtactgtcggaggttccaatggttccattcttgatctgatttctcgctatcttattcggtggcacaatacaaaacaaaatatgactcctataattgcccgatgtgggtagccatgcccattctaattctatttttctgtacatcagcaatatatataggaaacatggtttatatctgtggttagaatatcatgcaattttttttgtcaaaataattgccctatatattcctgaatgctgttgatatttatctgaccccacatggattgatattattcctcttaccttttctaggtttgtagatggtttcagtaatcatatcagatcatcagtagaaaatgcaattacgaagaaaataatggagggtgcatcaaagcttgactcattccttggaagccttccaaagaaaatcgatgttgatagcatcgctgctatgaatgtgacatttgttagtgatccactcttcaagagttcctctgtggagtttgatatcgatggactgttcattccatctgataaaactgcagtttcaagacacatgcattttagaggtgtaaaatatgtaccacctcttggtagctcttcaaaaatgctatggatttcattggatgaagatgttttcaactctgtttcagctctctatttcaaggtatatcagaattcataagaaagtggttgttatcatggttaaaggattaaagccttactgcagatgtgtaaagttgaaggattatctgaacttgcttttgtcaaaagatatatatatatatatatatatatatatatatatatatatatatatatatatatatatatatatatatatatatatatatattacacaaaagaaagatatatattttgttgattgtgtccgtctagagtagctaacttgaacacgtgttcatgtttgaatggaaacaattattccctccgtcccagaatataagcatttttagagttggacatggttactaagaaagtaggtagaagtgaatggtggagggtggagggttgtgattggttaagtagtggtagtaggtgggaaaaatgaatggtggggagttgtgattggttgggaagagaatgttggtggagaagttgttatattttaggacaaatcttgagggctaaaagttgttatattttgggacggagggagtaacaaatatgctaatagctgtaaaaatatatattctaattgatatgatacttggattgttcaggctggttcactacaacgtatggtggataaaattcctgatcagctcttcctgaatactgctagttggaggtttttgattccaaggttatatcagaagtaccccaatgatgatatgctgctgaatatttcagctacttcacctccttccgtgaggattaatgtgggtaggattgatgccgcagttgacttagatgtcacagttaatgttttggattttgatgagatagttccagtggcgtgcatatcagtggtgagatttttctaataatttcctttcctgatttcatttgatttcattgctagttgcttgacttatggaaagtaaacatattgaaatgtaacagtattgcaccatctggcagcacttgtatactgtccgtgttgtctttgaccttcagcatttcatattttctcccactgagaattttagaaatgaaatctatggcacattgagttgtgttcatgttttctttttttgtttcatccgttgatttacaattggacttccattatacataaacatttctacacgaggaaacacgtgcaatttccacctctttgataccgttgtcgcatattgtttccacagtcagttactgtctctggagctgcagtggtttctgggaacaatcttgctggaagagtcgagttagattatttctcattcaccttgaagtggagcaaagttggcaaacttcataccttcatagttcaggtattttggcctgtattatacgatttaatgacattccacagtttgtaatttatgatggtgtaatagaaaagaggtgagcttgggaatctccatcctatatttatggatatgcctaatttccaagagggactctgaggggctaactaagacatgcgttatcctattggaaagaaaaaagtaatttcggttgaaaatgccttcttcataaagttcttttacctagtatagcggaaaggcctaatttctgaatgaagttgttaattgtggagctgcacatgtattttattatcattggtgaacatttgtttcttaacttctgaatgtctaattgattctaatttttgtattggcagagtgtgatgcagatcttgttgaaaaaattgtttgtgccctatgtgaattcatatctcaaaagaggcttcccattgcctatcatcaaggggttctccatcagcgatgcatacatcctcacttcccagtcaagaataattgttagctctgatgttgccttcatcggaggtcatactccctatttaagccaatgaaagcatctggcaagaagtaggcttgttgctcaatcagcaaagcatcagaaatcgccatgtcccatggaacgtgtagtgctacttcctcaacatgttagcattatttcgttctgctgtataatgttcttttgtaaataaccgtaggagttgtacatatgtaaatctaggaaccatagaactgtagaaataggctgctgctatactggagaaatggtgggttggttgtgatgtacccacaattcttccaaatgaactggcaatatacttgtacacgttctgtcaaaaaaaaaaatgtacactccactgtatagtgttcagttctgtaatctatgctgaatttgctgtatttaaccataatctggaaatgtatcatcgttccagtatcaattcctgacttcttgtattggtaagatataaattatcactgcaatctgcctcactgaacctgtaaacacaaactgatctctctttattttcagtgtagctgaatttgacattttacactatcaaaataaataaataaacaaatagaatttggcattttacaggaagctccttgaggccttgagtaatcaggggtcagtgactctcttcctcctcctcctcctccaattggaaaaacaattttaggataagacaggggctaccccgcaaaaatgactctccgttatcctcgagtcgagttccccccaaaacccagaaaaccccacgacgccgtcgccaccgttcgtctccgcctccgcctccgccgccggaaatggcggccacctccctcctctccctcccctcgctccgcctcacccaccgcctcctcgtccccgcgtcgtcgtccgccccagcctcccgctcccagttccaaacgctcgccgcgaagaaggcagccgtcgccacgggcaccggcgagggcggcggcggggggcgtggagcgggcggcgggctgctgtcggtgctcgaccgggcgatggcggacgaggaggagtaccgccgggcgcgcgcgcaggtgcaccgtaagggcgtggaggtggaggggtacgccatcgagggggtctccgtcggcgggcacgagacctgcgtcaccgtgccgtccctcaacgtcgccttcgacatcggccgcgggccgctcttcgccgtgagccaggactacctcttcatcacccacgcccacctcgaccacatcgtgagcgccccgagccctgtcctggtttgattcattcctgtgctgcttgtgcttcgtgaatttcgtgtagaggcaactgcgcctctagctaagcttgggtgcgccatcggtgaagtttcatagaaaagctgatgtaaggggattgattcagtaatttcaagggaattgtcaccggggaaatgcctgcttaatttactatttggactgtggcctttagtaaatgtctgcttagtttatttgttcaacaacatgctatcgtgaattcgtgatggataggatttttatcaccaattcttctgataagttggcctaagttagtctgcgtgtaattcttaaataataaatagtctcatcttgctctatacctgcttttactttggagcggtgtcaagaaaatcatgattgtgccaacatatttctcctttgcatagcaacgggagaattttccaatgtttttccctttaaactgacgaatatgcttcactgtcagtttttccatttgctgctctaacagaatcacaacataaatgcagccatatccacctcagttttgttattttgattgttcagggtggtctcccaatgtacatagcaactcgtggcctctataatttgaagccacccgttgtatttgtaccaccatgtatcaaggatgatgttgaggatctacttcaaatccatcgtagaatgagtcaagtcgaccttaaagtggaattggttgcgcttgatttgggtttgagctcgtttcacctcttctttctgtgtttctctctccttgtttatttctaatgtttctacgattgcattcaggggagacatttgaaatacgtaatgaccttgttgccagaccatttgagactcaccatgctatacccagccaggtataactccctaggtcaatttaagtatagttagcaagccaaaagttctagttctcacctttcttggacaatttagtgcttaataactatttcgccccttgtgcgggttgtgtacattcacagggttatgtcatctactctgttcggagaaagttgaaaaaacagtatgctcacttgaagggtaatcaaataatgaaaatgaagcaatcaggcgctgaggtcagctagcaatctgttctatataagaaatatattctgcactgttactcactgccttcttttctgtcagattacagatactatactatatccagaagttgcctttacaggtgacacaaagtctgattttattcttgacccacgaaatgcagatgccctgagagcaaaagtccttataactgaggtattggctttagattttagtttccttgattattgccctttctcccaagcctgtcaaaagtatttgttccagctgtatgtaatcagtcacatttagagatgtaatcattctcatgggacatgtcaaagtcagcaaaaagggtgtgaagtataatactccctccatcccataatataaggcgcgcacgaatttcaagattcaacctttaaaacatttgaccaacacttaatataatatgaaaatgaattttgtttgttaaagattacatcattagattgagatctaaatttactttcatgtggttataattttgttgctacaaatcttatagtatatgagaaattataagctaaagattagttttggagaccgtgccaacattgaccacaccttatattatgggattgggagagtagtataatacagctatagtcttgaaatatcagagaacagtaaaaggcagtctaagtaaaaccaccctattatattgatttgtcacatcttcagactgtaaaataacaaaagaacttcctttttatttgatcagagggtccatcaaatctgaaacatgacaaaataatttcaaatgtcctccctattgaatgctttggcaccaacattatttgaccttttcacaggcaaccttcctagatgaccaaattgatgttgatcatgctcgggagcatggccacatgcatctctctgaggtaaatgatgatgcacttgtcactttctccctgccatgctatgattctaatgagctttgggacaattctgatagttaaatgagatgtctgtataaagtattactgcattaatgcaaatctggtatgtcgtctacagataatggagcactcccaatggtttagaaacaaagccattgtactgacacatttctcaaatcgatatagtcttgaggtatgtaatcactaacctataaatcattgggaatccagtgtttcctaaaaataatagttgcggattctagactaatctgacccaaatgattattttgtaggatattagacaagctgtttccaaactacagtcaaagttatcttcaaaggttgttgcactgacggaaggcttcaaatctgactatagatagtgtatagaagtaggtcagctgtgcttctcacccttacttgctgagaataacttgagttacttacactaggaattggccattcatgaggaaaaagggacagaattaataggtttgtgctgtttggcttttgtatgtggcatttatatctcctatctttctatattagaaaataaagtttatatagcattataactaaatgattattgtgatggaaaaatctatattatacatgccaaaggtgattcagtaacatacataacattttcttgacactctccagcttccagaataagaaaaggttagctaaaatctctctctttctgctgtttttttattccccccgcccccccttgtactatctctctcatgtacatattatattttaatatatcacagtaggagcctattctgctgtttaaccgtctaaaaaaaagaataagaaaaggtgtaaaaagctgggtattacaatacgttggagaatctgaaggccaaataaactgaaatcatgaaacgcatacatctgcatgaaatccaataagttgtaaaatatcgtacagtttcatccttgaaagcaacaagcaggcatacacttctattactgtgtactgcgtaccatgagtacgttctcttgaaaaatagataagttacgagtttgttctgaagtgtcgtacagtataatccttgagaagcaacaagcacccaagcaggcacacactaatattactgcataacatgagtatcttctttggaatagatcaaccaatgagtttgttctttgaagcttcttttcttgtattcttttttgctaggtacatgagagcagtggcagtgctgctagtatctggttttagcataacggattttccttgcatcaatgtcttgttcacttacatgttcaacagattcgtcatcagtggagcaactttcaggatcttcgcgtgcgggaatgatgaatatgtcagattcatcaggtaatctgaagctaactctcctcatgctgttttggctcctaatagagattctatcgatggagaagctgtcccggatgttaggagaattattttcataagaacaatccgggttaattgggcaaacctttggagagtgcctccgaggtgatggggctccaattgcctccccctgaaagctctgaggagaatacaagatgtcttgaagagtgttttgccttatttctgccttgactgttctggtcttgttatgctgctgctcctcttgaaggcatctgggcttcattctgttgaatagtgctttaacatggcaacagctctgtgagcccatcttttccctctcttctttggtgatgaacgatagtgtcatggcaaatgcgcttatatatgtccatgctccgtattgtgttgggcaagtaaaataatctgttttgcatatactaggttgtgtcaaaccttgttcatgtcaaagtaggacgaattatggtgattgaatcaaggaacgtaaaggagagatagaacacttattttggattaggtttggggaagtcattgatgtttccaaactaacttgaaagatactattcatcttgtgatattattgttgtcactagttggggatgtcaaacatgataagcctgcttacacttaggatttggtacagacattagcggagtatatgatgatgaacttactgaatcctgacaaaaaatatgtggatggtactagaatgcaactaggtaactttgtctatactactagtagctatttaggctcggcgcatgctcgagagaaggtgagatcgcgcactagtgcgcggctgcactccaagactagtgatatactatactctactctactcgagtagctagccagcgcagcgcagtggtgcacgcaccatcacggcgcacccgatccacaattaacctacccctcgcgctcgcagccacatatcatgcgcacgcacgcgcaagcgccggctgatccgatccgatccgatcccaccaggcgaccactacctcaatacttccattctaacattttctatatttatattaatgataataaatctaaatagatatatatgtctagattcattaatatcaatataaatatagtaaatgctagaatgacttacgttgtaaaacagaaagagtagtatactccagccaactactaactctaaatcatctatagtctatctaataactaatttatactagttaattacaaatatataatacaccatgataattggtcctacatatcatatatatatatatatatacacacatatatatacacatacattttaaagttcgtgctacagcgatgtatatctataacccgtttttcttctctcctctctcttatctccttcacgtatgtttatactgctcttattacctccggtcaccggcacgtacggacgtgacgacgtcgcacgcgcgcgcttataaatgcagccatacatagtgcgatcgtttcgtggccagagagagagagagggggagagagagagagagcagagcttgaactgaccggccggtgcagtacaaataaaaattatacgagcaatcatgtggttgctgccgctgatctgcttcgtcttggccttgctgctcgccgccggcgccagcggtggtggtggtgccgcggctggaggaggaaatggcggcggcggcgagcggcgtggggtatacgtggtgtacttgggcgccgtgccaccgcggacctcgcccaacatcctccagcagacccatctccgcctcatcggcgccgtgctcaaaaggtccatcgtaaaataaattaatttttaactctcttcctgttggtgctaatgtctctcaagttgcactagctagcagtagcatgcatgtcagtcaataagaaggtactcgctcagtttgccgatttgtagcatggcattaaatatattctctccgttttatattagaagatgttttaatttttcaaagttaaatttctttatatattagaagatgttttattttttaaagttaaatttctttacgtttggtcaagtttacggaaaaatgtaacaagttctacgatactgtgttagttccattcaatctaaatactgattttttaaaaaaaaatcacgatagacatacacacgccactacatacgcagcaccgcactcacaccctcacaaatggacccccccctaacatatgctctaagagatagaaaccaacggcacatccttgatctaacaaaaatcctgttaaaaagcacatgcagaccatcgacatatcccttatctcactaaaattctattaaaagtctacatgcatgtgcataatattcgtgggcaccagaatttgaaccctggttagtagaatcatacactcacgactccgctaccacaccactagtgtttttccaaatattgaatatagtacgattgtatagtataaaaactatttatatgtttttcttgatcaaacatatatgatttgacttaaaaaaacaaagcatcttataatgtgaaatagaggtagcagttttctaaaaaaaaactccatataaattaaaataagcagacattgttacgttaatttaaaaacccgtgtacacttctctcactttgctacagtgttgcacttcttgttaatttaacattgtctttctctttaactattttcaatggttgaagattattttaatcttactatcgttatatggcttaattatggtgaaataaaatgtgagaatttacttggatattttttatatgacttcttctatattttcaaaagcaaataaatttaaaaaccgactaaaacacggataacgtatcaaagtaccgacaaatttattttcaattttgataatagaaaaaataaagataaagataaagaagtagatatggagatagagaattttcgtcaaacggttctgaattttatgcccaaagatattgggatgcatattattggtaaaaggaaacctcagtagcacaaagtgatcaccaacgcaacacgtgtgttgcgtgtgtcacgtcacgtcgacgtcattgtgccacacgttagtaaccgtgtcatgtgtgcactacgcgaacagggggcagccagtggagagcgtggtggtgcagcagtacaagtacgccttctccggcttcgccgcgcggctgtcagcggcggaggccgccgcgctccgccggaagcccggcgtcgtctccgtcttcgccgaccctgtctaccacctccacaccaccaggtcatgggacttcctccagcagcagacgacggccgccgtcgacgtcaagactggcggctccgcccaccgccgccgccgctcgccccgcgcccgcgccgccgcagcatcagcgtcgacgtcgtcgtccccgacggccgacaccatcatcggcctcctcgactccggcgtctggcccgagtccccgagcttcgacgacgccggctttggccctgtccccgccaggtggaagggcgtctgcatggccggcgatgacttcaactcctccagctgcaaccggtgagtcgccgacgcctatgccagagaaatttgattttctttttcttagttaaaacttttgtgtttaattaagtttataaaaaaatagcaacatttatgatacaaaattagtttcataatttgacgtatattttgatacaatgttggttttacattgaaaatttactacttctactccctctgttttaggttatgactttggtcaaaattaaactactctaattttgactaattttatagaaaaaatagtaatatttttaactcaagacagatatattatgtaaatttattcaattatagatttaacgaaattatactggtattgtaaatattatacttttttctataaagatagtcaaatttagagtagtttgattttgaccaaagtcaaaacattttctaatctgaaacggaagtagtataatttggtcacttaaaaaaattaactaagaaaaaagtcattacaaatgacttgtaatatgaaacggagagtatatatcctgatgtttcccgggcggcgcatgcaggaagctgataggagcaaggtactacgatgtcggcggcgaggcgaagcggcagtcagcacggagcagcgggagctcgccgcgggacgaggccgggcacgggacgcacacctcgtcgacggcggccgggaacgcggtcaccggtgcgtcgtactacggcctcgcggcggggacggccaagggcgggtcggcgtcgtcgagggtggccatgtaccgcgtctgctccggggaggggtgcgccgggtcggccatcctcgccgggttcgacgacgccgtcgccgacggcgtcgacgtcatctccgtctccctcggcgcgtcgccctacttccgcccggacttctccgacgaccccatcgccatcggctcgttccacgccgtggccaagggcatcatggtcgtctgctccgccggcaacgcagggccggacgccgccaccgtcgtgaacgcggcgccgtggatccttaccgtcgcggcgagcacgatcgaccgctacttccaatcggacgtcgtgctcggcggcaacaacaccgctgtcaaggtatatatcacaaaattaaatatatctggacatgttctttttcccagattcgttgtattagaaaaaatctcatctatttctaatatctcatccgtctaaaatccttgtgggagcactctcttgtgatcttaactaccccatttttatggaatctgtagggtggagctataaacttctccaacttgaacaaatcaccaaaatatccattgatcaccggtgaatcagccaagtccagctcagtttctgataccgagtcagcaaggtacgtactacaaggcaagcttagtaacgaaacaaaattaaattaacagaaagtttcagcagaatctgagtaagtagtttcatgcccaaaaatcaaatcataaccacaaaataatttgtagtcactgtgagccggggacgctggatgcgagcaagataaaagggaagatcgtgctgtgtcaccactcgcggaacagcgacacgcccaagacggagaaggtcggggagctcaagagcgccggcgcggttggcgccgtcctcgtcgacgaccttgagaaggccgtcgccaccgcctacatcgacttccctgtcacggagatcacctccaacgccgccgccgacattcacaagtatatctcctccaccaggtactatacgtagtccttcacactatagcgattatatactacctccgttttttaatatatggcatcgttaactttttaacaatcatttaatcattcacctttatttttttttcaaatagaaaaatatttaagttatatttataaaacatttggtaataaatcaagttacattacaatattctctctctcctataatataagcatatattcttagagttgaacacaactattaagaaaatagatataactaaataggattaggctacgattagatgagaagtgaaggtatgtgagaaaattaaatggtagaggattgtaattggttgagaagaaaatgctggtatataagttattatattttgagacaaattctaaatgttaaaagttgttatatttttaggacagagggagtaaatgataattacattattttttaataaaatgaatggttaaatatatcttaaaatatcaatggtgttatatattaaaaaaatggatgaagtataccctaattagtggcagaattaattaagctcgatcgatctcatcacatcactctctcttccgtgcatggtgatcaattaaactgcaaagtgagcctgtcgtgaccatcacgccgacgatcaccgtgacggagtacaagccggcgccggtggtcgcctacttctcctcgagaggcccgtcgccgcagacgcccaacatcctcaagccggacgtggcggcgccgggggtgaacatcctggcgtcatggatcccgacgtcgacgctcccggccggcgaggagaagccgtcgcagttcaacctcgtgtcggggacgtccatggcctgcccgcacgtggccggggcggcggccgccgtcagggcgtggaacccggcgtggagccctgcggcgatccggtcggcgatcatgacgacggcggcccagctgaacaacgacggggcggccgtgacgaccgactcggggtcgccggcgacgccgtacgaccacggcgcgggccaggtgaacccggccgccgcgctggacgccgggctggtgtacgagctcggcgaggaggactacctccagttcctctgcgactacggctacgacgcgtcccagatcaagctggtcgccgcctccctccccggcggcttcagctgcggcgccggcggcaacgccagcgacagcaaggacctcatctccggcctcaactacccgtcgatcgccgtcacggggctcggcaaggccggcggcaccaggacggtgagccgcgtcgtcaccaacgtcggcgcgcagcaggaggcgacctacaccgtcgccgtcgcggcgccggccggcctggacgtgaaggtggtgcccggcaagctggagttcactaagagcgtgaagaagctgggtttccaggtgtccttctccggcaagaacgccgcggcggcggccaaaggggacctgtttgggtcaataacgtggtcggatggaaagcatacagttcgtagcccattcgttgtcaccatctgagagtgagatcacacacatcagtgtgcaagagagagcacttgtgtatttctaatgaaatatgggactgtctagatgacatatgacagaaaaacatctcacaaatcatacaaattctagaccgttggaccattttaagatttctgatttcgtgtgtaatatttctatccctaacccccttcccccctcatcattccagcaccgccgccacctctcgcgagctcgtgcgcgtgcgatgccttcgccgtcccgccccacactccgccagtacccagcctcgtcggctggcaggaaggggtcaacgatgcaggtgagccccccctccccccaccccgaccaacctccttcccctctacctctcttccccaaccgacggcctaagtgctcctgccccgccatctaaaacttgagaagtgaagccacgccacatatttcttttgtcggcaaccacagatttcacaaatggagacttccctattgtttgatcgttgaagtgtctaacgggtctagctgtgtttcagagcttatttggtggctccacaaactagatttttttataacgaaaataagagtaaattttagaaaattatagatactttggtcaaattaccttaaaactacagatttaataataaaattatcacaaaactatagattttcggtttaaatccttagcaccaatgttacgtttgggttataaatattcaagttttgcgatcaaattgacattaaacatgtagttttgtgataagtttgttactaaatttgtagttttgcaatattccaacttaaatatgtagttatgtgataaatttagggttaaatatgtagttttgtgatacatcatgttaaatttgtagttttctgataatttggctaaagtaattgtagttttatgagatttactctaaaaataatttacatatccgacttagtatagcataagttataagtttgtatagaacttaaaaatttcgactaacatggcgaggctgagtcagcgtgtgacatgtcacccccacatgtcaaggacctgtcttattggtttccccgctcttccccatctttccagggcggccacacgccgaggagaagggcagcggtcagtggttgggggccgacgaccgacgggaaaggagttgtgcacgcggcggcaccgagctcgagcggccgcctcatctcctctcttcgcttacgactgtgaccacgccctaccccaataactcccctacactgctcaaatagccaccttgtgaggacgccaagaggctcaagataaagattgagacgacgacaatagcaatgcgcacgcatgagagagaagagatggaggagctagaggagaggaggcaactggttctccgttgctctcctagactatcagttgtgcattaggagagattgaaaagaagatgatggagaagacgggacaaagagaatgttttccatcctcggtctatgttggcaatacgatgaaagtggcaaaacatggtaatataactctaaacgtgatatatagagattaaccactttggcaaatagctatataaacatttgataattttggggtaaaaaaaactttcaaatataactatagtgtaaatgagatgtaattatattttttaactatttataatgtaacttatacgtaactcgcatataactaattaaaaccaaccatatttccagatggctagagatggaactttgcaacttgctggtcgagggtttgattcccttttgttttctcctggaacgaatgtcgccggtcataaaattgaaagttttggaagataaaaactgatttgtttttttcctttttgttttggaagataaatccgacggaaacaaaattaaaagttttgaaagataaaggttgtcattggttggccaattgcaaatgatacgccaaacaacattttaacgataaaaaataatttatgattaaaacttttaccaatgtattcttaatgactttaacaccaacgttagaaaaaaaagtaagataacaacatcaaaattaacttgaaaaataatttttagttatgacattagcatatacaactttgtctaaaaaataaatcctaactacgaatctgaataaatgcgtgtcaaggttcgtagttaggattgagttttttatgagacggaaggctagaaggggtacgttttagggggaaaagacgtggcccaaacactttggaggtttttttagcaactacagaggaagcctatgcagatgtgtgggcaatttatttattgttcataaaaagaatactaaaagaaatcatatcttgctatattcattataagagccctagattaatatataatgtttaaagaaaaaaatatttaaatagatcaaagatatgcactaaatgaaaatggctatcatattctaacagaaatcactttgtcttagttatatgtaaacacataagtgtttttttattaggtagatttaaacccagtcacattttgttaagaaagcagctgggttaccaggcgttcatgataggccagatcgttgctatgatggttcatacatgttcatgaacttaatgtttttctcgcttattgaatgtagttttgtgtgctgacttttttctcacaaatgagttgtttgttcataagtataattttcaacgtttgcatgttctctgtaaaattatatgtttaacactcatactaaatccttatattgtttgttgcgcgcatccacttaattgtagggcttgttcattttgctaccattttcaaccttaccttttgttttttgcaaaattacccaaaaagtggctacatttagttgttgtcaaattttagtaagtacatatgaaattttgccaaaatttggcaaccttgccaaaattttgataaccttatctaaatttagcaatgctaaaacttggtaaagttaaaaatgatagcaaagtgaataagccttagtacaaactcttagtacaaactaagagtgaaaggtcaaaaggtataggtttcttcactgtcccaacatcattggtgtttactcatcttggtgtattattgttagatgcatgccttttaaattgtggggtagtgaaatgcttgaaagttgaaacgtgaaagcgtcactcatacgcatgcatactgctattctggcgatttaccagttactagaatatcctgcatagttaatcaataaaaaccattgttttatgtggaatcctatatgcttatatagttcatccccactaagtgtaattaatgttatttctctcttctatcattaagtcacgtcactccaattatttttagccattggatgatagatctatggttcaaattgtcttctttcttctctcttttcgggaatacgcaaggagcgcatttttttcattaagagaaataaaagttatttacaatgataaaaggaaaacaagcaggggaccaatacaggatactatgaaaaactataggaatatctcgcgctaaatttggctaccacgacctcgtaaaggccaaacagcggggatcccgtgattagccgacttccaaagcatggcctcctctgccattgctttcgccacttcggtccaagacctttgttgttgattgaagattcggttgttctgttccttccaaattatccaagtcaccagtgtcacgacttcacgatagtgtcacgaccagtgtctcttctttcttctctcataacaccaagtaatctcaattatttttaggcctcaaaattcataagtaccattttgttttatttttaatattcatatttcatcttatttgtacatattgtgcaacttaatttcccgcaacaacgtgacagagtatttatctagttcatattacgaatcagatcgaaattatgatttagcccaaatggtattatactattattgatctttacttgtacttttcacaggcatctactcgaccaaatgtcacatcggatgtttggacgctaatttagagtattaaacatagactaataaaaaaactaatttcataaataagagctaatccgcgagatgatttttttaagcctaattaatccataattatcaaaagtttactgtagcatcacattgtcaaaatcatgacgtaattagactcaaaagattcgtctcgcgaattagtccaagcttatgaaatgggttttgtaattagtgtatgtttaatactccaaattagtgtccaaatatccgatgtgacatggacttggaacaagtcgctggaaatagcaaaactgaacatcttctgtatcaacctgaaattacgcagtatttgtacttcagtactgctagaggcaagatcaacaaagaaagccatgggagttgtggaagcggcagcggcagaggcagcaacattgatgctacagagctgcttgtagttgtagggttgtattacatcacgaggtcatgactcatgtcaaatgaataattgggatcaggataaagatccaatgcagtcataacagagactgcaactttgccagtagaaactcttttccatccttggatcaagacaataacgactgaaaccgacgctacagtgtagttttaaacattatctgctacagttctagctacagcctacaggagaaaccttggtactgtcttttgtgaacagtattcaggaagatttcttttttttttttttttgagttgattcaggaaggtttcggatatcactttctatagccactgcaggtgatcccaattcatctaacacatctcacctcatcttcaaatcaaacacatgctaaacaactttaagtggtaaagttgtatgtagtttgtacacatgtagtaagatcaccgtgggaagctcgacgatagcaaaaaatcccgctccatgttgtatagcttgctagtagtgtcggtattgctcagttgaggtggtagacagtgcagctcagctgaaagcccttgcaaaatgtcaccgcctaacagcctttccagccttatctccacttgcctcattgttggcctctcttcccccttcaatcttaggcatgccgatgctagcgccgcgacttctttcacattttccatgccctccgaaattacctgagggtctaatatctcgtagatgttgtcctgtaccattagcaaattaaaaagtgcaattaggctgacattatctgatgattcaaaaacagtaggcttcttccttgtgagcatctccacgagtatgacaccaaaactgtacacatcactcttatcggtcaatctacttgtttgatagtattcaggatcaagatatccaaatgtgccttggatcactgttgtcacaccaccttgatcaaccggaatgcctcgagaggctccaaagtccgaaacttttgctgttaagcgaccatcaagcaatatgttagcagacttaacatccctatgaattattgatactgaagcggatgaatgtaagtaggctaaagcgcttgcagcttcaagagcaatcctcaatctatttttccatgacaacaatgtagggccttcaacatggagatggtcggaaagagtgccgttcgatatgaactcgtagaccagtagtggaacctgtgtttcaaggcaacatccgaataaccgcacaacattccgatggttgatctgcgaaagaatgacaacttcgtttatgaaatcatcgatctccttacgaaccgtaatattcgatttcttgatggcaacgacacgtctgtctggcaaggtgcctttgtagacagtgccatggccgccgctgccgagctttctcatctcgtcgaatcgatttgttgccttttcgagctcttccaaggtaaacaccatcctttcagcaatcaccttatcaacaagttgcagcagcagtaaaccccggttctgcttgaagaatacggctctcagtttcttggccctccgtgccttgatcatgttcgtcattgccatgcctatcacgaacacggatggaattcctatgccgatggttcctcctatcgccacaaggagagctgccagcagaagatacggtcaaatttctgaaccctgtttgtgcaaggatttgcagagaagattgcaaggataaatttaagttatgaaatgaagagaaatttctatgtactcgttggttcacatcctccttcgttcatagcatcaccgtgcgtcccacccggacacatgcacgaaaacgatcctggcttgtttgtgcattcaccgtagcagggatattcttctggcagagcgcactcgtcgatatctgaaagggagaatttagaaaaattttgtaccattctgttctaaattccactaatcatttgaactatggttggtaagccatagaaaaatatactaaacgaacaaaaataatttataaataaaactattaatagcggtttaaaattttaacggcaaaagattgactataataagaaaactaaaatcaactttaaaattaggttttaaattttagccgcggctcataatctagcaagcaaacgatgagaggctatacttatgcaacttcaagtgtaaatgactaatccgttaaacacacttataagctaaaatattaggaaatgatttaatatcaaactaaatagaagggtgaggcatcgaacccagaacagctagcccaccaccttgtgaagctaatcagaagaccctcagttgtttctccacttacatggttacacccttatactccctccatccctaaatgtttgacgccgttgactttttgaaatatgtttgatcgttcgtcttattcaaaaaaattaagcaattattaattttttcctaccatttgactcattgttaaatatacttttatgtatatatatagttttacatatttcacaaaagtttttaaataagatgaacggttaaacatgttttaaaaagtcaacggcatcaaacatttagggaagtagggagtaacaaattaccttgacatccatttgcaacgtacggattgccttggtacccgttgtcgcactggcacgagtagccgccaagcgaggtgctggtagagttgcggcagtagctgttgctgctgctacaggccgtgtcgtcgggcccatgcggcggacaccccgacttcccgatcgcccagtcgagcacggccagcgccaccggcatgccgccgccgcccggtcgcatcgtcgctgctgctgatccgagcttactcgcgttcccgccgaaccactcgttgtccgcgacgaacacgagagccgaatccgattggttagacgacgaggcggaggaggtcggcggcggcggcggcggcccggtgcttgtgccgaacggcgacagccgaacgccgtacgacgtgaggcctaggtagatggaagcctggcagcagccaacgcccgcgcacgagtaatccgcgagctcgccgtcggccgctgctggccaggtggcgccggcgccgccgcagatggtggtgcacgcggcggcgatgtcgtcgccgtccaggaggacggcctgcaggttgcaccccacgacgacgagccggttccgccgctccctgaggcggaacgcgccggcgaggccgcggccccacgcgccctcgcctttggcggcgtcgtaccggacggcgctgctgacgatcaccgtggagtttaggagggatatctcgagcacctcagcggcgtcggcgtcgcgcaggaagagcttcggtgggtggtaggagcggttgcaggtgacggcgaagccggcgaggtggcagccggcgccgacgccgaacgggtaggggatgaccatgctgccgcacgagctcgggcagcccggcagcgatacggttagcgcggttgttgccgccattgttgcagcttggagaaacagtgcagccataacaaggataacaggagagggcgccatggagctgatcgattcagtggctcgatcagcagaagaaatactgaagaatggctcacccaagacgaagagtatatacgtccacgggttttgcttgacctgactgaaggagtgaagccacgccacagattttcttttgttcggcaaccacagatttttcatagatggagatattgatatccgatcagtcactcagtcatcgtgctagatcagtacacgccgcgttttctgaccgtgctgtttaatttgtgactttactagtaacagtatatggggactggattctaatagtacatggggagtgtctagatagttactcccttcatttcaaattgatcatcatataatgtttgtgcaccaagactaaggattatttaaactacattagtcaacacaccatacaaaatatacacacattctcccatgatgcatatagtatcgactaaaacacaagcatacaccacattatacgatgttatattaattgtattatgatgaaatccatatgtccacatggttatataatgatcattttgaaaaaaaaatgattttccttatgtgatgttcaatttgggaaggatcaaagggagtataatgttgtgatgatgatgatgatgatattggagtagtagactactacccccgtttcataatgtaagactttctagtattgcccacatacatatagatgttaatgaatctaaacacatacatatgtctagattcattaacatataaatgaatgtagacaatgctagaaagtcttatattatgaaatggaggaagtatttactgttacatgctagtttgttctagctcatccttgttctttgaaaaacaaatcacgaagttgtgcaagaaaaaaaactcaaaggcttaatcagtgctaaaatctgcgtgaattgttatgattttttgaagagatcctggcttcgtcactagtaagtagttacagatcagataaagatgatgatttagcccaaaaggtgttactgatcacactacttgtactttccgcaagtcatgcactcgatcaaatcggcaaaacttaacaactatatcaaattatcaaccagaagctacgggaccacctatatatttgtcgacaaattttcttctaaaaatttaacatatataattatagtacaatcgtagtgtaattacactgtaacttatatgtaattacactgtaacttgcatgtaactacagtgtaatttgtatataagtttcatgtaattttgaatcattaaatctattacaagatttgttttggtgaggaagaaaaaaaatcacagcatacagtataattacactacgattatactgtaattatatctgttaaatttttgggagaaaatttgtcgataaatatataacaaaatcgttttggaaggcccgtctcttccttcccgccgattccattccattccacccgcgaattctaggcaccgggccagtgcccagtgggcccctcgattccaggcccaatctgacccgtcggatccacagtcgaacgcatctggaccgcccgtctccgcggtgggcccagcccacaacgggagggaggagaggagagaggaggcgactcgctcgcccgcatccgcatgacgcgcacgggaagcggccgaggcgagcgaacgcgagacgatcgagtcggaggcgaagaggaagaggagcgatcgatcgatcaagcgcgagggggagtgggagcggcggcgggggaaatggtcgcggcggaggcggcggcggcgccggctccaccgcatgacgccgtcgcggcggtggcggtggggatggtgggg

SEQ ID NO: 6513 - DNA, 6205 bp, Oryza sativa
tatgggcgatcaaccagattcaccgtgattagtctcattcctagtttagcttaatgaactggtgtagttcaggtggttggttgggcctgttgcaacgtggggtagcgttggacagtgtttggttaatattgattaattactacaactgttttactgccttcaactactgtttttaaatgctagctttatgcaaaagaacctctagcctcctttggttatatcctgcatcatacctcctcttccggtatgacttgctgagtacagtgggtagtactcagtcttgctctcttttcccccacaccagagctgaagatcttcctagttggagctgttttgtcaaagttggtttcgtcgctgccgtcaaggattgcctgtggagtggagtcgcccgctgctgaagtcaagcttcccggtttagctcgcttttatcttttccgctgcatttgtaatcttttctatttttgtaagacgtggatctgtatgtcaacaattgtcgtttgtgtaccctggctggtcctggacagggatttaatgcacattcagcttagaaattctggttcgagaatttctgggcgtgacagtgcattagtgagtccgaaagacataactatgcatttgaacaacccgtaccaagtgatgaatgctgtctttggaatatcctcttcacggatcctcaactggtgatagcctgatcgcaggtctatcttagagaacaccgtagctcctttaaactgatcaaacagatcatcaatccttggcaaagggtacttgttcttaatagtgacctcattgagtgcgtggtagtcaacgcacatcctcttggttttgtctttattctccacaaagataaccggagcaccccaaggcgacgtgctcgggcagatgcatcccttttgtaactgttcatcaacttgcttcttgacatccgccaactcgttggctcccattctatacggcctcttgtagatcggtgcagttctaggtaccaagtcaattcggaactcaatatccctttttggtggaatggttgtcaggacatctggaaaaacctctggatactcgctgacgataggaatatcctccaacttcttagtggttttctccactgctacttcttgttcttcaccagtagactggttcagactgatcccttgcttctgcggtacttgagggaaggtccacgagatcaccttttccctaacaaattaaggttaataatacatgcgatcgactaaatcataaaaagtatttgatctcctcaacaactagatcatcttcatccgacatcgacatgccatacgcctattccacttgctcgacgataggtatggtgtccattacctaaaattggcaaacaaatacacagttttagaatccaattgatctctatctagaaacaaacaaaattaactctacactagagaaaaactgcacatatttatactatcagcacaagggcatcagtgaatctcacaaaagaaaagaggagaagtgtagacaggttctacagttgattatgaactataatctatcttgatgtgaccatggctactatggatatgaccattgctcacatcatgaatcaacaagaagacatcaagatcaagtcctccatgtgctgcaatctgattcggccacgtgttacattgctgatttcaaacggccgccaaatctacatacgtgctccgttttgggcccgtgagtacttgatggaaagctctcgaagtcctccttccaacggatccagcctcatctcggaattctatctcgtttggccacaatcacagaagcaaggtgctgcgtcacctgtattgggccaatgggcttgtaactttgtctgggacccttggggcccatgtggggtgcaccccaatctggtggagcacgacccttggaccctcttggtcatcctcccacctctataaatagttaggtaccccttcagggtttcttgggttttgatagattaaagtttagccattgctacttgcttgcagcgcgcgtgttggctagaccgtccgtctgcttgttcttcggaaccccaacttatcatttgtattaaattcctatttgcaatatcagattgcttttatcttgttcttgcttgtttcttcgatttgcttgcaggaatagggttgatctgcaccggcaagatcaacaacccacggagaggtgtatcgatcgctaaggcgcaacacaacgtctcgtacggttgtagtcggatcgtcaacgtttctcccaaatcgtagttatcacaactcaccgaaagatcgggccaacaacagccttgagtgtcaagaggaactcagggttcatcaggtggtatcagagttttcgttgctcggtgagttttatctacccataaccagaaaattgccatacaaaaaaaattgtatcctgtacctagccatattgtgccattgcattgtttttatcagtttttgctttgttgagttttgtgttgcattgtcgagtcgtgttgctggtcttagcgtttagttcgtttagagtttcgagttctggtcacgtttcgtaccactgtcatcacccccgccgtgtctttgttgtcgtcgggacctaggaaaacggaatcatcttgttgtcggggtttcgtttttctagttttcagaagtttttgtcggtcggtcttggagttgctgagttgcatcaagggtttgtcgtctgtattcggccgtgcttgtttctcttgcgcgaggaagaggagagaaagaaaagataacagatctgtttttggaggaagttttgcagactagatcaatcaggttggttagtttccatctaaggccaaactttccaaactctccccacgcgtgaagaccggttggcgccatctccttttgtcgcccactttagctgagtccgactccctccctctcacgtcggtttcgcctgttccgagttgtgtcaaacaccttggtgaatttttgtttggtgtcagtttcgagatccgtttcgaaaaacggaatcagtataaattcagcattccatttttgtataatttttaattttggtttggacttttacagttgagtccttgtaattttcatatttacatttgagtcccagtaatcttgcattgaggtccttgagttgtttttgcagaaaaaaaaataaaataaaaaaaagaaagtaaggaaaaggcaggaaggtgcataaaaagaaaaaagaaaagaaaagccgcaccaaaaaaaaggagagaaaaaaaagaagaagaaagaaggaagaagaaagaaagaaaaaaaatcagttgtatttttgagctgaacatgatctatcagagtgtgcctaagttaaaaaaatcagttgtatctttgagctgaacatgatctatcagagtgcgcctaagttgtttctagtgctatcctgtggtatcgcttgtgtctaggctcacgtctctagtacgttctagcctaggaccagcatggtacttgactttgaaccattattcaactttgcattctctgatttgagcatttgctatccctttgctacatatttaagcctacccagagctccacagatctgattgcagccgtacaacaagtgtttgccaaggcatcgatacatccaacctctattggggtgcttggttaagtcggtgtacatcaccattccgcttgctttggtaagaacttgtaagagcttggttaaaagcttgagtgtgtgtgatatttgagctgccactacctagtagttgataggagcatgcatatttttgtgtgtttcttgtttgctactaaccatggcaggattgcgtaagggaatacgagaacatcgacttctacaccttcgacgagatatgacgacttctccaaatgatacatatgaggtacatgactataattttgaacaagttgcatctaagttacccttctatgatgggaagtatgattctgttgcatacattgattgggagctagcagtagacaatgaatttgatatatatgatttttctgatgctcaaatgattaaggctgctagtaataaatttacctcttctgcattattttggtggacttatgttagtaataaacctgaaacttgggatgaattgaaaaccatgatgagaaaacgctttgtgacatcttattacaaatgtactcttcgggagaaattagaacatctgaaacaaggtgacagaactgttagggagtacattcatgaatttaaggtctgtatcatctacagtggtctcaaagagtgcaatgaaaatacaacgcgtagatttttcaatgggcttaattctgaaattcaggttttgcttgataatgtgacatataatcatattgggcacctattcatgcttgctcgtagcattgagagtcagatcatatcaaaggcgaggatgcatgaccaatgtgatttatctcctatttctgaatccccaatatacttatgtaatgatgatgtgcaaacattggaggagcaatcttttgtctcccctgttactaacgttttgcaggaagatcagcacatccaagaaaaggagaatggtatacttgagaagaaagaggatgaagcacctgcgatgtctgaaaaaagttcgcaaggtaaattaaatggtgctgagagaaatgaaggtgagtattctcaaggtgagctacacttgtccacttttcatgctatagtagagcaaccattagtggaatcaattgctgagttgcctttgtcacaagttgatttacttgttgttccttgtgataaagaagagttgtgtgataatgtttcacttatatccatgccacaactgttctactatttctttgtgtgctgattataagtatgttgttcacattgctaatgaagtagaggaacgcgaattgctatcttctttaaatactttgggctatgttcagtttgatgatttttgtgagctcgataatttgaaggagaaattatttgctaaatctgatttgccatgtccaactaatgctatttttcatatctttggcgaatataatgatagaggaatatttttggtgcatagagtttacatttgttcggatttagaacatcttgtagttctggataaaatatgcaagctagagagacatgttactgctaatcatattgtctcgagtttgtcttgttttgattgcaagaaacaggttgttttcagtggactgcgcgaagagcaccatatggaaaaaccgaggacggttttccgtgaagaagggaggatgatgtgaccatggctactatggatacgaccattgctcacatcatgaatcaacaagaagacatcaagatcaagtcctccatgtgctgcaatctgattcggccacgtgttacattgctgatttcaaacggccgccaaatctacatacgtgctccgttttgggcccgtgagtacttgatggaaagctctcgaagtcctccttccaacggatccagcctcatcttggaattctatctcgtttggccgcaatcacagaagcaaggtgatgcgtcacctgtattgggccaatgggcttgtaactttgtttgggaccctggcccatgtggggcccatgtgaggtgcgccccaatctggtggagcacgacccttggaccctcttggtcgtcctcccacctctataaatagttaggtaccccttcagggtttcttgggttttgatagattaaagtttagccattgctacttgcttgtagcgcgcgtgtcggctagaccgtccgtctgcttgttcttcggaaccccaacttatcatttgtattaaattcctatttgcaatatcagattgcttttatcttgttcttgcttgtttcttcgatttgcttgcaggaatagggttgatctgcaccggcaagatcaacaacccacggagaggtgtatcgatcgctaaggcgcaacacaacgtctcatacggttgtagtcggatcgtcaacgtttctcccaaatcgtagttatcacaactcaccgaaagatcgggccaacaacagccttgagtgtcgagaggaactcagggttcatcatatctagatgtttgtaagcctgcacagacaagtgataatggaaattacaagatgcaattttcctttgggggaaaaaaaggaatcaacggatttctttgtaaggttggaaattcagtatcacctcttctccggctggttgttggctgctcgacgccttctttctgcatactttgcagctagttccttgtccttctgttttcatccaagatgc

SEQ ID NO: 6514 - DNA, 21163 bp, Oryza sativa
gtcttacactgaagttgtggccaagttgcagcctgcagcagtgtcttttccttctaaaagtccaaatgctcctttcaccggcctaaccaggaaattgcagacttgactcgtcacttggggttcatcaagcttgactcttgacaacttgtctcgtactttcctgtgctaatttaactgcataaaccatgtagagttgaatcagtttttgatagtatccactggtagcaacacaaagtcttcgggtcaatactagagatataaccaagttgagtcccccagcatcctcacctgctgttccgattcacatcccggcagattgtacactaattttagagaagaggcattgctgcccagctttatactgaaagcataacagattgtacactaatagactatgccaatcggagaagctgtgctgtccgcgttcatgcaggcgcttttcgagaaagcggtggccgctgcttccagcgagctgaaattccctcaaaacatagctgtggagctgcagaatctatcaagcagtctgtcgacaattctggctcacgttgaagatgcagaggagcggcagctgaaagatcaggcggcaagaagctggctttccaggctgaaggacgtcgcctatgagatggatgacctgcttgatgagcatgctgctgaagtcctccgatccaaacttgcaggcccatccaactatcaccatctgaaggttagaatctgcttctgctgcatttggttgaaaaatgggttatttaacagagatttagtaaaacaaataatgcggattgaggggaagatcgataggcttattaaagacagacatattgtcgatccgatcatgaggtttaacagggaagagataagagagaggcccaagaccagttcgttaattgacgactcgagtgtgtatggtagagaagaagataaagaggtcattgtaaacatgttactcaccacgaataactcaaaccatgtcaacctttctattcttcccatagtgggtatgggaggagtagggaagccaactttaacacagctcgtctacaatgatgtgagagtaaagaagcatttccagttaagaatgtggctgtgtgtttctgaaaactttgatgaggccaaacttaccaaggaaacgatagaatcagttgcgagcggattatcatccgccacaacaaacatgaacttgcttcaagaagacctctcaaacaagctgaaaggcaaaaggtttcttctagtattggatgatgtatggaatgaggatcctgatagatgggatagataccgatgtgctctagttgctggtgcaaaaggaagtaaaattatggtgactactcgaaatgaaaatgttgggaaattagtgggcgggttgactccttactatctaaaacagttatcatacaatgattgctggcatttattcagaagctatgcatttgcagatggtgactccagtgcacacccaaatttggaaatgatcggcaaggaaattgtccataagttgaaaggcctaccattagctgcaagagctttaggtagcttattatgtgctaaggacaacgaggatgactggaaaaatatcctagaaagtgaaatatgggaattgccatcagacaagaataatatcttaccagctctgagactgagttacaatcatcttccacccatattgaagcgatgctttgcattctgctcggtctttcacaaagactatgtgtttgagaaagacatattggtccagatctggatggcagttgggtacatccagcctcaagggcggagaaggatggaagagattgggaataactattttgatgaattactgagcagatccttcttccaaaaacacaaggatggatacgtgatgcatgatgccatgcatgacctagcgcagtctgtctccattgacgaatgcatgagactggataatcttccaaacaatagcaccacagaaagaaatgccaggcacctatcattctcttgtgacaataaaagtcaaactacatttgaagcttttcgtggatttaatagagcacggagccttctactgctgaatggatataaatcaaagacaagctctatccccagtgatctgttcctcaatttaaggtacctccatgtccttgatttgaaccgacaagaaattacagaattgccagaatctgttggaaaattaaagatgctccgatacttgaacctatcaggcactgttgtaagaaagctgccttcatcaattggtaagctctattgcttgcaaacacttaagttacgaaactgcctcgcataatcttgtaaatctcctatccctcgaagcaagaactgaactgatcactggcatagccagaatagggaaattgacttgccttcaaaagttggaggaatttgttgtccataaggacaaaggatacaaggttagtgaattgaaggctatgaataagatcggaggacatatctgcattaaaaatctagagagcgtgtctagtgcggaagaagcagatgaagcattgctaagtgagaaggcacacatcagcattctagaccttatatggtccagtagcagggattttacttcagaagaagcaaaccaggacatagaaacactcacatccctcgaaccacatgatgaactcaaggagctgacagtcaaggcatttgcaggattcgaatttccacattggataggctctcacatttgcaaactatccatctgtctgactgtacaaattgttcaattctgccagcacttggacagctgcctctactcaaggttataatcattgggggttttcctaccattattaaaattggagatgagttttcaggtagtagtgaagttaaggggtttccgtcactgaaagaacttgtatttgaagacacgcctaatctcgaaaggtggacttccacacaagatggtgagtttcttccattccttagagaacttcaagtgcttgactgtcccaaagtaacagaattgccacttctcccatcaacactagtggaactgaaaatttctgaggcaggcttttctgtacttcctgaagttcatgctccaagatttctaccatcattgacacgcctacagattcacaaatgccccaatctcacatccttgcagcaaggattgcttagtcagcaattatcagccctccagcaactaaccatcactaactgtccagaactaattcaccccccaactgaaggattacgaactttaactgctcttcagagtcttcacatttatgattgtccaaggctggcaacagcagaacatcgtggcttactacctcgcatgattgaagatctacgcatcacctcatgctccaacataatcaatcctcttcttgatgaacttaatgagctctttgctctcaagaatcttgtcattgcggattgcgttagccttaatacttttccagaaaagttaccggctaccctcaaaaaattggagatcttcaattgcagtaatctggcctccttgcctgcttgtttacaagaagcctcttgtctaaaaactatgactatcttaaattgtgttagcataaaatgcttgccagcacatggacttccactgtccttagaagaattatacatcaaagagtgcccatttctggcagagaggtgtcaagaaaacagtggagaagattggcctaaaatatctcatatagccatcatagagattgacgatgatagtgccatgccagataggagcataaggagaagattatgctaaaagcttcttagcaactcaacaaaaagggtatgaattaattgccttctctagtttcttttgtctaaatataatagataaggctggctgtgaacatcatactcaaacctattctctgcaggtgcaattggtatatattcagtttattatctccagtgcaaagttctattttaacataattactaacatttatcagatacagaagtaatacactcgaaatgtaaaaactatggtaaacaactgtagcgatagagtacagttaagattgagtgatttccaccaaacagaaaacaacagaaaagaataaaagaaataacgggacaaagaatttcagtactaacaatgtaactaaaaggaaccaggaaggagagcatgtatatctcttttatgatagaagaattttggagcatgacatatgtaaacagttttttgtccacaagaaatgaaattcagattgtcatggtcaacacttatatcttcatattacaaactaaaaatttgaagcagtttcatcggttctgataggaagaagtttgacgagcatgcaaaaatgaatgcataataacagttcatttggtcagttgtgttatgcagaacagttaatatcattgccttttaggtggaaacatctacaccccccgtcccccccaaaagaaaaccctcttctgggcctatgtccatattcaaacccatggagtgggtgttttttgggacagagggagtataaattaaaaatgctatattacaatcaccatttgatgagaaaactatagtcaaatggtatgcgttactcatctgttcgcctttatgttggaccattttggtttggtgccaattcttgccctaccaattctttggtagttttgaatagtgcatgttagcattttggattggagccaaattttgccaaatcaatagagtggagccaaatctatactataaaaaaaattttgccgggtcggccaaaggttggccgaccaatttcattaagattggggagaaaaacaaaggaatgttacagcgacattacaatgtcgcgctagtccgggagagatcccagacacagcgtgaacaaacgaaggagaaagagacaatacaacaacgattactcgctgaattgggagaagatcccagctaccctccacaccacgatttcttcttttatattctcggctacttactataaaaaatttggtagtgccaaaatatgcccaaggtttggtactaccaatattttggtagggtttcaaaccaaacaagcccgttattttcagaactgccatctagattcctcatgcatggcaatgtcagcgtttcaagagaatctcatattctacctgcatcaggatgtgctatgttaatgtgacagagaaggacgaccagacaatcaatcaatacttcaaagaatcaagtcaagtttgaattgattctttctctttagatggtctgggacactgagtcttttgttacagatttcccaaaattgaactgaagaaatcaatgaagactgaattcttgcttctatttatgtctatcaagccatattcgaaggtccaaaattgaccagttaccactccagaagaatgtataataatcttcttatcaaagtttggttatcacctaatatagttcaactaggcatatgcttatccattcaaaagggaaagaaaactaagcatggtccaatgttcacctttacgtttccttttcctgaccaactgtattacacagcctatcccataatatttctctaggtctgttatgattggggcatttcaaaattaagtaattttccaaaataaaactatgaacatcagtacaacgataccatatatgtatagcacaatatacggtgatcaaatctcagaggcgctttctctgacctaattagaaaaacccgactagtaaaaatccacgaacttacagccaaaaaaaacgaaggacgcgttgtagattcgctccacacacacactcgctatatctctcctcccccttccacgtctccggttcgcggagatacgaaccggcggtagccccgcgccgcggcggcggcgccgccgccgccgaagccgccgcaagccgagaatttcccccggagaagtagaatgatgaggcccaaatttagattgatactgtagattcgatctctatcgggcctggatgcacggcccaccaaatctaccatatgggctgggtatgggccttgaacgaatgctgcccggaacaaattttatttgttcatttcagtgtaaaaatacttatggccccagcacagcctgacaattcgaatttccgtgttgggtttggaatttggagagggacttgattttttttctgcgaaaacaacatggactacttgaattacctttcattctttgcaatagactgttgttatttgcacatatgtttactgacctcatatacttgatcagtttgaacaatggcatctttctatttccatagcctctgattctagtgacaatcaaagggcaaactaggtcaaaaggtatctgatggctacaccttcaatgcattggttcatgattcattcacctgttacaaatatactcattttgacacacactacgccgtcttgcccaaaatggtgaagctgcaagaaaaagccgtttaaaaaagaaggttatgttcatgaacctaacctgttgcgtggagatccctttaacctttccatttgctcatatgctattccaaacatgttcacaagaattgcactggaactcaaaaattatttatccttttgtcactcaggcatttccaacagcttgagaatagcaggctgaaaattactcaattggagaaggaacttcagccaaattgttcaaaatcagccgtttggtcaacacaagagtgaagtgtcagggtcagggagctgacggtaaagcattttcaggattctactttcccaagtgattaagcacactttctcacttgcaaaatattcacctgtctgactgtacaagttgttcgattctaccagcactagccactaaagtttttcgaagattgggggcttttcctgccattacaaaatcaaccaagagttttcagacagcgatgatgttaaggggtgtccgtcactgcaggaacttatgataatctcaaaagatgggtcttctgttcaagatggccagttgcttccatccatcacaatccaattacaccattgtgttcgttgcaattaaatcttcacaacaagatcttacatgattatattacgataaaaatatttatatttgtaaattacttttattatatactaagttacttttataatatatataagttacttttagatttgactaaattacttctatacattcataatgctctaagttggttatttttattattgttcttagttaattctatattttgtggactttataaatcttctctacactttacttgcgaattcactctacatagtttcttatttcagctcactcacaatataattatttctactacagagagttactcctccgtttcataatgtaagtcattttagtattgcccacatttatatagatattaatgaatctagatatagttctaaattaaagttactttctttttttataagttacttctataatatatgtaaattacttttaagctttactgaatttacttttatatatataagaagtaacttagtgaaatctagaagtaatttagacatatcataaaagtaatttgtgatttttcatcaaaatataatcatgtgagatcttgttgtaaagatttaattgttacgaacacaacggtgtaattggattataaatcggatgagtaatttaagagaaacttctctaagaagaaaaaaatatatagatattgagtgtactagtagcttttttttggatagaatggtgtctctctttagcactatccagctagtactctcggtgtagttacgtcctttaaaaacatgctactctctcaacccaaaatataactctacctttaaacttttgtacaaagttcaaatttcagtgaaaggcaaattaattaattgatgcatgtaagaacaaatttatgaggttacaaaactactttttagaagcccatagtagttcacaatacatattcataccgggaatcctaatgcacgcatgcgcgatggcggaggcggagcaagtagcacagacgagcgcagcctacgtcaccctcaccaagccgctaatctctagcacttagcgctaatcccttttttatgggtaaactattttttaaaaaaataaataattgatataaaatttttaaatatgaattgaaagttgaactgaaagttttcaatttttatttgaacactttcaaattttgagctaaaaatttttaaaactgaatttaaattttaaaattttagttgaaagtttcaagatttaaaatatatatttcagttgaaagttttcaaaaataagttggaagtgagttgaaagttttcaaatatgagtttaaagctttaaattttgaactgaaagttttaaaagttgaattcaaagttttcaaatataagttgaaagtttaaataattggtagagtaaattttaaagtggaagttttatattagaattaaaaaggggaaaaacacaataatagtttgtttgaaaaaagtgttaacgttaataacacggcctaattacgaaaaaaatagaactaataacttgatgtatgcgaaaggaaaaaaaaggccctagcactgcactgcatgtggagtccgaaaataacatgagtggcgccacctggcatcactctctggaacgccatgttagcgtaaatcggcgtgacgagctgtaactaaatcaaaattcacaaaacactataatcttaatggtttctgtcgttatcgatacgtgaccaacaaaatgcccgtgcagtgcggtggataatagcgaggtggatgaagtttaacctcaatgattcatcgaagcacctaagtatgatcataagtatcggtgacatgcacagttatcttaaagatatatttgtgtttggacaactagtccactctaattgtgcggggtgtggatgattatgctaatgaatggtctcgatgatcgtagcattggagaaatggatggccgaacgacgcacctctgcctagaaggcgatgatgaaattttaggagaccattaattattttgaattacatttttatgaaaatcttataatctcttttcacaattgatgattgttacaacagttcattgatataatcacaatgtaatgctctgtaccgactaaaccaaaatagtgccagccggacctaaccattctctttttattttctagaaaacctttacgagtaaaagtcattagcacataattaattaagttttaattattataaacttaaaatatacatttatttggtattttaaattaacttttatatagaaagtttcacgccagtttccgcgtttcttaaaaaataccggtcgatttatttcctagtaaaacacatatccggtttccatgtttttttaaaaaaaaataccggtcggtcactatccttcctgcgtacagtacaaaataatcttattttttgaacggaaaaattcgtcaagtgttgttgttcctttgcctaaacgggcttgcagctgataattatagttacatcgcattaccactcaagaacgcaccagtggtctagtggtagaatagtaccctgccacggtacagacccgggttcgattcccggctggtgcaatttttattttttccctcattgttctttgtttgctgcaagttctcagctcatgatgtttttcattccaatttataggtggcttgtttaaattgcaaagcattgcaagcctgctcatttagtaagctgattattaatcctgaatcacgccaagtcgataaatacgcaacaagagcagagcttacattgcttcagacttttagctccatgttatgtcggattcacgtttagtgtatatattccctccgttttaaaatgtttgacaccgttgactttttagcacgtgtttgaccgttcgttgaataaaatttaagtaattatttattcttttcatatcatttaatttattgttaaatatactttcatgtacacatatagttttacatatatcacaattttttttattcttttcatatcatttgatttattgttaaatatactttcatgtacatatatagttttacatatatcaaaaaaaaatttgaataagactttttagcacgtgtttgaccgttcgttgaataaaatttaagtaattatttattcttttcatatcatttgatttattgttaaatatactttcatgtacacatatagttttacatatatcacaaatttttttattcttttcatatcatttgatttattgttaaatatactttcatgtacacatatagttttacatatatcacaaatttttttgaataagacgaacggtcaaacacgtgctaaaaagtcaacggtgttaaacattttgaaacggagggagtatatccttcatgtatccattcctataatcccatggtacatagcctctccatccatcgggatggttgtggcggtgaacggggttggcgcgacggatctatcggcaatgggatgtcccgtgctagggagggtgatggcggcgatggggggagacacagtggcgtggtagccttactgcccgtcgggttctcttaggttgaggggcgtcggtgctacggtgtttatgtgtgccgacagtggtttagatggtagttatagaagtttggctgtgacaaaagggggcatgtgtaggcacaatcgtgaaatccttactacaacgacatatcgacactacttttgagcgttgagaaccctatattgacgttgttaaggcgtttccctccatcccttgcgggactctctaagtgaaaaccatatccaaaatcccttggatacatggcatagacgctttttggcgttatgtcatcctgaaggcgtttcctaagagatcttgttattgcctcaatttgaccaatgctcttgtgatgggtctctgactctctgtgcatgacaagtggatctttttttctttctccttcattctccctctacgaccattttgttctggtgatgtccgggagatcacaagcgattagttgtttggagttcagcgtgggtgggggggggtcgtcgtggctcctctgtaggtctagcgatgatctgtcacacttagcaacaatcaaattggtgttagttccttcttcaacattgcattgacggtgtttggcacagttattggagtgcttgtttcaaggttcatttaatctcttttacctaaaaaaagggttactttaatcttcacgtttcaaattatccaaacaattcttcaatattcatcatttggctcaatctagtccttggaacttaaaaaatggcatgtggacatgtcacgtcatcctcacatgatccccattattgtcattttcttgttttcttttctttaaaaaatctttatttttcactatggtatatataatggtataatggtcatttaattgttgaccttgcatgtgaggatggtatgacatgcacacttgatttttttatggggacaagtactatattaagctaaaagataaatttaattagagatttgtttaaataatttaagactaaaatgatcttggagtcaaactttaagataagattttatccctcattctaaaataaattaacatattatagaaatagatatatcttagtagtataaatttagatagatattttatttaaatttataatattaaaatatgtcatatcatatactagattaacttattttaagatgaaagaaatacctccgaaggctagtcttatattaatttttctccgtataagatagacgatcctaactcatacagtcgtactacaaccgtatcatactttctgcgttttaaaatatcgttacctaaatttcaattggacactttctagaagccaaaaaatatttgtatccgtgtcaccctctagaggagcagcggaaggttcgcagcccgttcgtgtcgtgtgcacgctgttcgtatccgtatcatatgagctcaagattttatttattttttaaggaacattttatttatttatttaaggtgcagataccaaccgtcgtttgagttcttcaaaactcctgttgcattcagcagaccagataaatttttcttccttcttcaagagctgtgtcattggcttagcaattttagagaagttctcaatgaatcggcggtaatagcccgcaagtcctaagaaactccgaatctgagagactgtcctcggtggggtccacttggtaactgactccacatttgctggatccacagccactccttgagcacttacgacatgaccaagaaactgaactttcttaagccagaagtcacacttgctgaacttggcatatagctggtgctcctttaacttttcaagtaccagccgaagatgctgctcatgttcttcctcggacttggagtagataagtacgtcatcggtgaaaactacgacaaacttgtccagaaattcaataaacaccttgttcatcaaattcatgaagaaggcaggtgcatgtcacgccctgaagtttccccccttttgcttgctttaaaaattggctaaataaatcgtccgaagaaattatcttaattaacctagagctaattccctaattaataaatgcaaataataatcggaatcggcatgtggaatttttcttggattctacatgtcacaatatattaacaggatttttagtggaattttcagagccttggaaataattttaaccaattaaaaatcaccaaagtgcaatttttaaatcccaggaaaatcctttcttttctttttctttttcctgtttcctcctttttcctcttcttgggccgtcggcccagtccacccgtcgcccgcgctcggcctccccttgtgggccggcccgttcccctttcccctccccgaagtcctccctccctccctctctccttcgggcgccgacaggtggggcccacctgtcggtcgtcttcctcctctagccggttggagccgagccccaaccgccggcgccccacctccccacgccgcccgccttctccgtccctctccgcgcccgcacctcgcgcccacgtcgccgcctcttcccccgcatctcccggcccgcgcgcgcgctcgagagggcgggattcgatttcgaatccacctctctcactctccctccactccccacgtcgccggccaaatcggccacctccccggccacgtccgccccctcccgcacctataaatcgctccccgcgtcttcctctctcgtttttcgcactcgccgcgctctcccgtgcctcctatcgcgctcgcgccgcttgttgctagtgccgccgcttgccgccgccttcggccgcgagccgccgccgctagagtcgccgccgcgccaaaccgccgccgccgttagcttcgccgccgcaagagctttcccggccgccgcctcgcgtcgccggaatcccaccggagcacctctcccctcgcgagccggtgagtttttccctcccctccatctccggccgacaattcaagccgccgtggtcgtcgtctcctctcctaacgcctctccatcttctcctagggtgtcgccgccgcccgtccgtgcctccgcgtcgccggtcatcgccgctcgtctcttcccacgccggtcgccgccatcgcctcggtgaggaatcccctttcctccttcctttcctctccccccgtgagcgccgccgccctccgcgcgtgcgccgtcgtcttcggctgccgccgccgccttcgcgccggccgccgccgtctccccgcgccgccggtcaccgccggcggtcgtgcgccgtcgtcgcctcgccatggccggccggcttgagccgtgccgagcatgtcgccgcccactccctcccccttgagccactgcccgtggggcccgcttgccagccgccccctctcccccccttagtgccgctgatcagtggggcccgcctgtcggcgccaccccctcccctcgctgacgtcagccctgggctttattgcgcaataaattgattaaggacttttctttattagtaaaaacacagtttatcttctaaaattcataagtaattcatccgagctccgtttaagtccattcaagtctcagtaaatcaagaaaaatgcaaagaatccattaaaaatggttttgttccctgtttcagtagtcttatagcatgttttgcttgtgtgctttgtttgtcgcgtaggtttcggccgttttgtcgatccacggtttctcgaagacgttgctgaggtctcgtcagtgcgagagcaaggcaagtcatgaaatacgtttgatcatattgtacccaatttacaaatatcccgcatttctattaaatgttgcattcttttacaatgtaatgtgggatgggtcctattcctcagccacatattgtttaccatatgccgttgataacttgggtatcaaaatgactagatgttggtttaggaaatgcttagccatgcttagttcaactagcacacaaatggggatcaccttattacatagactttgtctattggcatagctttagattggtgccaccgcaatggtgttagttaattaaaatacactgaatggtgggctgtgggtgcatggttttgctggtcgcacccatggcagttaaggaccggttcacgggaaaccctgggagacttaccgtgctttccacaagcgggagtgggtaactgcttgatctgaagtatagctcgaccctttcctaggcaccggtggcgagggtgggcgtgatggagttgggtcggccggggtgtccggttgtccagctgccggattcaccgcggcgcaagaggggaccgcccactgccttttgaggggtgggggtgaaaccttagcgtggtgtggatgattaggggagggttatgtggagggtcttgtcacgatttccccctttgcagtatcatggtgatacttcggggcatggcgacatgtgtggaatcgtgtcttgtgggtacagttgtacacctctggccagagtaaaactattcgaatagccgtgcccgcggttatgggcgatcaaccagattcaccgtgattagtctcattcctagtttagcttaatgaactggtgtagttcaggtggttggttgggcctgttgcaacgtggggtagcgttggacagtgtttggttaatattgattaattactacaactgttttactgccttcaactactgtttttaaatgctagctttatgcaaaagaacctctagcctcctttggttatatcctgcatcatacctcctcttccggtatgacttgctgagtacagtgggtagtactcagtcttgctctcttttcccccacaccagagctgaagatcttcctagttggagctgttttgtcaaagttggtttcgtcgctgccgtcaaggattgcctgtggagtggagtcgcccgctgctgaagtcaagcttcccggtttagctcgcttttatcttttccgctgcatttgtaatcttttctatttttgtaagacgtggatctgtatgtcaacaattgtcgtttgtgtaccctggctggtcctggacagggatttaatgcacattcagcttagaaattctggttcgagaatttctgggcgtgacaagttggtatcagagccgaccttgaccgtaggacaagccaactggaaaccctaagagccctctgaacccctttttcatctgcatatgcctttttgcacctggaattgttttgggaaaatttggagttttgcctctttggtttgcgggaaaaatcttggtcgttcattcggatcggattttttttttaaaaaaaaaatgagctcagcctagggctttagaaaaattttagttggagtttattcgatagtcagtcgggaatttattgggggttatgcattaggtcgtgtctatattcgatgggggcaatgttatgcgcatcattttccatgcaactagtctatgcattaatttattgtttagttgcattagtgtctttatttgagttcatgaaaaatgttctatgcataaaaatcatcctgctcggttattgatttgagtcttcttttgctttgtttaatttggatttgagcatgaattggttcctatcccttgtctactttagatgtcagtcctatccctcgtttgcaagcgccgcctcgagcttcagagtcaccgcccttagctttatcgccttcttagtctgtttgcttgctagttttcgtgtttaggtttgatgcttgtgggctagtcggcggtcgatatcatgtgtcagtggtatgactgcctcaattaggagttgcgtgcctctttttcagtgttttaatcaagattaagataattgcacttaaattcataagaaagattagtttctgagccccctgtttttcttccttttctcatatttctacctatccccttcagatggagacaaggaatggttcacgcgactcgaacaacgccagtggcagcgaaaagccgatcaatggagcacgtgccaacagtgcatctgacaacagtccgtccccaccgcccgagaacccaacaattgctcaggtgttggacaatcagactcagatgatgacaatgatgatgcaacagatgcagcaacagtaccatcaggtgttgcaacaggtgcagcagcaagcacagctgcagcagcagaacctgcagtttggttctccacctcctcagtccaaactgctagaatttcttcgtgtcaagccgcccaccttctcaagcaccaccaacccaatcgaggcccacgactggcttcatgccattgagaagaagctgaatcttttgcaatgcaacgagcaagagaaggttgcttttgctacacaccagctgcaaggtcccgcttctatttggtgggacaactacatggtgacccgtccagctggggcagaggttacttggacagagtttcgtcatagtttcaataaagcacaggttcccgagggaattgtggcacaaaagaagagagagttccgttccctgcaacaaggaaccagaacagttatagagtatttgcatgagttcaacctcctcgcgcgctacgcccctgaggacgtgcgtaccgatgccgagaggcaggagaagtttttgtctggtcttgatgatgaattgactaaccagttgatctctagagattatgaggactttgagaagctggtggataaggctatccgtcaggaggagcactgtaacaaaataaaccgtaagaggaaggcagctcagttcaggactccccaggggaagagtcagaagcctcgtttcacgatgggacgtcacggtggaccttccaccatgattatccgacagcaccgtccctaccacccgggtagcttcaacaagaaccaccataatggcagtcacaacaacagtgagcagcacagtctcaaccctactccgagttcactaaagattccagctcaatcagttcagccagctctgccagaacagcccaagaggttgggagaaaaacccgaactctgcttcaattgtaacaaacccggacacacggttggaaagtgcccgaagccaagacgtgctggacccaagttcgttcaggcccgtgttaatcatgcatctgcagaggaggcgcagtcagcaccagaggttatattgggcacattccccgtcaactcgacaccggcagtaatattgtttgattctggtgcaacccattccttcatttccaagcgttttgctggtgcacatgggttatccttagtgaagcttaagataccaatgcgagtgcatactcctggaggtggcatgaccacaactcactactgcccatctgtgacagttgaaattcaagggttgatttttccagccaacctcattcttctcgaatccaaggacctagatgtcatacttggaatggattggttaacaaggcacagaggagtgattgattgcgccagccgcaccatcaagttaaccaatgcaaaaggagaggtggtaaccttccagtctctagtgccgcggaagccagggatcagtttaaaccaggctgctggtgaagaacaagaggtagcagtggagaaaaccactaagaagctggaggatattcccatagtcagagagtatccagaggtttttccggacgatctgacaacaatgccaccaaaaagggatatcgagttccggattgacttggtacctggaactgcaccgatccacaagaggccttacagaatgggagccagcgagttggcggaagtcaagaagcaagtcgatgagcagttacagaagggatacatccgcccgagcacgtcgccttggggtgctccggttatctttgtggagaagaaagacaaaaccaagaggatgtgcgttgactaccgcgcactcaatgaggtcaccatcaagaacaagtatcctttgccaaggattgatgacctgtttgatcagttgaaaggagttactgtgttctctaagatagacctgcgatcaggctatcaccagttgaggatccgcgaagaggatattccaaagacagcattcatcactcggtacgggttgttcgaatgcacagttatgtctttcggactcactaatgcacctgccttcttcatgaatttgatgaacaaggtgtttatggaatttctagacaagtttgtcgtggttttcatcgatgacatacttatctactccaagtccgaggaagaacatgagcagcatcttcggctggtacttgaaaagttaaaagagcaccagctatatgccaagttcagcaagtgcgacttctggcttaaggaagttcagtttctcggtcacatcgtgaatgctcaaggagtagctgtggatccagcaaatgtggagtcagttaccaaatggaccccaccaaggacagtcactcaggttcggagtttcttaggacttgcgggctattaccgccggttcattgagaacttctctaaaattgctaagccaatgacacagctattgaagaaggaagaaaagtttatctggtctgctgaatgcaataggagttttgaagaactcaaacgacggttggtgtctgcaccagtcttaatcctgcctgatcagacgaaagatttccaggtctattgtgatgcatctcgccaggggctaggatgtgtgttgatgcaggatggcaaagtggtttcttatgcttcacggcagttgcgtcctcatgaaggcaactacccgacgcatgatctggaattagccgcagttgttcatgctttaaagatttggcggcactatctcatcggtaaccgttgtgaggtatatacagatcacaaaagtctaaagtacatcttcacccaacctgatctgaatctccgacagcgaagatggttggagctaattaaagattatgatatgggaatacattatcatcccggcaaggctaatgtggttgcggatgccttgagcaggaagagctactgcaatgttgcatgggtagagcaactatgtggtgaggttcaacgcgatttggaacatctgaaccttggtatagttgagcacggattcgtggctgccctagaggcacagcccacgctggtggagcaggttcgcatagctcaggcaagtgatcctgaaatagcagagctcaaaaagaacatgagggttggaaaagcccgaggttttgttgaggatgaacaaggaacaatctggatgggagaaagattgtgtgtacccgaaaacaaggaattaaaagacctgatactaaccgaggctcatcaaactcaatattccattcatcccggtagtactaagatgtaccaagacctcaaagaaaagttctggtgggtcagcatgagaagggaaatagctgagttcgtagcactctgtgacgtctgtcaacgagtaaaggcagaacaccaaaggccagcaggtttgctacagccacttcagattccagaatggaagtgggaagaaatcggaatggatttcatcaccggtttgccaggacgtcatcggggcatgattctatttgggtagtcgttgaccgactcaccaaagtggctcacttcattccggtgcacactacctactcagggaagaaattagcagaactctatctatcaagaatcatgtgtttacatggtgtacctaagaagatcgtgtctgatcgaggaagccaattcacttcaaagttctggcagaaattacaagaagaattgggaacccggttgaatttcagcaccgcttaccatccacaaacagatggccagaccgagcgagtcaatcaaatactagaggatatgttgagagcctgtgcgcttgactttggtggggcatgggacaaaagcttgccgtatgctgagttctcgtacaacaacagttaccaagctagtctgcagatggcaccatttgaagcactgtatggacggaggtgtcgtactccgctcttctgggatcagacaggggaacgccagttgtttggtacagaagttttaaatgaggcagaagagaaagtcagagctgttagggaaagattgagaatcgcgcaatctcggcagaaaagctatgcagacaaccgccgaagggagctcgttttccaagtaggggattatgtgtatctccgtgtcactccgctcaggggagtacaccgcttccaaaccaaaggaaagttggcaccacgctttgtgggaccatatcggattttggaacgcaggggtgaagttgcttaccagcttgagcttccctccaacatgcttggcatccataatgtgttccacgtctctcagttgaagaaatgtttgagagttcctgaggaacaggcaagtccggatcaaatcgaaatccaggaagacttgacgtatgtggagaagccaactcgtatcctcgaaaccagcgagagaaagaccagaaacaaagtaataagattctgcaaggttcagtggagccaccactcagaggaagaggccacttgggaaagagaagatgagttgaaggccacccacccgcacctcttcgccagctcttccgaatctcggggtcgagattccgtttaaggggggtaggtttgtcacgccctgaagtttccccccttttgcttgctttaaaaattggctaaataaatcgtccgaagaaattatcttaattaacctagagctaattccctaattaataaatgcaaataataatcggaatcggcatgtggaatttttcttggattctacatgtcacaatatattaacaggatttttagtggaattttcagagccttggaaataattttaaccaattaaaaatcaccaaagtgcaattttaaatcccaggaaaatcctttcttttctttttctttttcctgtttcctcctttttcctcttcttgggccgtcggcccagtccacccgtcgcccgcgctcggcctccccttgtgggccggcccgttccccttt

SEQ ID NO: 6515 - DNA, 16463 bp, Oryza sativa
ccccccccaaaaccaaacggaggcgagctcgccgccgttcaccgccgccgccgctgccatggacgtcgcgtcgctgctcccgttcgcgctggcgctggtggcgatcccgatctcgctggcgctgctggaccggctgcggctggggcggatcccgccggggccgcggccgtggccgatggtggggaacctgtggcagatcaagccggtgcggtgccgcggcttcctggagtgggcggagaggtacggcccgatcgtgtcggtgtggttcggctcgtcgctgaacgtggtggtgtcgacgtcggagctcgccaaggaggtgctcaaggagaacgaccagctgctcgccgaccggccgcgcaaccgctccacgcagcgcttcagccgcaacgggatggacctgatctgggcggactacggcccgcactacatcaaggtgcgcaagctctgcaacctcgagctcttcacccccaagcgcctcgaggccctccgccccatccgcgaggacgaggtcaccgccatggtcgagtccgtccaccgcgccgtcacccagccaggtaaagcttcaagaattttagtgttctttgtgtaattttgagcaaggagagggtgcttggtgcaaacgtggttggtatgagtttggtggttgtggcgtccttgtgtttggtgacgaattgttatgtcgtgttgactctcatgtgtcagctaaattgtgctgccttagatcagcgattgccgattggtactactagttgttttgcaggcttattggtgctcaatttgcatcgctccttgagggaaatggccaaggcgtggtctgccatttcgtaggcttcgctacgatatgctgtgcggatttggtagtggatcctagaggaaatgctagctattggtttgatctggtgggataataaactaataagaggagttgaactgcctcgagtgagtgggtgcatttctctgagatggatcacatggtgagcacgttgttagagagccaagctaagattttacttgctgaattgaaaatgtaggtaccatgaaactaggtagtgatcatactctgcccagctgtactgctgtagtgtgctgactgctgagagaccttggccctggggattattggttatgagctatggttcatgtcaagcagatatcgtaattggtatagttatagtaaagtgggcttcgtatgacttccagtatacacggggttggtaatcacatgctattttaagcttaagtgaagacagtttggtgctttctgcattattgttcattaaggcacttcacacctctctagtggacaagaattacgctattccctttttggtatataagtttgctctgttgttggcatgctattttagctcctcacatgataagtactctacttgctgtaatgtgacaccttgctagttgaaacaatactatgctgtttaagcttcttactggtatgccaagcattctcttgtgatgttatgttgtaccagtttgacagtcaaaaaaaacatgtttggcaacaaccttgtttgaactggttggaagtcttttttttttcttctaagatgtttgtacattttgatagcattggagtttttacagactaaaattaatgagctgctattatgtactttgcccatctgtctcaactgtgctgacagttgatacagcttatcagcgactcttttcaacttatttctgactttgcaaccaattttatgttccatttgtgttgctgtttcaatgtagtcctcaacattgacctagccttctctctattttccaatttagtttacaagaattaagccaggctgtttagaaaaatgaatgaatttagctttatttatactctgttggaaaaaaattttggcctacaaatgcatcctatgaatacctggtgtcaaactgtcaattgcaaatcgatccactagctgatttgtttacatgtgtacataagttagcaaagcttttttttttgttggcctaaagccatgatgggttacctcaagaaaaaagaaaaagaagtatattgtgcacgacatacaataatggaacaattacctagcacggtaagagtctatttgcattggaatgaagtttttaactaacagtcattttatcgatgtgctgttttcaggtagtgaacataaaccaatcgtagtgaggaatcaccttgctatggtggccttcaacaatataacaaggctagctttcggcaagaggttcatgaatgcaaatggtgacattgatgaacaagggcgtgagtttaagactattgtcaacaatggaatcaagatcggtgcatctctttctgttgctgagtacatttggtatttgaggtggttgtgtccacttaacgaggagctttacaagacccacaacgagagaagggatcggctgaccaagaagatcatagatgagcatgcgaaggccctcaaggagagtggtgccaagcagcactttgtggatgctctgttcactctcagagaacagtatgaccttagtgacgacacagttattgggcttctatgggtatgttggatgttcctttcatacttatcagtatctatcctttttgtcatccaatttcagatatgataccctactggactattaatatcaatgctctcccaattacttttacattatttgcacacatgttaaatatcatctctcaaagtcatggagaattttttccactctagtcagatttggtacatagtttgtgtggcatgtcactatcttagggttggtgaagtatggtggtatttggaaaagtttctgtttactttctagttggaagttaggttgtgttttatggtttcaatcatctacctactaaaaatgcgagaaagttggaaaggttagaccacttagctagtggcaactaccaaaagctttcaatggatgcctctgcatgcatttccctatcttgcatcgcacatggataatttgcatatcaagtttgttcagactaggaaatgaataccataataatggaagataaaaaacaaaatcccgataattgtcatgtgcctgaattttctgtcctgctaactccattacatttgtgagttcttaccatccctgttatgttccttgtgttcaggacatgatcactgctggaatggacaccacagtgatatcagtcgagtgggcaatggcagagctggtcaggaaccccagggtgcagaagaagctgcaggaggagctggaccgcgtcgtcggccgcgaccgcgtcatgtcggagaccgacttccagagcctcccttacctgaacgccgtcgtcaaggagtcgctccggctgcacccgccgacgccgctgatgctcccgcacaaggccagcacgaacgtcaagatcggcgggtacaacatccccaagggcgccaacgtgatggtgaacgtgtgggcgatcgccagggaccccaaggtgtggagcaacccgctggagtacaggccggagcggttcatcgaggagaacatcgacatcaagggcagcgacttcagggtgctccccttcggcgccggccgccgcgtgtgccccggcgcccagctcggcatcaacctcgtcgcctccatgatcgggcacctcctccaccagttcgagtggtctctccccgagggcaccaggccggaggacgtcaacatgatggagtccaacggcgtcgtcacgttcatgagcacgtcgctgcaggtcatcgccaagcccaggctcgacaacccggacctgtacaagaggttccctgtcgagatgtgatcgaacagtttgctttgctgcctgctgctgctggttatacagacagactggagttctgctttcaaagtttcagctattgctcatgatgttgttgttgtaaaatttgaggtgttaattgccttgtgaatgaacgaatcaatcaatctcgtaaagttatcgagagcagatcgacttttgtaatttgtacaatatgactatgtacttaaggtgttttgttcagatagaattttgtaatatgattaacacgacaagcgatgtattttgaggtgtcattaatgaataataataatgtaatgtaatctgcaatttttctttttttttctttctgttctgtttctgttgagaaacaaagaattaagataattatgatgatgataacatgacgtgggggcgaccttatcttgaggcacgtccaaaaacgtctgcggttgttacacctaaacccagataaagcaaagagcccaaaacgagcgaaggacacgagacgcgctcccagccgtcggatccatccggagcccccgaaaacggacggtggatggagacgccagccccctcacgtcacgccacccccccccccccccaccaaactaacgtggggcccacaccatctccgcttcgggggtgtgatggtgtggatggatagaaccaacggctgacgtgtacccgaacgcgcaacgcgggggagtccaagctaacgtgggccccacacccccctttcccctcctcctctctcttcagatccgcgcgctgaggtcactgtagaacacggcggtggacccggtccacgggattaagccggtgtagtgtagacccgtctgggtggggcccacaacattggtggatcggtctatgcaccgggtccacggaacgggtctcgtgtagaggctctctctctctctctctctgggtgggggttgggtttgcttcgctcgcctcgctttgcccgattcggccggggtcagggtcactggccgagcaaattagggtggaaaattttttatttatttatttccgcaaagaaaaaaaagttaaatatccagtaacggaaaccctaatccccaaatcacaaatcgattcgattcgctatttaatgtggtgtggttttcttctccgattcgatgtcctcctccgctccggccccctcatcgatcgagctcgcagccgccgtgttccccgccggggaaggtcgtccttgccgttgggtggtgttcccggcgctggattgacgccatgaggaagaagctggacacccgcttccccgcggtatggttcatatatgcgcggattttttttttcagattagaaattgttgttcaggtgtagatcctgcatgcgtgtatatagattctgcgatcgtgattggtatgtttatttttttcacttttgcctgagatgtgtttgttgcatgcacgcttgttttcggtggttaggttttgctaacaatttgatgcaatgaaattatggtgcatgtcttgcattttatctcccttgttaggcttcgcccatccacatattaggaattattttttgttgtaatttgccggttattttctatgtttgtttgcgagcatgatatatatttttattttgttttaacggtatctttagtgagataagtaatgaaattgcggttttgtgtgggtgtgattctgtatgaaactggcttattcgatacacatatccagaattctggagcctgattggtaattatgatgtgaggtagccagtgagtatttggggattcctaaatccagtactcgtacatttgtcatgtatgaggatgcctgatgtgagaaattttggtttaatttgctgcttatttgcataatttgtaataatagactctgttccatgtggtcccacctccaactgtgatcattaaataaggttatgctcctgagcttcatgggaaaaattagttgcccatatgcattaacattttactaaataatacattatcatgatttgttcaataatacgtcagtctaatcatcactattaatagtaaagaaacgtcaatgtgtgttttacagttctaatgctagtacggaccaccaatcatgtacctcttgatccgaattagatgcttagatccatatatttgatgtaatgtgcatttttccttgcatggatgttccctcattttgttaaagacacatggagtccttaaatagaataaaagtgcactatttatccttttggcctctgcactgtagcaaaatggtatcatgtagaattctactacttgctgcgggtctgctgtacaacaagttgtagctaaatccttatatgcttaaagccatgcattctgaggagatgctttcttaattaacctttgctcttacaaggacatgcagaatcatttctttatatatgttagggctaatgcttataatctcatttaacatgcccttaaggttgacatggtcggagctctttagtatatgttagttgtaattataaaaattgcatgaatcagattcttttattgttaccagtgctctttcagacaatattcttattttgtttgatgtctgtcatgtgttgcagcctcggattaagaaaatcatgcaagcagatgaagatgttggcaagattgctttagctgtacctgttctagtgtgtgagttttccactctgtttaatcttccttttattttattatatagctatttaactctcagtaacttattagtattcggtttagaggctcataattattttcgctacaaactgcactcctttctgccactaagagttaagtagcttatattttagaggccaaaacatatgagccttggagtctatgtaacaggaaatcatgttctgaatgataatcgatcttttcggtttctagattacaaatcatactgcctgcaaagcattattgattgtattagggaagacatagatcaaagctggcaattattgttgattaagggggaggggggcaggcttactaccaaagtatgttaggtcttactttgggctgttgtaatattgaaatcaagtgcatttgtacatgtactgtagacttactccctgtgtcattcacaccatccttaatcatgtaagcccattctccttcaaatttcacattgcatgtcaggtgcactatcaccaccacatctttattttggattcatctctagcgacctagtctacatctctgccatattagaatcaaccgatcctgtatgagcctgcatggccatgttttctttattcccctgatatccacctcgcttttttttttttgcgtgagtcatggtggcagaagttggggagcaatggggttggcattgttggttggataggaagagcagtcagatatgatgggggttgaatttggtgagggtgaggggaactagagaagggagattttggagaagagtgtaggagcgggagaaccggtgtccacatggtgcagcactaaagaacattgaatcaagtggatatattacagacaatttggctttatggcacggtatggattaagtaaaaacatttggatgtgagcccatatttagctttcctggaggaagataaaaaggtaaatgagtgaatgtaaaaaaggataaaatagctccatgcaaaataatatcattgcaaggtatagatttaatttatttgtttgcacttgggtgctttcttttctcttctgctagcatgcttctttgttttcttcgattgatatatctctaacgttggcataagattggcaccatccatagctaagcatattctgcactttgacacgttggcaagcatattttccgtttccatctgatttgatttaacttattatgatttgttttattaatgtatgatgtgatctttcaggctttcactttacatatatttcattattgtccattgttgcagcaaaagcattggaattatttctgcaagacttgtgtaataggacatatgacattacagtgcaaagaggggtcaagactctgagttcttcccatttgtaagttttgttgacctttccatgttttttttttctgagtcaatggagctataggtggaatctaacgactctttattaggatgcctgagaacctttttttccttgtcattaggtttttgttaatcataggttgttctttcaagctatctactcgtcatgctcttttgcaagtttctgagttgtgtgctgttgtcataatctgttcctgtaccttgatcctagaatgcatttttaagcatgtgttgttgtcagatcatgaaatccagtattttgcctcctttttttcaggaaacagtgcatacatagttataatgtttacgatttcttgagggatgtcgtcagtaaagttccagacatgggtacatctgatgctggtgttgatgataaacttggcaaaaggaggtaaaaaccttttcatttaatagtgtctgatgttcaaatcaatttttattcagcaagctttaatgagtgctgaaattcatcaggaaaactgctgaagatgacagtgaagaggaatcaaagcggacaagaaatgttagtttctccattatctttacctttatgtggatgttgcacatttcacaatttctgtcccttttgcattcttagtattagtatttgtatcagcacttgaaagaattctttactccagtcattccgttcatacataattaaaacgttcacctttgattttcatctcatttgctaataaggttgtatgcatgcaggaggcagcaagccagacaagcactggtagagggcgtgggaggggtcggggaagaggccgacgtggtgggcgtgtgtctgagagggagattatttccgcttacgaaaaatttgaggagaaccatgagtttcctccaggtcaatttagcaagccttctcagctgaaggtagatgtttcagttgatggtacagatgcaattgaaacaaaggaggctaccccattaagcaacgcaagagcttctctaaggaacattgacttaaacatagagcttactgactatgatgatgagggttcagctccactggaggtccagcctccagctccggcagcaggtgtggttacaacctcttcaggaccacttgtttcggaggtgaacgaagaggcgaagaccaaagactttctaggatggcaattgcctgagctgaccaagatggccatggaccctgttcagtttgccttgtcttcaaaccataggttagaggaggatgaggattatgacaacgaagaatgataacttgccccttttaggttaagaagctgatagatagacatgacttttgtctattgtacatccttgtagcccagcttaactctgtagctgatcttgtataatatgtgtacctgctgaagctgcagtagtttaggatgttacagaggtttatcgatcgatagctagcaactatgttgacagacagattcatcagttgtacatcctatctgatctccagtttatgatagtttgcaatgttcctgtctgtttgtccattgctgtattccctgtgcctactttctcagggtgctgaattttactgaaacagtgagctgcagggctgttgcagccaagactgtttccttctcccaaaggagagtgatacaggtatgatgaaattgtgaaaagtgaaagtgaaaacttattacaatttacaagcaaagcttggccatggccaagaacacaaggagactgcgaaaatgttgtgtattgcactaggaaatacagaagtgatatgtctattatgacccggcaaagcagcaggttttattcatcatattacaccttccagcaagaccagtaacatgttctagtagcagataattggatcactggatggctctgctttaagccgatgattcagcagccggacgatgatctatgtacctgaaattatcagcacctaaattatcagcctcctgccaatgatgacgaaccatttgcaattcgcaaagcacaaagcgcggcgattcattcaagaaacgatcaacgaaagagaggtttgaatttgatgttttacgtttaggcggtggcgtcgtcgaggggcttgaaatcctggagctgcttgaagttctcccacgccctctcccacaccttggcctcgtacagcttattggcgccgccgggttccttcacctcgacggtgaggtagtgcatgaacccgcccaccacctgctgcctcaccttcaccaccctctccaactccaacatcgcgttctgcaattagcttagggggtgcttaggttaagggtgtaaaattttagcatatcacatcaagtattatgtaaggtatcgcatgaggtgttcgggcactaaaaaaaactaattataaaatacgtcagtaaaccagaatttattaagcctaattaatcagtcattagtagatatttacggtcacatggacgaatcatgaagcaattagacttaaaagattcgtctcataaattaatcgcaatctatataattaattattcttttagcctatatttaatactttatatttaatactttattgtaaaatttttacgtggaaactaaacatgcccttattgtattttatatttttaccacaatccacacggcgatccacgcaattaacaaggggaaaaaagaaaggggggcgggtgttcttaaatcttacggccttgctgttgtgctcggcgacggcgaaccgggcgagctcgacggtggtgaggtcgttctcgcgcccggccggcgcgtcgtggatgccgcccaccttcacgccgcgtggctgctgcgcctcctcggccatcgccggcgagccgcgaccggtggagaagaagagggtaacgggaacggcggcgagacgaggacaacgacgacgaccagcagcagcagatgtagtgaacaccgattccgcgaagagagatgatgcccgcatagattgaagcggacgacgggggaagcgggcgatttttatagcgaagcgggaggatttcttttcttttcttcttcgcgttgatttgctcgtgtcgtttcggcgacgatgcgattgcgatcagcgatcgcgacagccacgggaggcaagtgtgatgcgtttctatgcttagcatggaaggcagcgatgaagacgaagtaatgacgcggggcgctatcggtacgtggaagacgggaaggagagtcccgcttcctctatgggcctgcggccctgcgccaatacgcccataaaccattattgctaaaaaaaaagtctacttgcctccctcaaatctgattcatatcctttgatcacaaatgggtataacaacccatccaacggttaaaatgggtataaaatgacgactaggcaaaggtgatattggctgacatggcagtccagtcatcacatttttcctcctccctcccccctcctctctcctccatatttcctctcggttatgacatctcagtagggcagtggcagggaagcagcagggtgacgactggacagcgagcttcggcggtgaacatggccaagttagcatgtcaaaatgcattccaagaggaggggaacttgttgatagaggtagagtaggagtggctggtagtgttggccatgacggctaatcatagcggcgtggaggaagaacaagatggggggaaaaccttctggagcgtggcagtgcatggcgacagttcaaacgacatcaacggtcgccctatcccctccttcacaaatgtggggtggccgccggcgagctgcagttccatcgacccgtcatcgtcgtcgcttctagatctcgcctttattagttgtggaggagggatcatggagtatacatgggtcggtgtggtacgcccctctcctctatgtgctcgtaccccctggccgtcgagccacttcctcgcaacagtggcggccttggcgacaggcaccccaatgcctccatgccgagagcttgggggtgaggccctgcaggctggttcacatgacagcggtgaagattcgtccatcgccagcgaccggagggccttaaggaggcaatagtaggggcgtgtcgttgctgctctgcctcaaggccacgctagttgcccactcgttgagctctcggcatctaccacatggccaccaccgatggaggctactatcccttgcctccaccggcggaggtctgctcgtcgtcatgcgtgctcatgtggggaaaggagaggggcaaaaatgaagagtaaggtaataggatagaagaaggaagagagcatgctgacatgtgggttctacgtgctgattcagctggttgaactaagtcaatgagtcacgttagcgaaaaccacctttaaaacaaactagtgagttattttgtatcttttttaatagttcggaggttaaagatttctctggcattgtggttgagggatataaataagatatacctatatttagggagtcaaagtggacttattctttaccgctataatctatatgcgggacattcagcccactaagaatctattaggccacgccctacggcttcgagcccgcgagcgagcgcttaggccaaattccaacgccgattcgtggacccaaacacgggccccagtgaccaccaacaacaaacccacaagaagcaacgcacgcatggcgtcatctctcgtgctgcggttggactttcacccatccatcaagcgagtcaaggagccaagtggatgcccacgacgacgtcgtcacgtcggtgtctcctcctcctcctcctccatccggcgcgcgcgacgctgtccctacttggctaggagagtatacaacccaacaactcgcccggcggccactcacccccactcaccaaccactcccggcgtcgcgttgagaggcggacgacgacgacgacgactgcgtgcgtacttcgtagccatcgcccatcgcgcggggaagtcgcgatcacgcgcgcccggccactgcaccactactgctactaccgggtctcgacctggccatcccaccgaaccattgtcttctactagtattcaattcttttttctctctcacgcggtcacgcgctcgtgagccgtcacagcttgcttggttttgtgcaggtgcagcctcttcagctttgggttgcagagttgggcacggtagtgtacgtggtgtagctggatggatgggagaagggaatcgttttgagtcggtattatagcgtgacacgcacttccgtggactggactttgtttccgtttcacctttgggggagaaactctcttccttgtagccattggattctgaagagctacggattacggaaggataagatttggaagctaggctgtgttctccagtacactgtacttttctaactcccacagtctctttttccaagtacgcgtttttcaaactgtcgtgtattttttgcagaaacaaagttggtttcaaaaatcatattaattttgttaaagatttttcattgttcatgcagtgaccaagcggtgctgtaacccttaaaaccagtaaggtaatcctaaacggttccatgttagctcaaaatcataggtcacaccattggttcaccgcttttcattttaaaaaagaaaactcaacataaccggtatggcaaaccttgaatggttacattggggatggaaaaacagaacatttatggcatcatgtaatacaaataacggaccgacacaagccacgcaaaacgaaataggctgtgtttagttcagcgcaaagtttggatttttgttgaaattgaagatgatgtgactgaaaagttgtgtgtgcatgacaggttgatgtgatgaaaaatgactgaagtttggatctaaactttagatctaagcacagctatagagagagaatatcagcatcatatgaaagaatcggaacgatcatcatatagctcttaaaaaaattcacaggagaggtagctagtccctctctagacactgtagaaatcttaacatttgctggatgggcaggtgcaggtgtggcaatggcaataccgctctgccccggaaaccatcatgtcagtgtcaaaagtgtcagctaggctggctctcccggaaacgcgtcaaagtgcagcacttttgccccggatggcccgggagaaaccccacaaaaaccgccccgactccaagcaagggatcgatcatccgccgaaccgctaccaaaacgagtcggtgcctgcatcccccccccccccccccccggggggataatttgtcttttctctcggcggctatcttagcaatagcttggcaattatcaacggggttagtacaaaattaagctgcattatagaagctaacaattaattttgtttatcgatcagagtgttgttgatcattgatgcaggtctcatttcggtcgttctcctgacaaagaaagagttgtccttgctgcttatacttgcttagtgcttgatcgcatgaaagagagttttattagagaggtagatgaaaccaagctgtagaccagaaagttggttggcacttcattggtttgacacttgacagagttaggcctaacagtgcagtagagtacatgggaatatttttctttttttgctccaattattgatagagcagtgtgtcaataacattgaagtaatcaagtggcctaatacaaccaaggctttgcgtttctgaacctttgacatgttctacagttaatcacagcagaattgacacttaaatatataactatagatccaccgactgactgaccgattcgttgtgcatcgactgctgcttcctgagagttctcaaaactgatgttattttgacttcgtcacgaattactatgcataagtaagtatttgtaagattgaccttgcagttgcaggtggtgaaagaatcgtagattcgtagtgttgaaatcttcagacatggtagcagtacttgttcagtcttcctcaacgtcgaactttttggaactctacaacataagattctcctgaaaaatacgaataaaaccataccaaaagcgctttatttatcgacccataatggttttcacattacttgatgttcatatgaatgtaaaaatattagtactcctatgcgttactcaactcagttttagccctgcgtaattaacctacatgtcttttttttaagaacaaacctaacatgtcagttcctcttatctctcccgttacatagaaatggaaaaacgattacttgcctaccactctacttttcttccttaagactgtcccatttattttcgaagggcttctgatttcacagcataatgctatgatatatatagcttaacagaaattggcatatgcggaaaatgccgtaatgttaagagagaggagtcatttttaagctgaagtgatgcttgcaaacgttcttatattaagttcttaaccaaaacacgaaactgcgtggttttacaaagtgcatgtttaattatcagcattgactacattggcaaattaactgtatctaattaatactactatctaatattatggttgaagcacaaaaataacaatgtttttaacaaactcagggatgaggcaaaacgaactgcttttttaagaagcatttttctttggaaataggcatgtgcatatataacacagtatgccatcaaacaaaaatggtaagatatattcaaattgactatgtggtatttttcttgagggcttgaccaacaaccgaattctgctggtttaaccaaagtaggaaattattttgtaccacttggattgttgccaatttttctgatgatctgttgggaacaatttggcaccaccaacccagcttgtctgcatgctgcggcctaagcatgcttattggttagtacttagcacatatttatttataacctattatgagctgttcatgtgcaacagtacatgcaaaagtcatcctgcatgtacaatgccaagtttacaacgcagataaatattgctattcctgtgagaattaaagtgcttcatgtaaatttactacaacaatcatatacaaaatcctattattaaaacgaagttcttaattaagatccattcagccttctcaaagacttgcatacaaatctttcccaaaaaaaaaactaccatatgcaggcaataccttttgcaattaatattctttcttcaaatgataagagcacccgcaatggtaaagtaaggtgctatctgttttatacatctcagcaatagactagattaatagtaaatcacttcaatggtatgtctacatgggtatctatagctctctaattcattgcatcgtttttctctatagactatctccaggttagtagatagttttgctccatctcttcatttaatctcttccaagtagaaaaatatgttgacatggatctcttgtagagaacctatagataaccattgtgggtgccctaatatacacgccatattgcacaaaaatatagtatggctttacccttaaaaaaagtataacttctttactccttactccttttaacgtttctggtgatggtgatgatgagtctgcctgatatttggacctcacaaagtggatcgatcccacatagctagtaaaatcaaaatccttcatataaatcactgcaaataacagttcgtatctcgatatactcctagataacagctcaatttgctagcacaacaagaagttaaaagagattcataaaaaaaaatacaaaaaagaaagaacaaaagacaagtcaaagcgtcccgtcaagcccaaattaaataaaaaaaatccccaaccaaagccagtcgattttccacgtggccaacgcgaccagtccaagctccccctccttcacctaaacccc

SEQ ID NO: 6516 - DNA, 45318 bp, Oryza sativa
tgtagcgcgcgtgtcggctagcccgtccgtctgcttgttcttcggaaccccaacttatcatttgtattaaattcctatttgcaataccagattgcttttatcttgttctggcttgtttctacgatttgcttgcaggaatagggttgatatgcaccggcaagatcaacaacccgcggagaggtgtatcgatcgctaaggcgcaacacaacgtctcatacggttgtagtcggatcgtcaacgtttctcccaaatcgtagttatcacaactcaccgaaagatcgggccaacaacagccttgagtgtcgagaggaactcagggttcatcatatctagatgtttgtaagcctgcacagacaagtgataatggaaattacaagatgcaattttcctttgggggaaaaaaaggaatcaacggatttctttgtaaggttggaaattcagtatcacctcttctccggctggttgttggctgctcgacgccttctttctgcatactttgcagctagttccttgtccttctgttttcatccaagatgctaaaagttacaaaactttccaaacagataaatgtatttgcagctaaaatcagaacgataacaggaaatgacctggcttattttgttgaaaaaaggaacacaatttgtgatagagacatttgtgattagaacactaattattttgcaaataatttccgagataactagatacaaattgcaacgagcaatgcgtgaggaaggacatattagctacttcatgaatgaccaatacaacagctaaccgcttagtggaaactgaatgattattcggctacgcatgcttgaaaattagactgaagaaacaagcatatttgtccgtgctaacagtaaccagcagttctgcgttcagtgcctctatagtgcagctgtgagtactttgctaatgccgcacaatgactagcagttcaagatcaaattattagttgctagctgtttcgtgagtaaccaatcagcacctttcaccaattgataactgaaacagtaattagccaattctaatgtagaaaaatgggaataacagtataaaccaatccgattgccaatgtccaaaacaaaatcagattccccagtcaccgatgctcattttaattcaaggaaaaaccgacactttatgggagaaagttagggataatatatatatatatatatatatatatatatatatatatatatatatatatatatatataggacactcatatggggcaccatggtgcccgggcaccatggtttcaaatgcacaaaatcactcaaatttttcaaaattttcaaattatgagtatatacctagttataagaattcgattcatacctatacctatcaacaaaacaactcaaatttaactttatttcacaatccatgattacatacctaactaattatatgtatggatgctatatacctagaatcaaaatctaacaaaaacaagttcaaattcagttcaaacttactttcaactagttagtaaagtagttaatattaatacctaaataattaaaaaagttttatgctcatttgaattgggtatatactcaatttcaacaatggtgcccaggcaccatggagcaccaaacaaatttactatatatatatatatatatatatatatatatatatatatatatatacaccttctttacagtcttgattgccaatgtatcccccattagcattcatagtgttcatgtgatcgatgtacctctcccagtcaaagctaccaggatgggaatacagactattgcactcttcatcagtccagtctgcgaatccgttaggggcgaaagggacatccattggtcttaccgcattagccttgtctgcccttatcgcggtctccttgaatatttcatagcagcgagccttctcctcctcggtgctgtacgaacggttgtgctccttcatccagtcctgaaacctggccttcatggttgcctcatcgaccttcacatcctgctgcttcacagcttcttcccagtcactcacctccttagcagatgcttcctcgtcgtaaggaggcattcccccatgagtgtttgaaagttgacatgatcgagataactagcccactgaactgtgccatctttgtccacaaaccctgccttgatggctgcttccttactcaggtaagggtaaggttccttgacagcccccctgtcacatacatcctctatcccataatataagtcggttaaacttagtacggtctttaaaacaaatctttggattctaatttcttatatatagtataatgtttgtagcaatataaaagtaaactataaccatatgaaattaaattcaaatatcaatccaatgtattattttcagcaaataaaattcataatagttaatcaaatgttttaaaagttgaatcttaaaacgcatgtgtgccttatattatattatgggatttaggcagtaaccccttcctgccttcctcctgcagctggagatgtacatcaacaggtaggtggtggtgggcatggttaggtcacctggatcagagctaactaacgaagagaaatctaaaggcttttgttttgtttttttttcttttttgtcaattcatacctcctgacttgtctgtgctctcgttgaaatacaggattgtggccaatccagccaacgcaatcgtggctacaactccataagcgccaccatcaccaacggcgagatccctctgtatcatacagagatgagaacacatgagctgcgagtgcacacaagaaataaaattttcgatctgagaaccgggtgaaacggacggagatttcaccagggcgcggagagagcgtgctgacctccccgccgtagcctgagtgaagatccccagcgaggactccgcctccgcctgcgcctgcgcgcgtggcgagaatctcctacaggtgagaagggaaccgagggcacggagagacatggtcgccacaggagagctccttcttcctcctcctcctcgatttactcttcgctctccgccgccgccgctcgcctcgtcgcctcgattcgactgtagggtgtgagacggacttcgcttccgatggacggggcttgtatggccgaacagaactggaatccgttatcttaatgagtttgaattgcgtccatgaaccgtgatatataggctgtttttatactgggataaagttttggcgtgtcacattaaatatacggacacatatttaaagtattaaacatagactaataacaaaataaatcacagaatctgcttgtaaactacgagacgaattttattaagcctaattaatccgtcattagcaaatgtttactgtagcaccacattgtcagatcatggagcaattaggcttaaaagattcgtcttgcaatttacacgcaatctgtataattagttatttttttcgtttatttaatactctatgcatatgtccaaatattcgatgtgacatggtgaaaaattttgccagatgatctaaacaaggctatagtataacacggacacccaacttataataagttgccaagcagagcttctagaaagtatatagttctaggttttagctgacatgacaagtcaatatgaaactcaacatgaaccacacatatcagctttctcctctaatcttctctcccattccagctttcttcctcctctttccccctcgctctctttctagtcttcaagggagcggaccagcgggataagggggaggggcaggggagctcgatcctcttctcgcagacgaagaagatagggttcttggtgagacaggtgtaatatggaacgaaacctctggttgagagaacggtacgagtacctacgagtaccgacatacagctgatagcggaatgtgcaagccgcagcacctggggtttgccaaccatggcccccaacaccatggccacagcgtccgctccatcctcacctcgctttttcttttttcaaatttaagttaactctagaatcctagaaagttttaaattttgagttaaaagtttcaaaatttgtgttggaagttttaaaattaaattgaaagcttcaaattaaatataccttttgaagctgaatagatatttctctattagaaatactcatggttggaagttttcaaaatcaagctaaacatttttaaatttccaatagaaactaagtaacaaattagaaattaaatctactatatgacttgattaaacccaaaaaaaaagaaaggtgacttcatgcatgcaggatacgatatcgctaattagcaatcaggcacgcccaccacctcccgcctgatcactatccgtacggtaagaaatacgcgtccatacgtataaaatatactccctccgtcccaaaaaaaaaaaagcaaaccctaagtttccgtgccaacgtttgactgtccgtcttatatgaaatttttttataattagtatgttcattgttgttagatgataaaatatgattaatactttatgtgtgacttatctttttaatttttttcataattttttcaaataagacggacggtcaaacgttagacacggaaaccagggtttgtcttgttttttggaacggagggagtatatataaacattttacgtacatgtataaagtttgtacgactatatatttaaaaaattatatgtcaaaaatgtatacttgtacgaataaatttataatacataaaaattgtaaagatgtgtaaagtttatacataaatgaaaacttggtatataattttgtgtacttatgtatgtataactatgtatatgtacatataaactttgcatttatccaagtataaatacaaagtatataaatacgtgtacatgactgaggaaccgatcccgcgggtgcagctctagttgtcccccctccggaacttgcctctatagtaaaaaaactcgcgctacttgcattgatattaacgagttgttgcttcctcctcgagagagctcaacggcgacgaagcagcgcgacgcgacgcgacgccctgcggtggcgtggcaacaccgcaacaatggcgccgccgccgccgtcgccgccgtgccggccgcgagtcaagcccgagcgcgcccttctgtgcttctccctcctcctcctcctgaccgccaccacggcgaacgccagcatcaccgactgcccaactacaagcagcaccaactccagccatgtcgacgacggtgccttcggggccaacctccgcgctctcctctcctccctttccgcagccgcggcggcatcgtcgtcggggttcgccgagaacgcgaccggcgcggcgccggacacggcgtacggcctcgcgcagtgccgcggcggcatcgtcggcggcggcaatggcaccagctgccgctcctgcctcgacgactcggtgcgggacgcggccaaggcgtgccccggcgagaaatccgccgtgatcatctccgactactgcctcgtccggtactccaacgcgagcttcgccggcgccgccgacgagcggacggtgaagctctggtggaacacggacaacgcgacgcagccggagaggttcaagtcgctgctggggacgctgatgggcaacctcaccgacgcggcggcgcgcgcgtcgtcgccgctgatgttcgcggccggcgagaccgacctcccgcccttcaccaagatctacggcatggcgcagtgcacccgcgacctcgccgccggcgactgctaccgctgcctcgtcggcgccgtcaacaacatcccgaaatgctgcgacgggaagcagggcgggcaggtcatcacgaggagctgctccatccggttcgaggtgtacccgttcttcgacgcccaggccgccaaggcggccatgtcgcctgcgccggcgccggcgccggtgacgacgcccaccggggtcaatggtaagtcaagtcaaaggtctctcccgtgcgcgtttgcacttgcgtcgctttctccacgcgtttgcttgtataggtcgcgaaaagaaaaaagtttagttgtcatattggatatttgatcagatattggaaggagttttcggacacgaatgaaaaaactaatttcacctggaaaccgcgagagcacacgtgggttactatattacttatgactaattatggactaattaggattaaaagatttgtctcgtgatttccccccaactgtgcaattaatttttttaatctatatttaatgcttcatgtatatatctaaagattcgatgtaatgtttttggaaaaaatttatgggaactaaaccaggccttaaccaggccttagtagctggttgcaacttgcaactttctgactctaaattccgaacacttgttctcttcttcaaccgtgttttctccttcaaccttgtcgagtggacagaacaaagtggtttgcacccatagattctgatagtacaatgacttttgtgctctgaatttgtgttttgaccatggtaaaacatgtttatgcaggaagtaatcacacagtcagtaagtctgtgattgtcccagttactgtgggagttgccgtgttactagtggtaatactgctgctaattgccctttgtctgtgcaagaggaacagaaaaccacataagcatatgatgattggaagcgtcggtaagtcctcaaggcttgaaacaactgcattagcattatagcacatctgaagaatatttaagggcttaactcgtcagtttttcctatgaacagatcttggagatgaagacgaaatgagaggctcagaatctctcttgtatgatttgagtactctaagagcagcaactgccaacttctcagaagaaaataagctcggagaaggtggatttggcccagtctacaaagtaagttaagtctgcaacctgacaatcaagttcagttctaattagcctgtaaaagtagctcacagattcatacttgcagttatgcaagcaatgtgatctacattacttgaacttaccgattctgatgctgttgagttcagggtacactgcaaaatggtcaagagattgcagtgaagagattgtcagcaacttcccatcaagggcaattggagatgaagaatgaggtagtcttggttgcaaagcttcagcacaagaatctggtcaggctgctaggatgctgcatcgaagaacgggagaaaatcctagtttatgagttcctctgtaacaaaagcctcgacactatccttttcggtacttcattcagataatctaagcctatttaattttatatatccttgtttagtaagctaatcaacagaatttacatggacaattcagacacttcaagacagcaagaccttaactgggagcaaagattcaagatcattgaagggatcggaagagggcttctttatcttcatgaagattcaaggctcaagatcatccaccgtgatctcaaagctagcaacatcttgttagatgtagacatgaaccccaagatatcagacttcggccttgccaagttatttaacatggaagcgagcgtagcaaacactagcaggattgctggaacctagtaagtgcttcagatattagagtcctctcttgaaaaagtatatctatactaaatgagcactcgaaggaaactcccacgttaacttatgaaagatttgaccattaattagataattgtattatcatgaccatatatcatattaagagtttctgtaaaataaaacaggtggttttaaatcagtgagctcattttagtttttctaaaatatagtaatattttaagaattcggaattgataaatatgaaattgtacccatattgaattctcaatttagtatgtcattgatttaattttaagattcgaaaataataactaagaagttgtaagttgttaatggcatatggtctcttttttcaacttgaatgtcactccctccgtttcatataataagtcgtttggttttttttttctagtcaaagtttttaaaatttgatcaaatttataaaaaaatatatattattattttcaacacaaagcgatcatattattagatttaatgaaactaatttgatattttagatgttgctaaatttttctacaaacttgattaaatttaataaaatttaactatgaaaaaggtcaaacgacttgtaatattgtaatatgtaatatgaaactgatagagtattacattactatcatttggaaatttgagctgagagcattagatatacctcttgttcagcggatacatggcgccggagtacgcgctgcacggcatcttctcggccaaatccgacgtcttcagctacggcgtgctcctcctcgagatcgtcaccggccgccgcaacacctgcctccatgactccgaggatctcctggcatttgtaatccccgcgcaaatcctatctaaagtttaatcacaaacattgcaatctgcaattcgaaagacttttgcatggatatacaaccgtctgagactgattctgctcgccggcgtgcaggtctggaggcactggagccgcggcggcgccggggagctgctcgacggctgccccgccgccggccgccggccgcaggagcttctgcggtgcatccacgtggggctcctctgcgtgcaggaggacccgcagctccgccccggcatggcggcagtcgtcgtcatgctcaacagccgctcggtcacgctgccggcgccctcggcgccggcgttcgtctccgcgagccgtgggatcggcggaagcccgccgccggcggcggcggcgggagatgcgccggcgaggagcacggatcacgaggttcctacggctgctcgatagccgtcgatcaacggcgcttctgtctctgaactagagccccggtgacatcggagattcggaggactgacggctgggcccggcttatgtttctgctctgaatttgaaaatttgttgctcgttttgcattcaaaatttctctcggatttaatgcatttctgtatgccgttcagtgttggagtagttaagtggatatgaaaatgtaatgacggctttgtaatttaaatttttcgacgagcttagcaattcaagtggtttatgtagtacaaatcaactcaactcagtcagaaaaagtagaaatcaaatcccttcccaaattcaaagcacaaatcggctggtattcgtggtagtagacctagtcaaacggcccaaacctcgtcaaatccaggcccaaaagattggcccatgtgttttttacattgaaaacaaatgaaaattgtgccggccaggttggaccagatggcctaaggtctagatagggtgggccgaaacggtctcccgcatcttaaaatttgtgtgaacggacgatttggcatcaaaactgggagtcttaattcagattgcatcaaaataatttattccaaaatttaataatattaaagttttcgtaaattaacaacattgtaaagttttgataggacgaacgatattaccagacaataatatggttcaaaatagtaggggtgggcattcagtatgaccgaaaatttcggtcttgatcttcggtatttcggtgtttgaaaagtgaatactgaatctcaacgcgaaaatatcaggaccgataaattcggtctcggtcttgaccgaaattcaacaacattttcatatatgcaaagaaataatgaaaattttcaacacaaaaatcacaaaaaaaatttgtaaacacgtatgagtaaagactcttattaggttgcatgcctataagaagtagagatgtgaaaattagagtttaatcctattgaacttagtggattgtaggttgcatctagatttttttttttgttaaatcggtcttttcagataaccgaggagactaaccgaattaacctaacaaaattcgatctttcacttcctaggaccgaattaatgaccgattttctctgtctcggtattttcggttcggttttttctgtccacccctacaaaatagcatcaatctaatcccaaaacctaaacacaccagccaatgacacacctgccccacccaacatataagcagcagtaccgaacgaaagctaaagaagtccacaccgcgtcaatcgccccaacaaactcgtaaaataaccaatcaattcaacagcttcctggaatctgaagaacaaaagttgtagaagagcacacagcgattctgacgaggaccaaggtcgatctctagaaaatctgtgctcttctgcgcgctagctagtgtagtgctgtgcaattgcatatgggcgggatggcgcaggctacagatgagtcgccacctggcaattttcctcttctttctctgattatctcgtacgttggaccgatcgacgagtggttccagccttccagaaatcaagcacggcgacaactaatatagctgtcgaggaatcggtcctgtattattcacttcggtttttaatctagacgctctgatggattgattaactgcgtacgtggttcaaactctactgttgatttgcaccataagagacgtgtgctttagagtactactctttggtttccttcaagtcacgaccagttcgttatctttgcccgatcattttgcctttctgctcggttattcgtaacgcgtcgacataagtatatctgattcgtaactgtctccatctttcgttacatgtaaacgaaaagaaaactgatagcctatcatgcgcgccaagctatggcttacctaagccaacgcacgcagccaccccctaccaaacagaagcttctctctccctggcaccacaactaaaagcaggtacaatagcagactataaaccagctataaacatatttcgatgagataaaagagaagagagagtagcaacgagctatagatttgtagccagctgcagcacggactccaagatacatgtgtgtatgacaggtgagaccatatattaattatgtagtatatgtttatagctaactattgtacaaattagctattaagttggctatagatgatttggagccggcagttggctatactattaaacttgctctaagagcaggtacaataacatgctataattaagttagctaaaagcatatgttaataagataagagaagcggactatagatttatagtcagctgcaagcctatagcacggactttaagacgctgtacgtgtaattaataatgatgtagttaacgattgtataaattaactattagattgactgtagatgatttacggctagtagttgattaaacttgctctaaacaacgggagaagccttctagatcatcgtgttgaaaaaaaatggcaacagccaacgcccaacggaaccgcccaagcccacacgtcgcgtttacctctccagcacggtcactggcatgtgggcccatgagaaagtgggacccacatgtcaatctgtgtccgccccactaccgcctctacaaaagcagagcgcgcgcggcggcggcagcggcagcagcagcagcaaatcgatcgttgtcgtgtctcgcgagatggaggcgctcgccggcgggaggccgctgtcgggacgggcgcggcaggtcggccggagcagggaggaggagctgctcggcctcctctccgacttctccggcgacagcggcgagttcggccgcgagctgtcgttcagtgacctcgtcgtagtcgaggacacggcgaacaaccccagcccgagaggaggcgatggtggtggtgacagggcagctccgacggcggcggcggcggagaacggccaggcgaggccgtcgtcgtcgtccgagcaggaggaggcggcggaggcggcgtcgaggcggcagcagcagcagcaggcggcggcggcggcgagggagaggaggctgcggagacggcggagcgacagcaggggaagctgcgggggcagcggcgacggcgtgctgctcaacttctacgtgccgggcctgctcaccaggagcatgacgacgccgcggcccgccgcccgaggcacgcttcccggcgccgccgcggccgcggccgcgccggcgacggcggctgccggcaaagctaggtgagtggctgtacactgtacacggcggaatttccggcatggatgcagacatgcagggatacgtagctatacatatacggtgaagtattaattatcttggaaagcaaattttgcatcattggtggttggtatcatataggagtatacatgtcaattaacagagtcaatcatgcagtctgatgaccctagcaacaggagtcaaattaactcttaatcatcttgaaatctttctccaattatgagattataatcatcatgtagtagctgtagattttgctagtgaggccaattattccacatttactacaactgcattagatccaactcttttcttctttctttttgatctgcattagatccaactctacttatattgtaagacgattacattctttgtggaaactacatgtgtcatctagtcaccgtgttctttccaaattccagcacagatcagtcatagcccctatagaaaatccagtgcatgggttgtaccattctttttaagtgaaacagcactaaaaggagtaatcagtgcatgctcctttttttttctttgtcagcatcaatttcttttacaattccaagcaacactacagtccttttagaccacatgaccctaaacatcctttttgacttagccagcttactgagtcaaaaatatcgatcaattcgtcaccaggaaatcaatgaaacatgggtcaggggatgacaatctgaccaaagcatccacaggatttatttgactaaaatgtgttaatttttttctagcataaataaattactatcttagtatttcagatgctggactgacaggcaatatcactgtagtaattaatggttggccagtagagtagcatgcatgatataacaaccaccttaaaattctgaatttttagacgatggaagcaacttctgagcctgaaatctgaattttatctgaactttcaggatggatgcgcctctggccgtcggatgctggccggcgttgtggggcggcggcggccgccgcgaccgccgcaagccggcgaaaccggccgccgggagacgggacaccagagtggtgacagtatgagccaagcataatcgatctactccttctattactactagcagagcagctagctttgcttaatggctttagacttcagttgagatgttcctttcctctttgtaaatattcctctactcgtttttttgtagaccgtgacactgggtgggtcggttcgtgtggacagtgagtgaagtttattggaaatttgggatgatcgtgacgtgtcaactgcaggggtagtacggttttgtgcctggattcacggcttcttcttacccgttttccatcagcgtattgcacaagtgatgacagtacatagttgagagaaaaacgtggcaaggcctctgcatctaccttgagcatttccaaaaatgctaacatttaaatctaaaaatgttagtattagggtcatataaaaattgggcaaataaattaccccgccctctaacaacgtctctaaatttggttttttaaacggcacatcattcgtgtggagggcacaacactaagaacatgggattgagattccgtgacttagtcattccctaatatccgtgttttttttctctgacttaagtcgtataattttgagtcactgacatatggattctctttgttgtggactcacttgccaatgaccttagagcatgagacagtgtcggtttctcgtgcgtacgctcactattgggggcatccatccctacctcaaatctggcttaatgatttggttaaattgaaaatacaaataatttgggatattttttcgccaacacagaaaatttgggactggatttaggcatttgttggagaggtgattttggccttaattcacaacaattataaaactgcgaaagatgcttagacctccctgggaaatgctctcatagaaaaaaagaagagttttaataagatcgttagaaaacagaagcagcttttctctcgagttcaatgcgtgatgttgtcgtgtgaaaaccgaaaaccgaatgtgagtgtgggagtgagtgagtcaccgaggaaacgggtccctgcgagtgggactgagttaaagctggcacgacacgacaccacacgacaccagcgatcgctgtagcgtgcgccgcattccgccggttttgcagggacagccacgtccaaattcgaagctgaaatcagggaagaataaagttgtataggagaggcgcacacgggccaatttcggcggcaccacgcgccctcacaaatttggcaggcagcccatcgaatcggcatgggccatggccctcccgttcccggtgccccgcggcgcgcattgggccgtgacttccaccgcgcacgttttggtgggcttcactggtgaaatggcccgcgttgaacagccccgcgcccccgcgccgtacaatgcagcatttctgaggaagaagttaaccttggcaacggtattttctctctcccccaaaataggtgaagttttaaacttttacatatgtattagtaaaatagatataattaaataggaaaatgatatgactggtcaagaaaatgaagtagaataagaatttgaatgatataagattgtaattggttgagaagaaaatgcatacgacgaaaagctcagattcacatttggacatagctggcactgtggtaacacattcacacggtaatcacagagatagagctggtacacatatgtactgctcctaattaagtaattactaccaggctaacactgtctttcagtagcaaacaaagcttaaacacagtactacagtacttgccatggatgaccccgccgccgaacacttgcccgtaataccagtccccaacggctagtttcaaccgttcactccgcccgcgtccgatcccagccgttgaatccacgccgcgccatcccggccgtcgatcctctcgaccgttggaggcgtcgccctccgctccggataaagctcgagccccccaccgcgccgctcctcccacgccaacgcatctccgcgtctctcctctccgatccaagcaaatcaagcaagaacaagaaattttagagagagagttggaagagcgaagagagaagaggaggaggagaggacggccgcctgcttcggtccgggagggagttcgccggagttcttggcgttcttggagcccggaggaggaggaggaggagcaacaggaggccgtacgcatggcgacgaggcaccagcgcgcggctgccgctccgcagccggcgaacagaggtgagcggcggtggctttgttctgtgttcttgatttgggttctttggggggacttgcctgaacttggggttctttggggttccaagctacggatttttctgtttgatgttccgaatctgtacgattcaagcggaaaattttgagttcttggtagtcgagtcttgcttggtgagagttccaggtctgttcgaatcctttttcaagaacggatttatgttgcgagggccaactgattccagtttccatcctttcttgcccgattcatgcaccaagaacggatttttgatgctgcccttcctgtgtttgattaggttttcttgatctgcttgtttcgatttatccccgtgtaaacgcaacccctgttgctaatcttcttctccggcgaatgggcaggtgctgcagtcgcagcggggaagcagaaggccgccgccaccgccgccgccggccgacctggtgcgagaaaccggcaagccctcggcgatatcggcaacgtcctgaacgcccatgtggtcgacgggtaaggagcagcacgacatcatcgtcgccaaccttccccgattcgttcttcctctcgtttccttctctgaaaacctcgtgttcttcttgcaacagcaagatccagctgccggaggggatcaatcgcccaatcaccaggagcttcggcgcccagcttctaaagaaagctcaggagaacgccgttgcggcgaacaaggtacggagtgagacacaccccccttctgtttctcgtgttcttcttgcgaattcagagcggttgatttgatccctgatttttgattttggtcgcagattgtcgtgcagaatccggccaggaaggagccagctccgaagccggcaaagaaggtcgtaccccgtccggagaacgccgccaaggccagcaccggcgccggcgtcaacgagaacaagaagccgtcggagtcggagggcgccggcagcagcagcggcggttcagccctcaagtactccaggaagaaggtcgtgaacacgcttacatctgtgcttactgctcgttccaaggtgagtgatcgatcgaacacctgtgcttgcctgcttatttctgcataattgcactgtagctgaatctgaattcgatgttgttaatggcagcacgcgtgtggcattactgagaagccaaaagaagtcgtcgaggacatcgacaagctcgacggcgacaaccagctcgccgtggtggagtacatcgaggacatctacaacttctacaggacagcccaggtaaacctcagattcttccatcttcgtttcagtgaagctttcctcttcagatttgttcagaaactgacagtgttgttcttgcacagctggagcgccggccgacagactacatgagcagccaggtcgaggtgaaccccaagatgagggccatcctggcagactggatcatcgatgtgcactacaaattcgagctgatgccggagaccctctacctcaccatgtacgtcatcgaccggtacctctcgctgcagcccgtgctgcgcagggagctgcagctcgtcggcgtcgcggccatgctcatcgcctccaagtacgaggagatgtgggcgccggaggtaacgcagattcgattgattcaacaagacgaacaagaatcccaatctctgcttcacacttgtgatgtaactgaacaaaactctgcttcgctgcggtgaacggattttttcaggttcaggacctcatccacgtctgtgacaacgcctactcgcggcagcatatcctcgccatggagaagaacatcttgaacaggctgcagtggaacatcaccgttcccacaccttacgtcttcttgctccggttcatcaaggccgccggaggcgacaaggaggtaaaaaaaacaagaagaagaaacaaagaacttgatttcatttctggtgtgccatggaaattgtaactgtattctgatcagagacattgtgtcttttttcagctggagaacatggtgttcttcttctctgagatggcgctgaaggagtacggcatggcgtcgctgtgcccgtcgctggtggccgcgtcggcggtgtacgcggctcaatgtacgctgaagaggagtcccctctggacgagcacgctcaagcaccacaccggtttcaccgaatcacagctcaggtattttttcaactttctgaatttccattttccctgaaacctgaactttctgaacttccgtttttcctgaacctgaagtttctgaacttttcaatgatctgtaaactaacattagttctgattgttgggatgaattgattgattgcagggagtgtgcgaaggtccttgtcaacgctcatgctgccgctcctgagagcaagctgaagacggcatacaggaagtacgcatccgagcagcttgggcgtgtctctctgcgccctccggcagtttgcctagcctaggattagtactgttctggattcggtttagactgtgatggaatgtcgttcttgacagtatttaagattctttcgtgggtttagctaattggatcaagacaacttgagagcgattgttgttgggttttttgcggggttactctgaactctcgagtatactcatgtattcagtactgtgatacaccttggtgtaactactcttcataaattcttttcataagtatgaattgaatgaaaagtattctttttccataattcttttatgtctgccaatttacttgcaaaaagatgtgtgctcaagtataattctgcaatgaaatcaaacttttgaggctactgaaaccaaatgattttataattcttaactctgcaaataagcaaatgtgctgactatggaaggtaagttatatattggttccttttctgaacttgcacagccataaaagtttccaaatcaccatttgaatatctttttttttctcctgtaaatgaactagaagaaactttgctctggaagagaaatctagtactaccagtagcattcaggctgtgtttagatccaaagtttggatccaaacttcaaacttcagttcttttccatcacatcgacttgttatacacacaacttttcagtcacatcatcttcaatttcaaccaaaatccaaactttgcgctgaactaaacacagcctcagtttcaaatagagaacaaactaaaagcttatttcaaataagtggtttcaggcaaacaagtttcagttcttgaactctgaaatgtagttgatcagagacgtcacgtctctgtaggaagaaccaccctcttgaaccgcggcgcgagaggcctctcgcatcagcgaagctctcctcctcatctccttcgcctcttccgccgccgccgcatcggaatccatcaccatcagcctcctcaccgccgcggcgatctcctccctcccgacgacgccgctgcagccgccgccgtccccgttctccctgaggccgtacccgatcctccactcgtcggcgacgagccgggcgacgatcggctggtcgaacgctatggggagcgtcagcatcggcacgccggcgtgcaccgcctccagcgtcgagttcatgccggagtgggtgaagaagccgccgacggaagggtggcacagcaccttcagctggtccgtccacggcaccaccatgccgccgccgccgcggaggatgtctcgcgcgccggagtcgccgcggagcacccacaagaacgtgaccttgctgtcggcgaggccggcggcgatctcgtcgagctgcggccgtgacaccgagaggaagctcccgagggagacgtacagcaccgagcccaccggctgcgcgtccagccacgccatgtatggctcttcttcctcgtcgccggcgtggtgttcgtcagcttggagcgccatgtatgggatgcaagggccagccgagaacgccgggtaagggaggtctcgccggagagcgtccatggcgttgctctcgagctcgtagaaggaggtgaagatgacgcactgtgcttttctggcatgggagtaggcttcgaggatgaggtctaccatgttcttgttcgtgtgtgtgggctcaagatcgctaaacctgatcgatttcagcccaggaatgtagtttccgacctcatcgccatctgcatcggatcgagcaacaaattttcatttgcaacgaaatttacgatctttcatgatgttcagagcttcgtaccggcgatgtcggtggccgtgggcaggcggtcgaagtgatagtgcacggagaacatggtggcgctgagcggcgagaggacgcacaccggcaggcccctccggttgccgacgccgaccgcccacggcagcacgaacgtgtcggccacgatggcggcgggcggcggcggcgccgcgccgagagcgaggcggtcgaggaggcgctcgaacggcgcctccatcctggtgtacacggcccgcacgaacccgagcatgtcgccggcgcggccgtgctcggagggcacgacgttggggatggcctcgaggcggacgccgccctccgccgccgcggccgccgcgccgccgagcaggccgagccactcctcggtgacgacgacggtggcggtgacgccgtcgcgcgcggcgaggatgcggcacaggttcagcatcgcgttgacgtggccgcgccccgggtacggcaccgccacgacgtggcacggcggcggcggctcggccgaagaccccattgcacgcacggcgcggcggcggcggcgaacaagctcggagctgcacaaggttcacgaagtcaaagcgagaagcgaggttctgaacagtgagacatgatccgccatgggagtccgtgacctcggcacccgccgccgcctcgagaatcgtgatgattccaacgctggaatcacgtgtagtaggccaacaaattctggccaacctggagcccaaggccttacttagcctaatgggccggcactgtgggctttcgactggaccataagctttgcgggcattgtgggctttgcttcccaagcttcaacttcagaagagcagtgtttgaagggtttgtacttaaaatgtgtgagttgagtttggacttaaaattttatgaattgatatttatatatattgtacgaatgttgtcaatttattttataatttttaatagctatttatatggttttttaagacatatgagaggacatccctaagggtttaaaagagtttcttgtgtttgaacggtcttcttttttttttctagttaaagagagttttattaatgactgaataatggattatgttcctgatttaagaagtataggattcttgaaggagaacaaagtctccactccgcataaaacctagtactcattgtcagttgagttaaaacatgtgctaccctatttgtttctcttcttatctcgtgcatttgcatctgttagaataggtgttgaatatactagtcctatttggttacagttggacttggaattgtaataggtgttagggggtggagttagagtcgaattctgtaacccggcatctctcttaaatagagaggggggcaccacaatataaccatagcgactacaatgtagcgtagacacgcagggagaggatgtcggcgtggccatggactcgtagcagctaggagctatattggttggggaggagcgcccataatcagagccccggggatgtaggcttcggctgaacctcgttaacaaatatcgtgtgttcctgtgtcgtcatctggcatgtcttgggtgatcaatgattgaagcgatcgggaaggttagtcgttgttccgctatatcgactaacttttataacaagtggtatcagagctgaaggtttcagtattggatcaagaagacatgtggaggaggaaacacgaggcagggatcgcgcatcgacaggagatcgtcagccgtggcgatgagatcgatggcgacaatgaggacattgcggaggcgatgacctcgctcgcgatcagaccggcgatggcggaacgtgaccggaagacggggccgggcgtggccgaaggcgacaggagagattggaggggtagcgccatgtacggcgtgcccgacgcccgcggcgaatgcggatccgcggcggcagggaggccactgatggaagggcgaaactggcgagcgtggcgcggcgcggcggacgtgtagggccgatgacgacggggtcgtggacggtgaacacgagggctgcgactgcggtgcgtgcggaggcacggacagtgcgtatggagtatgtactatacacatgcacaaaatacacgtgttggcttacagacgaacaggaagccatgggcttaatgatgcagacgatgacgcagcaaggaagacgataaaattgagttcaatgcagaagaagacgcagatcaaacttgactcggagaagatgtggattcggagtcgacatcgtaaaggactctgtttggtaggcgtggatcggagttaggagcaaactcatgtatcgaaatcggcagagcggatcgtggactcgtggtgcttttggcttcagttcgtgtaagaaaacagggcaattacttggctgcatgcaatggggattagtagtgcaagtttgggcatggactatggtcatgtggatcattaattgcataaacatatcactactattacaaggtcacgtgaaaagcaccagcaggcatgccgttctcacgtgggcttggtggcgcacgagaggaggttgtgcagtggagttgcaagctacatcaagcagggcacggagatcaaaacaactaaacggacttgatcaggaaaattgatggatcaatgcggtggacgagatggcaggagtcaacttgttgcgtacggcatggacagatcaaattgacctggagtttgggacttggtgattggtgcaaggctgtgattcagcggagcggttcatgggcacaagacaacaaacatggtgtagatatatggtgatcaaggcaatgcaatgagtatacttgtcgagacaaggtgcgtaagatgtgcatgtatgacggttaaactgggccggcagggtggtcagaccgatggactggttagactgcgaagcttggacggttagatcgagtacaacggatagtgattcgttgtagaaacttgtgaatggattcagaataagggcaagaagtttctacagtctggatagtttgcaagtgcaaaaggcgagtagactggtggcaacaggctagtcaggtcgcatatcgaattatctggcgggaacatgatatatctgggattcgacgaggagttgagatatatggagttaagccaggactgaagaaaaggacccgggcaacagcgggtcaaatatcgttgatgggatcagcgatactgtttggcagtacaggctatatctaggatatgcgggtcggtatgatggggatatatggaaatctgcgtcactgaagaggaagagcgaaggctatcgtggtaattcttcgggtgatttaaagcaacagtgattttctcaaattatcaggaattcagtctacggatgcgggaaagcgtgaatgatggatttattagttcagttcataagacgacaaggaagaaagggttcagttcttcatgtctggtgagtttggtttatctatttggtgatgacaagggttatttatccatggattagatcaaatcaaatttaagacgaagatggaagtgaatagctaagaaggaattcaatttcgcttcgcaagacgactgagatgataggtgagaaggtggagcactgttgcaggtggattcaagaggaagaaattacagggatatcggagtctcttgaagacggtgggtctggcgtagactcgtcgggcggctttgcggtgaagctgcaaagaagacaacccaagtctggaggacaggtggatcggcatggtgattctactacttctaggtggcgtatatttgtcaaggtggagtttgttaggataggtgtcgaatatactagtcctatttggttacagttagacttggaattgtaataggtgttagggggtggagttagagtcgaactctgtaaaccggcatctctcttaaatagaggggggcaccacaatgtaaccatggcgactacaatatagcgtagacacgcagggagaggatggcggcgtggccatggacggctaggagctatattggttggggaggagcgcccataatcagagccccggggatgtaggcttcggctgaacctcgttaacaaatatcgtgtgttcctgtgtcttcatctggcatgtcttgggtgatcaatgattgaagcgatcgggaaggttagtcgtcgttccgctatatcgactaacttttataacagcatctttttaagacattgtatgacacctttgatttttgcaatcgtcatcgaccaagacatctcaatgaaactttatggtttaagattctccaacaatattagcatatgaatctattcaatacctacccaaagaccgaagtccttctaaacatgctagtgcttcagcttgagcagtgaaaccacaaaggtgcagggttttatgcgcagccaacagcaccagtcccctacaatctttgattctactaaattcactacataaattattaacgttcgccttaatttgacaatatgccctaaattctaaaacactgtcgcttctctatttttctatattattttcttattgtaaataatttgctattgagatgtcaatgtgtcatcggtgtattgtacattgcgcctatagattcatgttatgtgactatcccctcaaatggaggtccagttcagcctcatatacctttgaagtaatatctatatggtaaaaatccgccgaaaggttatgtaccttacgagtatacccatattcatggtaaaaaaatccgccgaaaggccgctgccttcaaaggatcgatggtgaaggttgcgtgcattgagatttgagaatacctgaatctctctggtgaatgtccacgaggcaccggttataatgggacacataagtatactttcttacctgtaatataaaaaaagaactagcatatcatgagcatcattttgaagtctttttgaagacaatgaaacaatgtttacagttttgctctctactctacaaatagtgagcatcttttctccccatttcccttgcttcaggaccaatatgataaatccaaccatcacggaatatgtgctcatgtaacaaaccgcaagatcgatcgcagagacctgattgacgtgctggagcgatttccgaccatgcactgcacgattaaacaaaacgtaattaggcctgaaaagtggcaattaactcgcctgtcaacgcatcattctccatttctccccaccaaaaaccggaatcagagagtgagagagccagtcactcgccactgccgtttgtgcgctcccatctgcatccggatgccactgctcgctggtctgtctgtccataaatataaatattttaacggtttaattttgtttagaaacacagtgcaaatgtatgcacattcacccctatgaatgtatgcacacgtcctaccttatgagcacctccgaaacattggatcggcatatctatgagcatctccgaaagattgggttggtatattttgagattgacgaagtcagctgtcaatgagtatgtcgcctaccactgaaaaaaataattatctataaatacgagtacacggtcaaatatagaatttaaaccgagtgaactggttccatcataatgaacctaaccagttaagctgcgctcacttagctaaacagtttaaaatttgtttacaaatataagtgcttagagagtgttatgtatctcgtcgattgtctcctattcaaagttttttatactctcttcaggctgataatacttatcattttagacaaaactaaggtcaaactttagaatctttgattataaatcatttttaaatatttgtctttcaaatatggtgagtacatgtatagtttagtcttaaaagtactttaattaaatcatatatttgttaccacttttatatatattataatagaaaataatggtcaaaattgtttttttagagaccgtgctctttttcaaaacgataaatattatcaacccggagagaggattttacttccaatcacctcctaccctaaccattcttctttttgtaatgagcgtcgacatcagagtttttctaattacttgttaaaagatttaaaatatttatatttatgaactgaaagagtcgacgagtagtctagtctgatcactatgttacctcctcctttagactttttaccccattcttcaggtagttaaatcgaaaggtccgattttctcttgattcgactaacgtagaccagcatggaaatgcctgttctgaaaggaatctctccccccttttgcgtcacctgatgatctgtgcttgcgtgcattcatgatgcatgtcaaccagtgatttgctgcttatacttcctccgtcccagtaaacgtgtcgttccacggttccagtaaagtcccaaaaaacttgcgtgcattcaaaagtactccctccgtcctaaaataagtgcagttttacactattcacgttcaacgtttgatcgttcgtcttatttaaaaaaattttatgattagtatttttattgctattagatgataaaacatgagtaatactttatgtgtgactaaatatttttaaatttttcataaatttttcaaataagacggacggtcaaacgttggacacggatatccacagctacacttattttgggacagaggtagtatttgctgtccaacgtgttgtgtgttgtgacatgacatgacatgacatgacatgatcaaccctctcgttgaggtgaatctgtcagtattacttatcctacctgaatgctatcagagagaagctaattgccctaagctttgtttgctgatacttgttctgtttctgacgaacaatagagaacattcactttttgaactttgataattcatcttcttttatatatactgaatctagaaacactaaataacattatgttattaaaaattattgtgctctaaatataagcatcaaactattttcacgttagtctaataatttaaaaacgatcgggatcaaagtggtcgctatttagaaacggatggagtagtaattaagtttgaaaaaaatgctgtactatcatgtactactacactagtaggattttgcaggttatttgctccttggctagctactgtttgtatgtcgtggtgtttgtactatgagcttaagagtgctaaaaaataaaaaaaaactcttttttttgaaacctaaaaataaaaaaacttcagttaccaagtgatactgacatactgtaagcatggatgaggacaagtacagcttcagttcaggctatgtccagattacagaagatacgaacgacgtgagtgcgtggatgacacagacagcaaaagccaaaaagagatgcttaactccataccaattatgtcgtatttattaatagaagcacctttcacatgatttgtataagagtatttactcctatatgaggtgatcatttattccgtttcaagaactagttgaatgtttatgttctgatacaaataaataaaatgtgcttacaactaattaatgtgattgtgtcaaagattagcatatacaaatataggtgcaccaactttaacattccttaatgcgtacacccaatttttgggcttttcaggagaaaataagcttctaaaacagtcaagtgcactaaaaagaagtaaaaaaatatcttttgtttgtttgagttaagaagctgaattgggctttggtttgaatatatatgcatagaactatcagatcatccatatgttctctgtctagtctcatcgaaggagtgaataatccgtttgaactttggggtagtatagctttccgccatggactccacacaaaagaaattcctttcttctgctgtgtttggagatgtagctgtccgaagccgctgaagaatattgcattattcttttggaaagtgatgtagtgaccacttgctggttctcatctcaaagaaacaatacttgcataaaacagaggagaccatgactcaaaagtttgcctcatatattggcttgtctagtctaggccatgaacaccatgcctgcctaacaattcaactttgttgtttaaatagcagttatattgggaaaaaaaacacatgttataacacgcgagaggagggatatattagctcaccaccatataaataacctataagtggtttgcaagtcatcataaaactttgaactttagagcttgcttatttgagacacggttatacaattttaaattttagagaataattttagcattaatataaggttttttttgtcctttttaattgtcatttggcattggctttagaccgccaaaaaaaggcacaaaagttttacactaaaattgcttcatccgtcaaccgagagagatgtgagagttgaagggatagcagggagaactcaccaatgactacgacaatgacttcctatgtgagcctctagatgtcgttggcatatgaactctggcaaagcatgtatcaccaggttaggttttcagggttggtcgatagaggggcaacaagggtggcttttgagtaaactctgaggtggctgaggaccaacgttagatggtggagatacgaggacgagcgatggcactgaaattgtagagatggaagagagcagtgaatgaggttggaaggaggggcaaagaatgcaatgtggttaggaggaatgcggcaatagttgctaagcagcgaggagagaatcgaagtgttgcgatggatggttacagagagtgagaagagttgactagtgttagggttatatgggatgtatgaatagagtaaatcttggcatttaaaaaagtgacttgcatctaaaatatctttagggtaagtgatcaatgtttttctttaccgcagcttgtttttagttggcttaatcatgtatctttgatttataaactgcacccaaaaaataccttccaaaacaacttttatggtgtgtttgaaactaatatatgttatcaacttctactcacttgtttttcacgcgtacactttaggaattgtttaacagtgtgttttttaaaagaaattcataggatagttgatttaaaaaatagctaatatttaattaatatgttaatgagctaatccgttttcgggaccgagcgcaccctaatctccacagagtgacagaggtgcaccgcaaccagtaagtatgagagcatcagcatgcaatttcaagctccagcaaagctgccgtcacggcgtgattctccgtgtctgctgctctgctccacgtattaacgcattgcaaggcacagagaaccctctacctcatttaaaaatctgaattgtgcttctccttttccccttttttttttttagaaaaagataggtccggatttctactcggaatccactaaaatggccattgagcaggagcgcaaacattttcggaatatacgaatccagcgttgcactggcccacccaaagtggggaccaccttactcacacaaatttctttcacagagaatcaccgaaatgcccctgcccataaaccctataaattgactgataagcaacggccatttcagctcagatcagctcaattcagagtgtgtgcctctcgatctagatctctgagttcttgccatctttaatttgaaaccgaaatcatcagctgcaatcttcgagattaattaggaagctaagatcgccatggcttcctgctgcggcggtttcatggagaaggccaagccctacttcgccatgatctgccttcagttcggctacgccggcatgaacgtgatcaccaaggtctcactcaaccatggcatgagccactacgtactcgtcgtgtaccgccacgccttcgccaccatctccattgctcccttcgcgctgatcctcgagaggtatacaatccgttgttttaacgtgtactcgtatgtacccttattgtcggtttaagcttctggatgaactggtcggtgcacggacttgattgttattgtacattgatcatatgatgtgtaacggaagctgacgtgtcgctacaaattaatggcattatgacaggaaggtgaggcccaagatgacgtggtcgatcttcttccaaatcttcatcctggcgctactcgggttagtgagacttgtctacttacagcgtaattacactataattatactataattatattttaaagatttttaataaaagaaatcttatacgcaaactccattgcgtatgatcttgcagcgcttttaataaaaaaaatctaatgaaggattgattatgtttagtgagacttagtctagttataatgtagttacactacaatttgtaataagaaaatcttgcagcttatgttttaaaagatagtctcatatgcaaactctaatggaggattgattatgtttctgccaaagaaaaggaaatatttgccaatgaaaatttgcaaaggaaaaaaggaagcatagcttgtctctggaatgacacattggattcacctgttcttggtttgttggtgcagaccggtgatcgaccagaacttctactacgccggcctgaagttcaccggcccgaccttcgcctgcgccatgagcaacatcctgccggccatgaccttcgtcatggctgtcatcttcaggttcgttctccaccacgtacgatctctctcaatgcatccatggcgatcgagagctagatgtgagctggtttgacgttaatgcatggtgttcgacaggatggagaagctggagctgaagaaggtgaggtgccaggccaagatcgccgggacgctggtgacggtggccggcgcgatgctgatgacgctgtacaagggcccgctcatggagatggcgtggagccggcacgccggcgccggcgtggcggaggcccccgccgccgccgccgccgccatctccggcagggactggttcctcggctcgatgttcgtcatcgtcgcgacgctcgcgtgggcgtccctcttcatcctccagacgcacaccatcaagcagtactcggcgcagctgtcgctcaccaccctcatctgcctcgtcggcacgctccaggccgtcgtcgtcaccttcgccatggagcggcgccgcccctccgtctgggccatcggcttcgacatgaacctcctcgccgccgcctacgccgtcagtaccatcctctcccatctccggcgccggcgatcgctagcacgcactctgacgttcttggtttcttggacacatgcagggcatcgtgacgtcgagcatcgcgtactacgtgcagggcttggtgatccagaggacggggccggtgttcgcgtcggcgttcagcccgctgatgatgatcatcgtcgccgtcatgggctccttcatcctctccgagcagatctacctcggcggcgtcgtcggcgccgcgctcatcgtcgtcggcctctactccgtgctctggggcaagcacaaggagacccaggagaagcaggctgacaccaagctatcactgcccacttccaaaggcgccgccgccgctgcggaggcggaggagatcaccggcgccggagaagacgacggcgacggcgacgatgacgcggagcgcagcaagaaccaccgctcgagtggtggcgtgaggtcatcatcggactccaatggacatggagctagtgcggtttgatggacacctaactccccaataatttggttgcggccgtcgacgcgtcgacgcgacggcgaccgtcgccatcgccatgcgtgcgtcgacgtcgatctctccgctttaagatatccgaactgttcgtctacggcgcgtgcactacgacgacgatggcactaagggctcgttaaatttggaaatggaggtttttgtttggtaggaaatttttgatgaacttttactgtgttaatttccctgcaaaatgtaagcgtttgtcacctcgtcagatgttcagaatggtggcatgcatatctctgcttttttttttatcatgtttgatcaaagctgctacgctattttgtactggtttcatcctctgtccatcagagagagtgtattgtgttttgtaaattttaaactcttcttttctcgttactccacgtttacaaatagtacatatcgttttgaacatcaacacagtcatactaacttcaactttttaccaatgtttaacaatttgtcttattcaaatttttttgcaaatacaaaagtatttatttcatacttaaagaatatttgatgataaatcaaatcataataaaataaatgataattatattaaatttttaataagacgaatggttaaacacatctaaaaagtcaatgcgtcatatattgaaaaaccaagggagtatttaactttggcgctatagctccaactattgtgtctacatcagtttggtggttttgctgtagacaactggataagactgaattcctaaatgctaatcattatcaaacaaaataaggcagagttgagtacatcagttaaatatataagtgcactgcaaagcatccatacttgccagttgccacaaaagattcaccaattgaaagatcctttgagcatctccacatcactgttaattaccatactgtttgcaaaattgcatgtgtggcgtcagccaggaatatgtctgatggacttagattcagattccactgagaattatagtgccaaatttgttgctttctggtaactggagcgatcactttacagcttgaatgctagagcaattaaccagagaaccatgacagtactagttgtgaggtgagatgaagggtagtaaaaaggacagaacatgcttaccacaattcttgattatcttattgtcagataatttgacagatatatagcatgaatttgatattatctaaaaagatgtagcatgaattgacttgtccatcaatggactagaacaaactgattgagtgattgaagtgaactactccctccgtttcacaatgtaaaactttctagcattatatgtctagatttattaacatctaaatgaacgtggacaatgctagaaagtcttacattgtgaaacggagaaagtactgaagaaagaccatatatataatgttgttcatggataactcataacttgactatttgcctctaaaagtctcaaagctaagcatgtataaaattgtggtttagaatattggccttatcttgaagcaagaagaaagtacatataacttcattccgttatcctattgctaacaacactagtgtgtatatatactgtttttagctacagatgcattattagttctctttctggtgagccatgccacattgccactagctctttgctgctgacatcctgatatgaatgtataataaagtgatacggtgcactaaatttacaggccttccgcccttccgtattggatgacactgagcaaatagcaaaaccttgtactagtcatactactttcagtgcaaaaccaagaatggatatcaaactctatcatgagagggagttgcatagcaactcttatcatgagaaggagatcataactcataagcactattaggaattgcattttttttccttccaaatttcaggtctctgacggtgggtatggccgaaattttttaatatgtttcaagttagcaaaagattgttcagattcagtgaaaatcactttaaaactcgcaatttttttcattttaaatttcctaattttttatccttcttttttcaattccaaaatgtagacccctgcttgccacatgaccgatcaaagcacctgcagggaaaccactaaccaacttttcagaatcatgagtttttttttttcatacgcaattagtggtttccttgcaggcgcacatagcaaagctacgcaatatgcactactagtttgtcaatgacgaaagctttttttcaccaaagtcctgagaaaaattccttttgcacgatggatctacacggttacatctgctacaacctgctgcagcaacaggtagacgcattccttcacagattatcactgcattgagctgcaagcttatcagaaaaacgatgagaagaacatcgctttcgcaacgaggcacgcatgcgtgtgacatctgaataacaatgatctctcccattatagaattataccaatcaaatgaaaatctttttcttgaaaagaattagcctgaaaattctttatgcagtgtatcacaatttggtgagaattgctagctcaacgacggcaagttgctgcttattcaggtatccctactcagatagcaccgagacaatgcacatttagcttggcacaagtaagcccagctttgcctctctttttttctgcctaaaaaatataaaaattgtgactgtgagagttggggtttgcaactttaaattggcaattgacgtcttgcagattcagttgaaatgggagagaaaacttaggccaatggcagtgagagttcatgcaggtgagttagatccatggatggagcataacagttagcacggaatcttcaaaggggttgtgatgtcactcaggggtttgatttgggtttggcagataagatgaggtgtcgattctgggatgtagtaaaagccagagttcgatctgtttattgttctgcatgagatgagcatctctaaactctgggaggaagaacaagtgttaggtattgtgatacatattttatcttggtttccattagcagatttttcaaactactaaatggtgtggtttgtgtaaaagctttctatatgaaaattattttaaaatagcaaataaatttattttttaagtttataataatcaaaaattaattaattattctctaattgttttttcatttcatgtgtgttaacttaatattcatttttgtcaacttcaaacgggataaccgttgtggaactggattggttctctttacataacaaaatatcgtttcttccgtttccatatatcccacttcgaatcaggattaattttttctccattgctgggccgacatgggcctgcttcgtttgagagatgggccgtgcgacgatagaagcaaaggacctctcgtcctctccgagccgtgtgtaataagttcatctcaagtcccttaattttacaccgagtccgattttcgttcttagaaccccaaaaccagatacaaccggccctcgaactgtcaaaaccggtgaaaacgaggtccctagcggttttgaagacggttttggctgatgtggcgtctacgtggctggtttgactaggtctccgtcccatgtggtattgatgtggcgatgacgtggcaattatatcttggaaaaataataaaaatcatgggcccacatgtcagccacaaaaaaaatctaaaaatggtggggcccacatgtcatctggttgtcgccgtcgagcttgtcgatgtcctcgacgacttcttttggcttctcagtaatgccacacgagtgctgccattaataacatcaaattcagattcagctacaatgcgattatgctgaaataagcaggcaagcataggtgttcgatcgatcactcaccttggaacgagcagtaagcccagatgtaagcgtgttcacgaccttcttcctggagtacttgtgggctgaaccgccgccgctgccgctgctgccggtgccctccgacttcgaaggcttcttgttctcgttgacgccggcgccggtgctggccttggcggtattatcgggacgaggtacgacctggccgacttcggagctggttccttcctgaccgggttctgcacgacaatctgcgagcaaaatcaaaattggggatcaaaccaaacgctctgaattcgcaagaagaatgaggaacagaaggggtgtctcacccgtaccttgttcaccccaacggcgttctcctgagctttctttagaagctgggcgccgaagctcctggtgatggggcgattgatcccctccggcagctacatcttgctgttgcaagaagaatacgaggtttcagagagggaaacgggaggaagaacgaatcgggaaaggttggctatgatgatgtcatctactatatgattgtgtgcgtgagatcgttgtcttctactccggatcagcgaataggccactagttattcaatacgttatcagcacgagattgctcatacgctaatcccggtaagtgttctagtagatcaattgatttcagtactaatcagattgatatgttatctgtgtactgctcgtcgccggccaacacgaccgcccgctcatgcgcacctgcacgccgcgctcgacgcgtggctgatggtcgccggttacgacgccgcactggagcatgcacggcagcaggacgcatccagccgcgcgtgcccgaggcaaccagccaggcggctctaccacacgcagtacgcaaccctgcggctaggatccaggagcaaaggatcaagcagacaagcatacatgcacatgaatgtacagattggtttatgaaccaatctagtacgtgcacgtattgatcttcaccaagcctataacaacatgggtgtgcaacgacgtgtcgacagtgctgggctatacacagctacaccagcacgcaactcgtcgacgccgcgtcgccgatacgctatgcggacgtgcataagcggatcggctacctttacatcggataaacgagataagtatcggtttcatctattctaatactttgcagtagcgagagtaatatgctagatcatgcctctagtcgttttattttctcgcatgaatagatgtatttgtctggccttagcggcgactcttctcttgttatatcgctgaccacgaagtttggcaccacgcgcccgaacgcgcttaccgtgcacaccagaaggtgcacatacataatccgttgaattgaatgatggagtgctgtcccgaacgacgacacctcacactcggtaacacacgacaccacctagaagttgtcgtctatctggctaacatagtcgtcgatctatgaatatattaacacactcgtcatcaccgatcttatggatcagcgtgcttgggacaatgttggttgtgacttgtatgttaataatccgttatattgctatctatatgaagtagatggtaacaaatctgagtcatcagcacctgcatgcgccgccacctgcacgtagcgacacccagacgccaccacatgacgtcttcccctttgtcaatggttgccgaatcaatccagagaccttccctcgtcgatccgccatctgaaacaccgactcgacggcctttcgaggccatccgcaacgcaattgacggccgtcgcccgtagcgatgccgaggagcttacgcccgcctccccttgccgccgatacgcacggcatgcctcccacgctaccgcacgcggccgggacgagggtcgaagccgccgtgagtgcccgccgccgatagccgtccgccatgccggcatgtatgccgagccgagtttcgtcgacacgtaacatggagctatgattgtcggacgctggtcacggcctgatgccaaagaatgccggtgtcggtgctactagatgttgcaccgccgctccgcctctgaccatggcaacttgccatagtcgtccatctctaccgagggctcactagcacgtttgcaattggttccatccgtcgtctccattgaagaatatcaattagatcatacctcacccacttcttgtaggagaaggtcgtagtagctcattgggcaacatatgagatgggctggccagattttcaagctagccagtataaggaggtgggccaagtagaaattggcctattaaaaggagtcgggcacgaaccgtgattttggtccgaaaacggcattttatttcaaaagtccttggtttccaaggcattatgcagaactcggaaattatacggataagtcctatgggacattagaaactacggggaatatacattcgccatttatactttgaaccttcatgaattgggtttacgccaaatagagaagaactaaggatttataccttagtcccgtatttctaagtatttgctttaactatttagttagtttcttgaataacataatcaatcctagaaacattgtttttaggcaaaagagcttccatgaacttgtgaaacccttgttttagcaccccttttggaagcatcatattttatggtttatttcctggcaattgtttgttttggggtaattgattgttctgtgggttagtagttctgtaaattacacatacctttgaatagcaaaaaatcatgttaattgctaggattgtaataaaaggtgtgtatagaaaaccattctttactattttgtactcgttttgtgcactttatttactagaagtaaaccggtagaaagttgcataaaaggacatcatgtaagtagttgcatgtagcaaatacatttattgggcaaatgagtaatagaattattcatatatcttctctttgtgtaattgtcgccacatttgtagaaggcacaattatatattctccgtatagaataaatgtatacactcatcatgaagaaagtatattattgacttagagatatttcttagtgtatgactatcatagaagataagttacaactaatttatattaattgtgtccaagtagatacaatgtcatcgaatttgtgaatatatagacgagaagtctatatgccaatatgccctacacaaaattatctatcaaaagactatgtacctatgcagtgtctatagttaatttgattgataatgttatgtccattttccacgtataaatgaatttacaaatgaagtattgtttttatgaatgtatgcacatcaattttggcctatatgcaacatgtttagttgttagaattaatacacaagaagttgtattactgtcaacatgtgcatttgcacgcacatatatgacttatactattaatatattcatgaagaacatgcatactcaaaatttgtggaaggaaaggaatttggtgtatttgaatttgatgttcaactcagggggagatgaatagtaatgacagtaatcttgcattcgttcttttgagatcgtattttacaatacatgagttacattacagattagattaagttcaatatgaagaacatggttaagctcatgtagagcttctttatcttttgctttaggcatagaagcttctgcattagattactgaatatttttttatataggtcatctcaccttacctatattgccttttttttacctgtagtaattctttaaccttttgtagaataaaattgtaaattatatgtctaacattgaatgtaaatatttgtcttgcctattatttgaagtatttttggcgaatgtattcttattatccactaagcctcaatcaaccatgtaggttggtagttctaagtgcattgacgccatattggcatacatgtagagctgttcacttatgcacatgaacaattagaatatttatgtttaagcattgaagcttaaatatatccacctgcaaccacattatttctttttagaaaagttgtaccatgaagtcacaacaaatatgtgggtttcacgacaactttttagtaaattttcttatgattggcgtgaaaagggggaggaatatgtgtattttgcaaattaatttcagaatatttataataaagaagcataagaaattgtggatatgtggcaggcaaattggtgtgttataggtcaaatgctagaagcaaaagatagcccaaactattagcgaatcatatttgggataattatgaattattgtcacacaacgaagtgtgttatttattggccattgaaaattgcatattcatcaaggaagtatgaaattgcatatagctatttaaaagctattggtttacttgtagtaaacaatatcctaaaaataattaatgaccttttggattcgaatgattctgaatgatcaaatgacaccacatttactttggcgtaatgaataaaagttagacatgtcacccaatttatttattggcatattcaagaagaataaatattctcgtagaataatgtttgggtgatttgaaaagttccatgatggttaaactatgttcatagattaatgttttagtgctatagttatgttcttgaagacatcatgaagttatataatactaacacatccatcttatgatcatatctatgttgcataaatataaacatgaagtttattgatccaacttaattcaagaattgaatatagtatgagtaattggatcaagtcttgggcaaataaaaaaaagttagaaaatagagtaattttgtcgactagtggatatttgtttgggattcattgtcgcagaataataaccctctatgaattggataacctacagtattagggatgtgcaatttttcatgccattgcattaatttttatgttagctcactgcatataatatctttaccccctttattttgtataagtgtgtgttcaatgaatgaacattttcctcatatatcaccaccataacatacatatatgggcctccacatgaagttggggatacaaatggaccgaattccattaatccagtgcctatgataggggatttttgtgatatgctattagataaagatcgaatatcggcatcagggggagaaaagcccatgtgttaaagatgccttatattttcaagaagaaaaagatctttataagtaagaataacgcacaagccaaactaaactagaaggtttagtttattctcctgtaagccagaagcgggagcttgccagataattatgaattaaaggagtaatcagaagttatgtttacttgtagtaaactttctgctaacagcggtataccccgggttttgaatagtatatccacaaatgcagagtgacatgttagtcaatgttctaaaatctacggggacgcctgcggattctaagatctaacgactattgtcaatgtacccattaataactccttacaactattgtagagtaatcaccatgaaggtgaattgcctcatgaagaggttcatcatgaagatgaaaacccagaattaaagtgcgcacatctatctaattctgggatgcggaacaaccatatatcttatgtttgggaaatgactaagatatggtttataatgaattaacctcacggaatgagtatgtggagaaaagaatagttatcgacaacatcgcctctatgattgctaatatttctctaatgagaatccggatccggaaccaaagtccatggcagagttgcatagtagcactcatattggttctattgaagaaagcaatgaggttgaaccatagtcgctaaataagtctatgtgaacatggaagttcatacttaataggaaatgaagtggtgaaaagcgacggttcatatggtcatggaaaagactgatattctcctactatgaatgtattaaattccgctatatatatcgctggcaaaaggtatgaattaataaatgatatgcagtttatgggttatgaaaatccatatgaagttttcactagaaagaaaacaatttcgcaacatatatgtaaatctcatactaattagtgtcatgaagcacactatattctcaagaagagaattgcaagactcgtagaagagtttatgatgactcatgaagagtttttctcctagaagtgagaatatttctcatagcagagaaaatgacttccggaagaataagttgatctctgtaggactatgctaatgtatgaattgccggttaatctccatataacaccaataactcgtactcccatgaagtggacagacccgtttaaacgaatgaattggtccactagcatgcaagtggatcggtagttttctacatactatgaaggtgtaagaatttatatatcatgaagatatactttttgatggtatttggcaatcttattaattcccctaatgccaaaatatagaccagtttatgtcactctaagtggtttaagctaattgttgaagattagtgaaacaatcaaactggtaatgattgataaatccactaagagaaagttgcataatatttaacctcttgtattgagctaattattttatacataccgcatatgtgtaacgttgcaacttattttcccatagtcctccgtaaggataaaactttgtttgtattgcacatttgactaagtggttatacatattgctcctatacgttgatttatttctcatgttcatagtaaaacttatgaaataagtaaatgaaagattaaacattgtggtaattttattatcattgttttacacattaataaaaatatggttatgacattggaacatgaaagtttcaacggatgtcttattgagggggagcatatatgctaaacatttattatcatacttaagacttggaagtcttatatttgatttaccaagaattaatcaaattaatctttgttttgataatttaccttgaaggttactaccgctatattgttgtgttaatccaagttgattaatacaataaagcatatagatcattggctatttatgaagaatgtatatcttaaagattatgcgatcaagaagatcgtgtgttgtactctttttcccttagtgagtttttacttgaatatttctcacgcaaggtttttaacgcggcaacaagtgcgatataactagcgtgtacgatgtactcttttctcctatccttttctcccactgggtttttggatggagtttttaatgagacatgtgtatagcgcggtattcgcccaaggtggagtgttataaaactattatctcctgccagagataaatatggactcataccaaatatatggaaacgtatcctaataggactcttcctattataggtatatatattgagagagatggcttgagaggttggttgatgtatccacatatgagaaagcaataaagctgtgatgcctctccctatatccgtgttcattattcatctactatatgattgtgtgtgtgagatcgtcgtcttctactccggatcagcgaataagccactagttattcaataattgcaaccctccagataagcagcggagttcagacagtgtggcaacgactaaccgtacattccatctatttttctagaacattcatcttataattactagaaaaatacctgtacgttgcaacggatgaagttattttaaattttttattgttattgtttggttaagatgaaattcactgtgttaaattcacttggatatatattttgttagaaaatcatgagttgtaattgggagtccaatcaaattaacatgtgaatttttaaagatatttctttacgattcttctgtatttgcaaaagcgaacgaacttaaaaatcgatttaaatataaatttgtattttcaaaaacgaacgaacttaaaaaatgactcatatacagatgacataccaaagtattagtaaaaacatcttcaatttttataataagtaaagatacagatatagatataaggtataagctatccttagaacacctttataataataaaattaaatcacaaaaaaagtaataattacttttttttctgaataagccacggagcatttcgaactttcagtacagacttgacaccatgcgccgagccaccacctaccgtagcgtgtacagtgtatatacaaaacccaggccgtagagccggtcgtcccatagaaatcaggcccacaggaacccagaacgcatctctcgccaaacacactattccaatgaaaagtttgagtatgattcactcgtgccagatttgtgcagaatctgcagcatgttccaactgcagagctgaaattagtttgtttgtactactctgaatgggtttttttttctttttttctctagacattgtttctttgcacggtgattgcaaacgcagtcctgtagccagtcatctgtcctccttgggatcttctgtgagtgttagcaatggcccatgattagaccacttaagtaggcccgtagtattttcagacaaagaagcaggcccgtaattaaggtaccacagcccgcatttgatttgaaagcagagtcctagtttcaaatttggaattctgaaagtttcaatggatctaccgtaaaattcaggtaggattccagcgattttcaatgtttttcgtgaacgcgcaagagattttcaatgtatcttctggaattcctttcttcgtagtaaattcgatcagctcaccttctcttgttctgtgtagtgcacacagagtatttgtcgctctcgtacgagtcaaatgagacgcaggtgtcgttgcaatgcaaccctccagataagccacggagcggagttcagataatgtgccaacgactaaccgtgcattctatctgtttttttatatcattcgccttatttcaaatataaacatatatgaataaaaaagtgtaagctatgcttagaacacctttaatggcaaaattaaatcacaataaagtaagtgttaattaagtcatttttctgaataagccacggagcatttcggaaataggactttccagttcaagcatggtttagttttcaactttttctcaaacttttaacttttccatcacatcaaaatcttcctacacacataaacttccaactttttaatcacatcgttccaatttcaattaattttcaattttagcgtgaaccaaacacaccctcagacttcacacctcactaacacaatgcgccgagccactacctaccgtagcgtgtacagtgtatatacgaaacacaggccgtagatcccgtcgtcccacaggaatcaggcccacagaaaccgagcacgatccatctctcgccaaacataaaaaaccaacacactatgaaaagtttgagtatgattcactcgtgccagattcgtgcagaatctgcagcatgttccaactgcagagctgaaattagtttgttaggagtagtactttgtttcatgtaaaccactaactcatagtagtacaaaacgttctcaaggacccctgaactcgaaattttcgtctatcgtatttcacaacttttttttttgaacgagtcgtatttcacaatttgcgcttcttgaattttgctggtttggaacttttttgagagaaagtaggagtagtagttttggtcaacagtgtttgtgatccaagtccactgcaagcttggaaaccagcagcagcacctggtatcatcggtggttggtgaaactcggtcttcttagaactaagcaagaacagctcactggaacaagctcgcccacttcaaccaagcacttagcagttaacactagtaagtcactaacacacgaccagcccatgttttatcacagaaaaaaacataattaacattaaattaacctcaaacacactgtttgctctgacaccactaatagtccaccaaatttataatcctcaagaaccaagaggaaagaaaaatagcaaaatgagcttatgtcaaatggttagtttttctgtgctgaaactagttcacattttagacttgatatatgtacggttaattattttcttagtggtaagcgatgtatttgtaaatatcgacagcaagacatctgtgttcacttcatcatatcctgactcaatctttcggggtgcccataagaatagggtttatgcatgtattcataggaattggtgtgcgctcattgtgagcatctgctttagggcaggtataatagcacatactacaagatgtaatatgcgtgtgacatgtaaaaccagatattactagtgtactattccctccgaattaataatacttcgttttggacaaaggcatgatctccaaaaacaactttgaccattattttccattacaatatatattaaagtgttaacaaatatatgattttattaaaatactttgtaaaactaatatatacatgtattctaaagtttgatatcacccttgtctaaaacgacaagtgttattagtccggagagaatacatgtttacaggtaattattgtataaattggctattaagatgattgtagataatttgaaacgggtaattggctttactattaaacttgttcttatatgtttatatataataaaacaagaaaaaaaattgtagtggaaacaagaggggaaagagggggaaaaaatcagtgtggtgtggcccactcacctaccgccaacctccccccaaatccgtagctttccggcgagtataaattggccgagctcgccaccgccgctttcaccaaccacccccccccc

SEQ ID NO: 6517 - DNA, 4289 bp, Oryza sativa
gaacaccacgccgccgccgtcgccgcgcgtcgtcaagaccgagccgggctgctgctccgtctccgaagcctccacgacgacgacggccgacgccgccgacgtctcgtccacagggtcttccccatccccgacctcatcgaatcaggccgccaccgccacgccgccggcgccgcggccgccgccgccgttgccggagacgattcagcagctggacttcacggaggcgccatgggacgaggccgacggcttcgcgctgcgccggtatccgtcgtgggagatcgactgggacgccatcctctcctgattaatttcctgacggcttcatgcatgacgtcagcatctgtgttgttgtattagtttttgttcccgagtgtattggcctttgcagctactagctttgatctatcatcagtgtctcctggcctctgctgagtttgttttttggtagatggcattgtccaggaggagatagactgaagattactcaggctgaattgatttgtgtgcatgtgtgtggtcagtttgtggctgttgctctcatgaacaaatgctatgtgcaatatgccaaagacatagatactgctgctactcttgtgtgatacatgttgttgtttgtggcatgtgtgtaattagaaatgcagtgattgatgcatctgcataccttgaattgacacattggatggaaaggaatggctgttggtttgtgtttgtgttcctggtcagagaaccctttaatttgatatcaaattttattgggaccagttttatctcaacatgcatgactaagggtgtatttagttcataaaaacaaaattttttggtgtcacatcagacatttgaccggatgtcggttggggttttcggacatgaatgaaaaaactaatttcataactcgcctagaaaccgcgagacgaatttattaagcctgattaatctgtcattagcacatgtggtttactgtagcacttatagttaattatggactaattaggctaaaaaaattcgtctcgcgatttccatgcaaattgtgcaattagtttttttatctatatttaatgttccatgcatgtgtccaaagattcgatgtgacgtttttgggaaaatttgttgggaactaaagaaagcctaaggctgtgtttagatctaggggtgtaaagttttggcgtgtcacattggatatccgacacacatttgaagtattaaacatagtccaataacaaaatattacataatccgcctgtaaaccgggagacgaatttattaagcctaattaatccgtcattagcaaatatttactgtagcaccacattgtcaaatcatggtgcaattaggcttaaaagattcgtctcgcaatttacgcacaatctgtgtaattagtttttttatttatatttaatactccatggatgtgtccaaacatttgatgtgatagggtgtaaaattttgctaggtgatctaaacagaccctaattaatttagaaccttatcagtcacaaaaagaaccataaaattggcattcaattaaaatgcaatgaaaaatatgtgcggtaatgtttcttgagcaaatgctccttccatattaaatttgaagttacatatctctactttatatagagacttttaaaaaacaacagaattttacttataaagtcagtaaaactcattagaacgggattggttatctctaacggacctaaagcctcatctctttcagacagagcctccgtcactaagcaaagattactgatgtgagaaaatatcttaattgggcatccggccatcacgaatgacaaacatctcaatcaggccaacactatagccccatcacggatgactctcatatctaacgggccaacactatagctcgtcacggataactctcatctctaacgggccaacattatagcccgtcatgaatgactctcatttctaacgcgcctaaactatagcccatcacggatgactgtcatctcaattgggtctaaattatagcatgtcaaggatgagtataatccaaaaaaaaatattttttggctagcctcaggcctttgggggccacgcccttgggccggtcttttctgcgcactttgtcctcacttgtgtgaacccggtcggtcaccatcccgaaattgctccacccgggaagaatttcctggtcggttctccaccctaatctcgcttaacctcagagttctttggagatcagcttccaaagaagaagttgtacattcattcacatacacaaccattaatatatttaacataaccacattcacataacatccatttttttgaaatgacacgtaacattcattttgatcacatatttcacatccattcacatatttcaccagcaaaaccaagttaattggatcaaatatgtaagtattaacatgatgaggaggcaaatcaaatttctaggaaaaaaaaattttgaattgaattttatgatactaaatgaactcatatgaaaaagttgtcaaagacaaagttgtagaactcattgagatctaccaattttattttggtcatttctccattcgggtttgattgaactatataaaatttaaattttaaaatataagaaatttaaataatttttcgggtagtaaatgatttcaaatagaaaaattgtcaacaacaaagttgtataactcatcaagatctataacttttattttggtcattttttcacgtaacattttttgaacagtttgaatttgaatttgaaaatatgacaacttcaaacaacaatttcaaatactaaatgattttaactgaaaaagttatcaacaaccaagttgtataactcatcaagatctataacttttattttagtcatttcgtcatccgacaaagtgataataacattgttcataaaattcacatatctcttatctggttttataaatgaatgaagggatacacggtttagcgtgctgccaagttgctcaaccgatcagctccttcgaactcgcccttcttttatgggaagcaaaaagggtacccaagaatgaagggatatacggtttagcgtgctgccaagttgctcagccgagcagctccttcgaatttgcccttcttttatggaaagcaacaaggtaccaagaatgaagggatagacggtttagcgtgctgccaagttgctcagctgagcagctcctttgaactcgcccatcttttatgggaagcaaaacaggtacccatgcatgaaggaatacacgtgcaagaatcacataaatggaactagggaagcctacatgaggagaagtttttctattaccagttatatgcccgaattcggagatatcaatatattccagtttcttttgtgctggttttttcacgatatataggttgggttttggggaggatttaggagcagttttttttttcagagaagggatcgtctttttttctttggggcggagggaggagaataactgtatttttcaagttgttagataacacacttgggttattaactaatgaatggaaagtttcatttacatctagtatatcagaaaattcctgttctcgtgttgcaagcctaattaatctggtttctcttattttggagtaacttgtaatatgaactatcttttcgttcaaacagctagctttaaactaaacacaattagttatattttgaaaatcccactacacaatttatagaatgcatgacaggtcagactatcatctcagcagagttggtgtatagctcgttttgagtcttgcacttttcctttctcaagggaaaaagtgcagagggctttctgcagacaacgaaatataaaactagagttgaaagcaacggagtattttgtgacaagaaaaaagagtgaaagcatgtaagcaactaacctgacactgacatatgtgtattaacaattttctgtatatttacactccaatcagttactccacgcgcacactaaattatttagaacagtaaattaataacatgcactatactactatgaagactgaatagtatatacacatactgtgcaggggaagcagcatccaaattttactacttgttttcaatatatagataaagttatggatatttggacataatgtttgatcatttaataaacacttggaagtatcaatattttgttgacttgttgtttcatctttaaagttactttaaatatgacttatagtttttttgttagagtttgtatccaatatgtatacaaagtcggttatagattacgacttcgagttatcgtactaggtgtaggaatagagtaagagctggactcgatcctaagctctct

SEQ ID NO: 6518 - DNA, 2214 bp, Oryza sativa
gtcctcgacggcggaggcggcgcgatggcctcggcggcggaggtcctcaaggtggcggactcatatctagacagacagcgacgcgacggcccacgcggcggctcggccaccaccgacgtcgacgtgaggcagctccaaccgacggcgacgcggcagcccacgtggcggcggcaacggctcggccgacgacggcaacctcggcggttgcctcgtcgtcctccgcggatctggagcaggggcacaacgtcctcgggctcgtctttcggccggcgcggcgtccacagcaatctcgagcggcgcggcgtcctcgggcttgtctctggccggcgcggtggcctcggcggcggaggtcctcgaggcagtggcttcctcggggccaaagcggcgacggtggcgtcctcggcactccctccgccgtccgctatgccctcgccttccctctgctccaaccgacggcgatgcggcggcccatgggggaacaagcgagggaacgacctccacagtgcaagaaacggcaacacgcgccctcgatttcgacgagataactcgtcgcccagttggggggcgagcaaccaaacagagctccgcgccctagtgccacgcaagctcgaatccgatgtgtcgagctaaagcaccggtccatggtgttgcactgtgaagggccttagatctacctcgaaccacccaatcctcacccttcgcccttccaaacatcgccgccaccctcgcactcccaagtcggtccgtagcgcgcggacgagcacattgtgtgcgctcgacgctgcgtcgctcggacccacgctacgaccgctccgtcctgtacgcgaccgccgctgtctctgctccaccctcctgaccgccctcaactccaccgccgtcaaagcgaggccaagccagcccgtgcgaactcccacggccgcctctgcctccgtctggctagacagtcattgaggctgccgctgccgcccttgccctggcccggaccgccattgcaccaagtcaggctcccgcgtgaccgtctcctcgaacgcctcctctaggacaccgacagccagcccgcatcaactcctccccacacctcctttgccccgctgcctccctccatcgctgcgccgaccactgtccaccgccctctatctcgacctcgctggaataaaagaaggggatcgagagagagacaaggactcaaggagagatcgagaaggagaggagagaagagaacaaaagggaaagaggagaggaataggacattgacaggtggcatcccgttggccccataatcttgcttaatcttgcacaataattacctccctttttcttaattaatcttgcacaataattacctccctaatccctctctattgtatcactgacaagtgggctccaccatggttaatttctgtttaaactctcttaatctttgagtcacttacaagtgggaccccaccttatccacccggtcgacacgcacccagtcaccgactgccaaatccgacgctcactggcaggcggccatggaccggttccaccaccgccacctcaccgctccgcacgccgggttccaccacaccgacctttcccagctgttgaaagcgggccccgcaaggaatattcctttccaataaaagaaacttattttccttcgtacaaaaaatcaatgaaacttcaaaaattcatatcttgcaaaccgtaactccatttgactccgttcaactttcatattttttataaaaatgatatctatctaatggaagttctatctctcactgttttagctactttattagcttttgtgttgattttctccttttacgcgtatagttgccaaaccttagaacggtccggaagttgttctcgatgaggaagaaccaccgcaggaccaaggcaagccacctttgacaatattgcctccaataggtggaaaattatgttgtttgcataggttacacattaaattgtttggcctcggttggcgaacgccaccggtggacctacctattagtcgcacatatattttgtaggttatgggaataacatacctttgttagccctacaaacccccccctacaaatgatgcactgacgtcttaccctacgggtatgattgccgaggtagttttgtttagccctgttgcgattgtattgtcatgtgggcacagccaaagtggtggcgggggtggcctcagctgctggcagcgatgacgtcgcgcccacc

SEQ ID NO: 6519 - DNA, 2613 bp, Oryza sativa
caacgtcgtcctgtcagtgctcgccaggccggactgccacgccgacgcgctcgcgctctaccgcggatggttccccagggaccgcgtcccgcccaccaccttcacgttcggggtcgccgcgcgggcgctctgccgcctcggccgcgccgacgaggcgctcgcgctgctccgcgggatggcgcggcacgggtgcgtccccgacgccgtgctctaccagacggtgatccacgcgctgtgcgatcagggaggggtcaccgaggccgccacgctgctcaacgagatgctcctcatgggttgcgccgcggacgtgaacacgttcgacgatgtcgtgcgtgggatgtgcggcctcgggcgggtacgcgaggcggcgaggctggttgacaggatgatgacgaaaggctgcatgcccggcgtgatgacgtatggtttcctcctgcagggactgtgcagggtgaggcaggctgatgaggcacgggcaatgctcgggagggtgccggagctgaatgtcgtgttgtttaacacggtgattggcggctgtctcgcagaggggaagctagcagaggctacagagctgtatgagacaatgggtttgaagggctgccaaccagacgcgcacacctacagtatattgatgcatggtctttgcaagcttggaaggatcggttccgctgtgcgattgcttagagaaatggagaagaagggatttgctccgaacgtagtcacctacacgatcgtgctacattccttttgcaagaatggcatgtgggatgacacaagagcattgctggaggagatgtcagcaaagggcttgactttgaattcacaagggtacaatggaatgatatatgcactatgcaaggatggcaggatggacgaggcgatggggctcattcaagagatgagaagtcaagggtgtaaccctgatatttgctcatataatacaataatttatcacttgtgcaacaatgaacagatggaggaagcagaacatatgtttgaaaacttacttgaggagggtgttgttgcaaatggtataacttacaatacaatcattcatgcactgctgcgtgatggaaggtggcaggatgctgtgagacttgcgaaggaaatgatacttcatggttgctcacttgatgttgttagctacaacgggctgataaaagccatgtgcaaagatgggaatgttgatcggagccttgtgcttcttgaagaaatggcagaaaagggtattaagccaaataatgtttcatacaacattctgatcagtgagctttgtaaggagagaagggtacgtgatgctctagagctctcaaagcagatgttgaatcaagggcttgctcctgacattgtcacttacaatacactcataaatggattatgcaaaatgggatggatgcacgccgctctcaatctcctagagaagctacacaatgaaaatgtgcatcctgatattattacatacaatattctcattagttggcactgcaaagtcagattgcttgatgatgctgctatgcttctaaacagggcagtaagtggtggaatagtacctaatgagcgcacatggggaattatggtacaaaactttgtcaggaagccacttaccattttggctgaccaggttgaagtgtattagaaacatgtgcttctctatgttatatttgatggttgttgcggcttttgaagttaccgtagcatccgttgttcaatcaaaatgaaatggtcatatcatggtgttcatcgctgatttcatcatgctcggtgacctggtatgtatttcccctcttgttgaaagtgtgtactttccatctgttaacccttttgttgacattgttctacagatggcagctgtatgtccagtgggtgatcgtagaataatgcagattcttcctgacaagaatttcaagttgtacttacatacaaaaggtaataacccttaaatttcaactcgtgtaaaattagaacaatagtgctgactgttgagatcttggcccaccatccatacctttgatttttgtaaagaagaaagagaaaataggtccagatcaatttgttcctaagatggcagatgcttacttttcatgtatctttcagctcatctcagattcctatctgtattgcggtagggccaatgaatgcaaagctaacattttattagaacagtctaccagtttcattgattctgctcctaaggttggaggtgtttccttatccattgatcctggtcctgccgtgggttcaacatccattctatgcttcagttctgggtaagtgggtgttgtgtaccgcaggcgcaagcgcgcgccagcctcatcgggagctgttgggctgccagcagatgtgcaggaacagatgccagaaaggacgcacagcgagtgaaggcgtaatcgggtgcttggatcacagtgctttgcttcgtttagattgcatttcttatccctttgaaatagcatctggtttccttttgtttagcattcggtttagccatgtaagccatataaatggcaccattttaaatgaatagagcaagcaagatcaatctcaattcttcattcccttgttctcagttttctcaatctctgctgctgtgcttttgccgtgatcaccatgggc

SEQ ID NO: 6520 - DNA, 12596 bp, Oryza sativa
  unsure (1)..(12596): unsure at all n locations
tgagtaaataaggtctcaacccaaacataatcagtctattttttgggttaatagaattcatgccactaaaattttcatggttttgaaaaataccatcattatttatctattatttatctatttagatccatgccattacaatttcataggaactcaaaatatgccactacgtagcattttctattttttagaacaaaattcccatgttcttcatccccttctttcatacttctctctctaggtggaggggctgctgatagccgacacaagcgagtctaccatcccgtatcgccctgtcgcctctccatcgtcgagttccaccgcccacgcgtttcctcgtcgccgagttccactgtctccgcacctccaatgagttgaacgtagcagttagcactctcgggctcctcaggtagggccgatgtagctgccttcgtcgaatgtgaaggtgtgggggcgatgctctgggatttagcgttgctctcgccagtggcaaatcgggccgtgaccggcgagggtgtttgagcgcagcagatccaaccatgtccgggtaaggaggaaggtggtgtggatccgacgcgacgaagattgtcttctccctcgttagagtaggagcagctctctctctctctcccagtgagctgcctcttgctggtgtcgggcgttgctccgggattcaatgtccatgctagggcaggcgatgcatatccgatgacgacggaggcaagggggcttggatccgcgtgctcgtcgctcctccccacccgcctcctctctcatctggcgacaaaccggtgcatgagaccactcccagcgtgacatgctcgtcgcagcgtcagcgagatcttggagacggcgtgtccagcaacagctcagtacggcggtggcaacgagctcgtcgcagcggcatggatccatacgatttgattttttttatggtgcttgattgtacgagatgtaggagacgtgatattttagtctaaaaatacggtagaaaaaaatgtacaacatgtcatgtatccaattttagaaatactgcagcggcatcttttcaattagtcgaattataatcttataaatttcaaaactagaaaatccaaataacctttgtttttttcccaccaccaaactctggtaatttatatttaatatttttcttattactactaccaaactcgaaaaatatttattttggcaagaaaataaaaccaaacatatccaatattccaaaatattactccctccatctcattttatattgtaagactttttttagttatctagatttatctactgattatgttttctatatatgcctagaatcattagtatctaattatatgaatttacgtaatactagaaaatcttatatcgtgtaacggatgaattacggatatacgtacagacagtaatagaaagaaagaacttgtcggtaaataaacaccacctccctctgtccaataaactgtacggtaataaccagcttattctccattcctccgggaagaagaagaagaagccggcgactcgccattgattccggccgccgccgccccgctcccccctcgatcggtcgatccggtgatggggctgctgttcgtggagctgctcccgcggcacggcgacgggggaggccccgcgtcggcggtgctcaagtgccgccggtgccgcgtcgacgccgcctccgccgacgccatcctctcacgggacttccgcggccgattcggccgcgcctacctcttcgaccacgtgtacgcgtcctccctctctctcccgcttccgcattgcgtgtgccttgtgttagctaggcggttcttgggatgatgatgatgatgatctttggcccaagggggtttcgttggtggtgggggtgtgttcgaatcggatcttgcggtggtcgattcggccttcgttttgggatggaaatcgatgtgggattggattgctggaaatgggggagaaaagaagctttggttgtgccacaatgtggatggattctgctggaattagcttgcatcgctgttgtcgtcgtggtcttctcttagattattattattattattgcaatgtcacaactgaagatttgtggtcggatcgatcgattagcatgttcgggtgaatcgatttgcggtatcaaatggatgttgttcaagccttcaatgtatcaagtttattagctttggcccctctggattgcctgcaggaacggacaccgatttgatgaatgatgggctcagccattgccattgcctccttgggggtggttttcttaagaacttggtagtagcattttgtcttgttcggatcattgcccttgatttatcgcctaatatcactgcgatccccatgctgttttctcaacctcctactgtatttctctacaagattgaccaccttaataccagctcaaccatttcttcagtgtattctagagctaattttgtgatactgatgtagttttggcttcaacaactagttttcacttcgaatcatggcaatgtattcagcttatttgtagaatgtttcacttcgaatcatgggaatgtattcagcttatttgtagaacgtttcacttcgaaacatggcaatgtattcagcttatttgtagaatgtattcaatatctttatgcttttgttctattcttttcagggtgaatatatccttagggcctaatgaggatcggtatctgatgaccggactgcatacggtgaaagatatctactgtagctgttgccagcaaattctcggctggagatatgtaagttaacttggaaatttgcttccatgatcatataatagttgcctcttatgcagattagatatgtgcattccgtggagaaacttgtagaatgttgcattctgaaaacaaaaaagttggatacaaacatgagttgaacaaacagtggataggaaaataggagtctctatgcttcttttcaccctcttctacagttctacttgtagtatttcttccttctactccaacttaaagaattctcagatttccataggctcattgtcctatcacataattagttgctaccttagcccagactttgcattagccacatcattttgtctcagtttgttatgtaattttattctcattgcgatcaattgataggatatgcatgtatctcaaattcataatatgcttggttcagtacttcagttggatatgtaaaattttcagattgatgtctatttttcagatgtgaatggcaatgctaccagtcaattatagtcaacaaacttaacatataaatgtgcatcaaattcagctttcaaaaatattatgctttgttttaggctttctattgtaggttaggcctacacttaatccataaccattcaatataataacaaagtcttatgtttaatactcccttcatcccaaaatataagcatttccggctatgaatttggaaaagtatctgtccagagtcatagcgagaagtggacggagggagtagctagttttgcatttgatagatgaggactaacattttaacaaaatacaacttgatgctgaaacatagtatccacaaaacactagtgtaggcctgtggggcctcctatgttaccagcacgataatgtggccttctatggtactaaagatttagttgctgtttgctgtggaactggaatatgttgggttagattctgtataaaccatttgtttgccttcatatctagctcatcattgcaactacatatgaactgtagttttctagtaatcctgtgtaataactgcattatacagctattttctcatctgaagttctgtgttttgtgacttccagtcaattttgtatgctactattctaagccctatgtcccatgaagattcaaggcacagatcctgcaagtcgtttagaaattttgcattgttcttgtacccattggttccatcctggcatttaagggagtacatcaactgtatttttttttattgcagttacagtggcatctttcccttaattaaagttgcttgaaccgacctctactgaaattcactttgtttaataaaccctgaatgtggcttatcttcacctatatgctaagttgcgcatctaaggttctctttcagttgcgtgtgggtaactgctaacttctgttttttttttcatagcttctctttcaatttttcataactgggagaatttatgtgtttgtgacatgtactcacccattcatcgtacgtattagcaatgcaataactttgttctggcatcaatacagctcatttaccatattatctcgatgtgacagtcttcagctcttaacactgcttcatttgtcacctcattgttttattttctctttttggattgttaatttgcacctataatgctctacaggagaaagcatacgaagagagcgagaagtacaaggaaggcaagttcatcctggagaaggccaggatgtggaaagaagcccggtgaaaaagactggcgccatggaactcatcaacctgtatgtatgtattttgtgtagatccaaaacaattcaaagattgtaacaacaactttggcggcgatcaaagtttgtatgcatgctgtagttgctcatgcagtactagaccccctcaaaagaagagatgaaaacagctgcgtctgatttgggggggacgaagattgacaacagaagtagagcatcactgtctttttgatgcaaattctggcacttcggtggtaacggttttaaccgaaaaatgatgaagtgccagagattaacatttgattagtgcttttggccactcatggcgcagttcatttcacactttgttgtggattagtagtactccctccggtttcattttaattgacgttttggacaatggcacagtctacaaaatgtacctttgaccttatttttctattataatatacacaataaataaatgcatgtttacttttataatagtgttttgaaagacaaatctatatatgtttatctagttttttttaaactaagtagttttgaagttattgatggtcaaagttattaaagtttgacctcaaccttgttcaaaacgtcaattattatagaaccggagggagtaattaatttcactttcttgctcacctggctttaccattcttctgtcggagtttggattgcaacctgaagattggccgagctgtatacgacatacctacatgcaaatatgcacaaaacacatacttgagagctatagatctaattgttgactatatccattgctaaataactcccaaacaacatactccaagcacattggagaatccgataatttcctcaacagagccccgtgtggccatattggaaattccgaagtgtatatcagaattccgattttttctttttgtccaactaaaccacttgtgtgaccatatcacaaattccgatattttcttcaacagagctacagaacgtcattttagatattccgacataacattggaaattctgatctattgaaaattccagcaacttgaaagttttgaaaggaactctgcaacatatttgagcaccaaattttcaacgctagatttcgaagtgatatcactctttatagtagagcttttcctatgacacaaataagagaaaaaatttaccataggagtttttcccatacacttttcatttccaattggatttgctgaaaccaatctttccataccatcaaagggctaaattcactgtgcacattctcaacaaacttgttagtcctccctattcgattgccattaactaccaaaataattaggggtctagacgcactttcaatctccctttttttttgtcgatcacaattcgattagaatgtaataaaaagatatatgtaaaaagggttttgggtccaatgatagaagtttagctcccctagaattgtgcataataggcatgtagagagctcccctaaatcttcacataagattgcttgaaagtatatatacatgacatagcagcattcacacatatgggctagaaacgataaataacattacatcacatagtttgatacaccacatatgcattaagttgaacaaatcttaaggaaataaaaacacacattgtctcatacaagcaagcccaaatttgtccgaccaacaacaatgatagatggaaaagagatgtggctctcccccctttggcatcgaggaccaaaaagagataaattaaaattggagagagaacctaatgccatatggagtcaatcatcatgcccatcatcaccactatcaccatgtcccacaccttccttctcctgaacgacaccactactagcttcgtcggcaaagggatcatcgaacacttcttcatcactttcattgacctcggagccatcgggggagcaaggaaatttgtagtctgcttcttcaattccgctcgccccttcctggcttcgatggcgttggacttgcacacattatagatagacttgagaattttccacaacagtgaagaagagagagtcggagtggagggagcttgagtacgtgcagctttagtggtagaccttggcctcctaggagtggtcatgggtttctctagcctcactttgagtccagtgtggtgcacctccttgtagaatcgaagtttggtgacttgctcaatcattttcatcaatatgggagcatagccaagactccactcaggagtgaaagatgtgaggcgaatctcctcccaaatgaactcaaacacatcaaatttcttcggagaagccctcatccttgcaagaatgttgtgagtgtaagattggacattgttgtcatcgtcatccttgggagtgagtgttttgcgaatcatcttgttgagataggcaaagaaaggaagcataccctttgttgtcccagggtcgtactccaccttatgattgtacatgaagtcaacctcatgaggctccaagaccttgtcatcatgcaaccaatccctgtcttcatcatcatcaaaggtgagatccaaaagagcagcgaattgactgtagttgatgcaatgccattccccctgtgtcatccagtgcatggtctttttcttatttcctttggtaccaaactgtggcatagaattgacagatgatttcctcactccaatcatatctcatgctcatgaaatccttgatccccatggcctcacaagcctcaatcacctcattcatcacggggtcgccataagaggcagcagctctccaattaatccactgcatgttggacttattcatgataaccgcctcatagaagtcttgctggaaaagagtccaaaaacgaggatcggtggctgagcggcatccattctttgggatctccactcttatcatctgcaccttcttagtcttggcactccaatctatggggttgcgaacatgttcagcacttcgagcggggaggtgcacgaacaaaggactgatgagagcacccttctccctacattccccacccattgtcggtatctcctcttgtacctcaggttgggtactagaactagcacctgcaagacttgttccaacggtggtagctttcggcttcctaggtgccctccttttcagcaaatcaccacccctttccacatttgcgacttgagtttcctccttccctttacaatcaaaatcatcaccatttgactccgaggaggaagatcgaacccgtcgccgcttgccattctaagtcttgtgcttggtgtgggccatgaagctctccttggaacgagtggaatagcagaaattttgatccttgaaggcccccttgagcatgaaagaacactgagtgagagtgatgactgagtagatgattgacaagagaattgaaataaaaaaataaaggctgcttgaactggtctataaacattggacattccaataagtgatcagaatttctgatcgcttcggattttccaaaaagcatcggaatttcatatcgacccgatcggaatatacattattttcagacatagcccaaacaatctcgacatctagatttatagccaacgaaatcaaatgatactctaggcaaggtttctatacgactatagcaacatcttcaccaaaaggatttgaaagataatccctagaatcatagatcaagatttggacaagaaccagggcaaagaaggggcaagaatacctcaaaaaagagagaaacacgccttggtgaagatgctgggaagtggatgccgaggatgccaacgaactccggcaaaggcttgccggctcagctgagagtttcccaatgaggatgcaccaccgaggttgcctgcctgagaggagttagaggagagtgagaggtggcggtgaaaactgaaagagtgcaagaatagaagtgaaagggtatgtatgttcagttcaggaaaagggctgagagagagacattgcactttcggaaatttctgatatgaactttcggaatttccgatcaatgtaaaggatttctgatctgtgccgcgtggacgccatcctctccagggacatccatggctgcttcggctgcgcctacctcttcaaccacgaatgtgagcctcccctcctctctctcctccaccccttgctcgcgcattgcgtgcctagcgaagcgattcttggatgatcctgggttcttggccggctggccgcaggttctgttgattggccgtggtggtttggaatggaaatcgccgtgggtgcgagaaattttgggggattggattgtctggaattcggggaaagaaggtttggttgtgccaatctgcatggattctgttggagtcgtggtcttctcttagattattgcaatgtcacagctgcagatttgtgttcagggtcgattagcatgttggactgaattgctttgcaatatcaaatcgattaggccatgatgtaaatctgttgcagtaacagatatcgacttgattttgttgttgacatgcacatcggtttagatgaatgattgcctcagccattgcctccttggggtggtttgcttaggaacttggtagcattttgtcttgttcagatcattcccttgatttatcgcttaagatctcaccacgatccccatgctattgtctcagcctcctcctgtatttctctaaaagatcgaccaccttaataccagctcatctccatttcttcaatgtactgtataatagagctaattgcttaatactgatgtagttttggcttcaagagctaatttccagaaaccacctaacatatggaccagtttgtttaattactagattgactttggatcatcgcaatgtattcagtttatttgtagaatgtattcaatattgttcatgcttttgttctgtacttttcagggtgaatatatccttagggcctaatgagggctggtatcttatgaccggactgcgcgtataccgtgagagacatctattgtagctattgtcagcaaattcttggctggagatatgtaggttatcttgaaaatttgcttccatcatataatagttgcctcttattttttataacatataattactaggcaaagtcctggtagtgctttaaatcaaaaaatagttgccccttatgcagattacgtatgtgccttcctgtggagaaattcgtagtgcgttctgcagaaatttgttggatagaagcatgagttgaattgacaatagtggataggaaaactagtactccaatctatacttcatttcaccttcttcttcttgtagagtagtagtgtttcttcatttcagtaattctcgtatatttccataggctcattgtcctgtcacaattatttgctaccttcacaccgatctttgaattagccatatcattttgcctcagtttgatttgtaattttgttctcattatgattttattcatgggatgtggaccatgctatctccattcattatcagattgctaccagtcaattatagtcaacgaacgtcacatataaattagacctacacttaatcaataaccattcaaaataataaaaaggtgtaatgactaatgtctagctagttttgcagttcatagatgaggctaacattttaagaaaatatggtttgatgctgaaactttaggagtattcgcaaatactagtgtggggtctcctgtgctgaaaaataatgtggccttgtatgttactcaagattttagttgctcattgctgtggaatatgtggctctagattctgtgtaaaccctttgtttgccttgatatctagctcatcactgcaagtctgcaactacatatgaactatacaactatgtaatagttgccttgattctgtgtaaaataatgttttgtgacgtccgatcaattttgtattttactattctaagccctatgtcccatgaaggttcaaggcacagattctgcaagtcgtttagcattttgcgttgttcttgtacctattggttccatcctagcagttaggagagtacaataactgtttattattattatttggcagtcacagtggcatatttgcgcttaattaacaaagttgcttgaattgatctctaatgaaattcactttgtttaaaccctgaatttggctaccttcacctatatgctaagttgcgcatctaaggttcttttcagctccttgtgactgctacttttggtcctagcttctccttcaatttcttgtaactggaagaacttatgtgttcgtggcatgtactcacctgttcatcatacttactagtaacacgataactttgtattctggtacacatctcatttatcatattgtctcgatacagtagtatttccttgagggctgtgtacatccattgtggatgtagaggccagattttaatccattttctaaaaaaaaaatgtagtatttccttgagctcttaacactgattcatttgtcacctcattgcttttttttttctggattattaatttgcacctataatactctacaggagaaagcatacaaagagaacgagaagtacaaggaaggcaagtccatcctggaaaagaccaggatgtggaaagaagcccggtgaaaaagatctggcgccattggaacacctcaacttgtatgtatatattttgtgtagatccaaaacaattgtaagaacaaacccagatgaaaactgtgattttaattctggtactttggtggtgacggttttaacctaaatttgatgaagtgccagggatttagtaacatttgattagtgctttggccatttatggcgccgttcattacacactttattgtggattagttaatttcactttcttgcttaccgtccttctgtcggaacttggattgcaacctgcagattggctaatctctacaaaaaaatggtaatttcgtagtcttccattcgcagtactacacaaaatttaattttgatgcattcactattttaaccaaaccaaatttcggtaacaagaattttaagtcactcaactataggccgagtttaatttacgtcccttgaccataaaatcggctatacaacatctctcaattatcaaaaccagtccattttgtgtctgggtttcataatggattttgttctacgtggttgagtgaggcccacatgtcggtcacatgagaagaaaaagaagagaggggtgctgaattgccagtgaacactgcagagggactcgattgacactagtttttgataattgaaggattctctatatctaattttatggtcgagggacgcaaatgaaattcaaaatataactctgagggacctaaagcagaacaattccaggatagattttttgttttacctgcactgtggtaaagaacaaatttgtgttaaattatgaaattttaataatattaccaaactattgataaacttgagtatattataccacggatttgagtatttttccttcatgtgtgtggtagtgaataacctcctctatttcttaatttctctcaaagttctcttagcgtgtgtttggttttgggactaggtttggttctgggactaggtgggatgggatgaaaccatccctgatttgaggattggaatgattccattcgggtgtttggtttgtagaataggacgatcccagttttttgtttggttcaaggaacgagggagggatgggatgagcgccgtttgcaaccaccgacaacgccgtttgcaacaaccatggccgacgccgcctctgccctcacctccgaacgtggtcgccgccggcctccttgatggcgtcgatgagcggctgcagggggctcggcgacggcggcggtagacggctcgggcgacagcggcggcggcgggctcggccgacgtcggcggcggtgggctcggcgacgacgacggacgggatgacctaaccgagcgctgacggcgatggtgtcggccttcgcgcaaagcagccgcggctcggcgacgacgacgncggcgaggtccgcgcgggagagggagagggagagaccagtggagaggagggcgagcacgaccaccatcgtggtcgggcgggcggagaagcgcgacgactcacggtcggccttcgcgtagagcagccgcggctcggcgacgacgacggcggcgaggtccgcgcgggagagggagagggagtgggagaggccggtggagaggagggcgagctcggccaccatcgcggtcgggcgggtggagaagcgcgacgacgcacggtcg

SEQ ID NO: 6521 - DNA, 4873 bp, Oryza sativa
aaatgttcttaacttatttttttcctctgaatgcagatatgccaaaagttcaagcctcttagcaatagaattactcaacgaaccactggcaccagatgtacctgtggatacattaacaaaatactatcaagacgcatacaatgctgtaagaaaatacactttgcaagcctatgtaatcctgtcaactcgaatgtcaggggatccaacggagtttctctcagtagccagcagtctctttggtgcggttatcgatgtgcattactataacctgtataacagcatgtttgataactacactgtggagcagaacatcaattttgtaaggaataaccgttcatcagatatcaacacggtcacaaagcagaacgttcctctaacatttgtcggtaggtactaatatgtggcactgatccctttcaaagaaaatatgtggcactgacatttttctcttgtttcttcctcttctgtttcacattacactcatatgggagaagtgcaaaattgatctcatttgattaatacaataagcaaaattgacaaaaaaaaattatatttggtcagatctattgaaaatttgaaaatgctggagtgctcaactgatacattgtttggtatgcgctcttctttgcaacaggagaatgggtggccgagtggtacgtggataatgcatccaaggaagactaccaaaattttgcgcaagcgcagctagacctgtatgggaaagctacttttggatggtcctattggacattcaagaacgtcaagaaccactggagcatggagtggatgatcaagaatgggtacatctccctcaataatctgcctccatcatcaccacccatccggtcggtgaaccttggcggctggcttgtgacagagggctggattctaccgtcactatttgacggtatacccaacaatgacctcctggtatgtctatactcaatttcatggtaccttcagttagaacattagccatttggatggttccctgttgtgttttggcagtgatctcatggtgtttcaaaaatcatgtaactttataggacggtaccactctccatatcaagtctgtgatccaggacaagtaccttgcagccgaacagggcggcggccaaaccattgttgccaaccgagtagtggcctctgattgggagagcttcacactgtggagggtagacgagacaacattcaatctcagggtgttcaaaaagcaattcatgggcattgacagcaatggaacagtcatcgcaacagcgactacgcctggtctgtcagaaacattccagatcgtgcgcagtgacaccgataagaatagggtgcgcatcagggcaccaaatgggagcttccttcaggtaatgttcactatggatattctgctagcagggctaattatggacattttattggtctatgttggcaaagtgcggccaggaaccaaacaaccttgtacacttatgtgatttaaacaggcatgcaccacaggataaaaacatctttggatgcaattggcaaaaattagtagtattttcaaataaatctctagaaacaaaaggaggactagagctgcttgaatatgccttctaacatgttgtgtttggtttagggttaaaattaattagactatgctagcttcctcacccaaaaaaaaaggttatgcgaggttttgtatgtactaactaaaaattccagttagcatgtatcttttgttccatcctttttctggttaggtggattatagcccaagttttccctaaaaaaattgcattgtgagtgcatttaacttgtcgatttaaaatatattatgtggattagcttaatccgagttcaagggcatgtaatgctttgactgactgaattaaccctactaccccaaaggttcttggtgggttagtacctggactaaaatagagttgattcataagcttgggttcttgaagaattacttgtgtgctcttgaacagaaagcttgtatttgaataaaatttatgaatagaaagatttctaagatgaaaaatacttcacttggcatttctaaattatgatcattctaaatttactcactaattttgaattgaaagtagtttatctagctatctccgtccttgactcaaaatgatcagtcttctctatttcttgatgttaggcaaagactgccaattctgttacagcagattatggtgaaagcacaaactggggcaatgatgatccctcagtgtttatcgtagatatggtaggtggtccacaaggggagtatcagatttgtaatggctatggtgcagagaaggcctcgcaggtgcttagggtaagacatataggccacttttcctccacttgtatttttaacctattatttgatggagaatagcagaaaactcactgcaatgtgtaagacaatgcagaaaaaaattcttagcctactatgtacggttataacattcatgatagctattaaaaaattaagatggttgtggtttctactaactgtatactgattctacaagtttggaactgttatgctatagaatggttgttggcagaaagaaagccgatcaggttaggttctttcataatttctatgttctaactattggagtatacgtagatataaagcataatggcagaaacactttttccctgagaactgcaggaagaagaggcaaatacactacaatattgtgcaattatttgtgttgcccttaaaacctaagcattttaccttcagtagttagcatcttagagggttcatattggcttcattaaaaaaagaacaaagtttcctccactaatatttacatatgttgcttcaatggatttgataattggcttgttaatttctgccatgttgctaaacctttgttttttgacttattttttgagtcgatgcaatatatcctatatatcctgtcttatattcattgataaaactagaggccagtgagtctcactgtgctgaactgtccctctctaaattgttattagtcaacaaatgacagtgggactctgaagaagcattcctgaatgattagaaggaaagcaacaattgcatttctttgtatacatattataatcacaaatccttctctgataactactagtacataattttccctttagaaaagttactaatgtatcttgtgtagaaattggtaaacatcttgtcaggaagaatcatagcaatgactatcacattttctgaaattgtatgttttgcaggaacattggagcacatacatagttgagagtgacttcgaattcatctcatcaagcgggctaaatgcagtgagaatcccagttggatggtggatcgccagtgaccccaatcctcctgctccatttgttggaggatccctccaagccttggataacgcatttaaatgggcagagtaagtatctccatgcagccatttatttatgaataagcacctcttaccctgatggccatgtcgggtgaagaaatataacacagatggttttagtctcatcttataaagaggacattggtgcttacattgctaatgtgcattgaaatggcaggcttgtaaaaagttcaagcaaattttccacctttttaccattaactaaactttttgttgaactgttggcacatgtatataggaattacaatattggtgtcattgtggacttgcatgccgctcctgggtcacaaaaccattgggagcatagcgccacaagggatggatcactagaatggggcaccactgatacaagcatcacccaaacagtgcaaatcattgatttcctcgcttccaggtctcttaacagaattcaccatcatccttaaacacaccatacaaatctatgattttcttgtaacgctatttttcaccttaattaatctacagatatgccaatagcccgagtctgctggcaattgagctactcaacgagccatggggaccggatgtacccctagaaaagcttaagaaatattatgaggatgcatacaacgtcgtgaggaaatacaccgcgaaggcctacgtgatcatgtcaaaccggctggcaggggagtccaacactgagcttcttgatttcgccagtaggttcccgggcgtagtcatcgacgtgcactactacaacctgttcaatgacgacacattcaaaaatttaaacgtagagcaaaacattgaatttgtgaagaacagccgcaaggctgagttcagcaacatcacgaagcaaaagagccctctcacgtttgttggtaagtagtgaggtggctctaacatctctggttgatttcctcttcctattttcttgcttgaacggtctccctcttctctgctgactggcatatattgaaaagttggaaattgcctttcaatcagaatttagacatcagaaggtttttaattctctaaatgatcgagaatttgaaattgtagaagaatatacggtcaataggtcactgaagttattgttccggtgcaggagaatgggcggcagagtggaaggtaaacggggcatccaaagaggagtaccaaaggtttgcgcaagcacagcttgatgtatatggaagagctaccttcggatgggcttactggaacttcaagaacgtcaataaccattggagcttggaatggatgatcaagaacgggtatatctcactgaaaatatagaaatagtgccataattctgtctggtgggtgaatacacattacacctaatgcaaaggccagaagcccagaactgtaataatgattttccattatctaaaacgaagtatcaatcgggttaacacgaactagaataagtctgtaaatcttgtttaattacggccaataaatcagttctgttagccaggtggaagcatgcatccagatgcatgcttgtattataagacttatattgtgta

SEQ ID NO: 6522 - DNA, 2758 bp, Oryza sativa
ggcgcgacgccgaagacgaatgcagccgaggacgcccccaatgccatggtgtcgctgacgccgccaccctgcacacccctccccccctcctcctggacttcattgctccctttgctcagacctcccactcactcgaggatggaggacgactaggcttgccactgccgcttgtcttggccgggacatgcccgttcttgatgatgcggcgggggtcggggaatagaggggtcggtggaggggcggagctctcgccggagccccatgctgccatgtagaagggcggggctccacgacgtgcagcgagggttccaatgaggaggaactccagcggaataaccggtgtaggtatgtgcagcggcgtctctggtgagtagtccggcgatggtgatggcgcggcgaaaatgctttgtccagccgtgatgaggacagaaggccgtcaccacgtcgggcatctcctgctgcggccgcaccctcactgtccacccatgggactcgcagtgatgcggtgactccaccagaattcattctggtgcagcgcacatgacgggcaccatcgaaggccctcggcgagtcgcgagggtgttggagtcggtgttgccggctctggtgttcctttgggcagtggcgccatcatcgtggtgttgtcctccatgtccagcgaagctagggggaggagaccgagggcacggccggcaatgcccgcaccacggcccctgctgtgtcgagtacggcgcactagagcccggatgatcctctcaagctgatgcatgagttgacggagatggcgagcacggatgttgcgaggaagggaagaaccggcatcgagagaacaggatgtgccatcttaccctccacgtgcaggtgagtttcaccgttctttctcagtagagcgttgctgataacgtattagagtacaaaatgaatgaacagtgaaagtgtgaattccctctcttttcattgatctcaaatgtccccttttatagggatgatttatgtattacatgcctaggattctcctaggatttaaggaggttttaagcctctaaatgtggttgttatatgacacaaattctccttaatatggctgttacaagattgatgattcatttgattgctgtcattgttgcgctttgatgagatcaaatatggcctaatgatggcttttgtaacaattgcaagccaagagtgacagagaagcagcacagatgaccaaatttgctttcttgaggttatttttggacaattttgtccatcctctcagtggctactattgtcaatatcatacttaaaacagtaggaaatacaactagctgcaaggttacgcatgtgaaaggggatttttttttttaatggtagctgccctaggatgaatatgggctgtcaattgctcttgatcaaatggatcatattgtactatactacgccgtacggccgtagtaaagggtagtcagaatttttggcagtgaagttcattgctattcttgtaactaaaggttgtagataagtgaaatttattcttccccgcaaaaaaaaaagagagcgaaaattactcttacgaaaagatcagatactagaaattaaaaaaaaaatgctgggttcttatctctcttatatagtttgcaacaaagcaagcttcctcatttagctatagcatcactaagttacaaacattatgatagcagaataaataaattaggctatggatatgcacatttatttgaaagctcgcaaccacatgtgtatgctgtcatgaggttatcacaatctttggccctgatgaattggtagcgtgcaaccaatacaatacaatacaattctctgctaagactaattctgatgagaggcattttcatcttctagtgttcccacatttccctagatcgtcaaggtgagtttccattaaatttctgaaaaattgcagccgtggagcaaccaagcaggaacaggcccaacgcaatacccaaagacattctagttcccatgacaccattccatgctattttagcaagaaaaaaaatacaatctaaaatggcaacagatagaacagaaacccagaaaataactgcaagaaagcaagttacctgttcgcccccctgtcctggccggcggcgagcagcacgccagcaccgcccagtctttctttcacatcgatccttcccagcaggacatgatggcttcacacagccgagtgagtgttggaaatcatctcctgccgtgcatacgcacataccatgtatagataaatatagttagaactcaaaacgctgatcataataatagacagttcaaaaacactagttactagttgctacagcaacaaattgtattcagtaatgatgcataatatttcaaccatcactacttttgctgcaaatacatcatcttcgttttttgtcactggtagcatctccactcataactaatcaacaaaagatagtagcaaatgtgccactggtagcatctccacccataactaatcaacgaacgttagtcaagcaatagcctagaaccacatgtaatcctaaaagaagaagaaacagcagatagcagagaagagcaaccatgttatgagtatccggtaatgatcagatgggacaggaatgcgaggtagtagggcgtggctttggcggcttagacaatgaacagcccatggtgatcacggcaaaagcacagcagcaggagatgagaaaactgagaacaaggggatgaagaactgagattgatcttgcttgctctattcatctaaaatggtggggct

SEQ ID NO: 6523 - DNA, 12509 bp, Oryza sativa
  unsure (1)..(12509): unsure at all n locations
agccccccactgccgccgttgccgagcccaccgccgccgtctcctgagaaagagcgcgcgagcaaagcggcggtttcatgccgtcgctcgtcacaggtgggaggagttcgtccgccagttttggctggaccgattgatcccggatctgagaggaatattcctctgtagggaccaacccatcccactcacccctgaaccaaacacccctaaaaatgggttcatcccatcccatcaaccaaacactaccttaggatggcacattgagctgacaagtgtattggtttgaatcaaatggagaaacaatttgattggattatttttattggtagtctggcaagtaatattaatcatgactaactatattttttggtgccacatttttcaataaaagaatcaaaatgtgtaccgtgaattccatatattgcaacttcgattccatatatttatactataaattttaaatcttagaacatgttttttcaatgctcgtcgtacaggaattatgaaaagaaaagaatcaataaaaagtattagaaaagttgtcgatgtttcatattcccaggtggctaagtatccgtgcataattgtgcctaacaaggaagagaaaatcgttgtgcggggtgccttgaggatatttcctcatatgctcgaagttgattccgactcctcgtggggtgtggatcccctaaagttgatgctaaaaccacccgacatagttgcaaaaatgtcaaccatccctctatttctaccggttgagattaatttctcctaattaactctctctcaattagtattgatttagtgagaatgtatcttccttttcaacaatgagataagtaacataaatgtgtatatccccgtgagatcggtttatcctcattctgcatattgaaatttttttttgtctcggacaacactacttgaaattgatctaatgaaaacaaaaggaatatgcatatgttttctagattatgttgttcttgcatgttattttggtaaagagtgcattattattttttagtgttggatggagtgtaatcgttgttgtggaagggaacatcttaaaacagtagttttcctttaattccacactaatcaagttaattaagtgcgatgaggtgtcttaattgatctcatccgtataaacaaaataatggctataagtttgttaaatcgtcctataggttgtaaatgggccaggtctttccgtatcggcctgggcatgtatttatagttcacgacccaagaatggcatggcccgtttggctacgagtcatgttggcatgacccgtctagccatgttgtgcttgggccgccaccttagccccacgtgccaacacgacaattgcatgtagcaaactagcatgacatggtccaggaatggcacagcacggccagggctgtgcggcatggtggcgaccgacgaccggcgccggccaacaaccaccagttgagcagctactatcgtgcaggagctaggaggaaagaagggaagaatcaaggaagccaggggctcgaggcagaggaagcgatgatgggcgctcatcgatgtaggcctgcacggtgacgtggtggagcggcctgccccattctgaatgtgtcggtcgttgaggcctcactagctcggggtggaggaagtaggaagcgaagggccatgatagtgtttgatgaggaggaagaggaatgtgatatcgttgagcggaggacctctctagagctttactgaagtttgtgcggtgggatgcaacggactctattcacctttttttcttggtatatatcgaatttgggttacgggcctccacacaacctacatacccatttgtaccaggctgacacgacacaactaaacatctcactggatcgtgtctaggctccggccttagcatgtgggttgacacgacatggcccattggtgagccgtgcctaatcgggtcatggccaaatgtacttatttatccaccgtcttaaccctataaaaaataaaataaaaattcatcgtcttaatggcctagccctaggggatcctgacttcctgaccctttgtgagttatcttgatatctgacgggaatttaattatttggcactttacggactaccactcgtgagatgtcattttttctggatgaacttacagaaatgccattggagggagagagagagagagagagaatctttacaaattgccaatttgcatatgtggaaggatatgtcaccttgccaacatggacatgaaaatgacccatttacccctggtttgacctcagtgtatattgaatgtgccaataacatacaaatacaatatttgatcaattgtatactatatatactagcatatgaatagattttcatgtttcaattttttttatggatttatcctgtgcaaaaattttagtaatgtgaacaagatatgagaggataaatttgtaacaaatatttgaagtacaatgaacctattggatctgctagtaaatatgtttgtatatagttgctcaaatattgcacgtgcattttatcggcatactcaatgtacaataagatcgaacgagggcaaatgggtcattttcatgccccctccatgttggcaacgtgattagcaatttgtaaagatttactctctttctctagtggcatttttgtaatttcatctgaaaatagtggcatccaatagcctagttgtaacaatcgaactgaaatgggggtttgacaaaaaaaaaaaaacagaaccagtgcctagtctagagatgtaattgacttgagaaaaatcatttaaaccggattatctgcagaaccaaaggaactagggtggcctagggatcaaacccccaacggtcaatgcatatgggttctttcacaactttacctaacctttaaatattttcatgccaaaactgtataaaaaagtgagtacatcgtattttagatccaacccttaaattttataaggaaaatagttgggcccgttactatctctacctatatacatgcgtgcgcacctgactatttgggttagttgctaccatgattttagaaatatatcttatgttgattaaaccaaaattctcaatataaataaaatatataattttactattttattgaaccgatggaagaaccggccaatcgatggattcattcaccggttcgaacaccggtcgggtttagggtttagagaggcaatccgtaggtggtaggaggggccccatccgtcatcctgctgcttccgccgcgtccatcctccctgcttaggttagcccttcgcacatcctccgccgccgccgccgacgatccccatcaatcccgcgagcgagcggggccccgtcgttcgtcctcctgccgcttccgccgcatccatcctggttagcacctcctctttcccatctctctctctctctcgacccacgcacttcacttcttgtcgaatttgcgttaaccctagttagctcgctctgtgttctagaaatttgccttgatgtttggcatgttagatccgcccatggtagttgggggggggggtggagcgagtgcagactgatttgtttacaggatgatttgatagatggtgcgtaattttgatgtggctttctgatttccgctaatctcgtgttcgtatctgtgctactgcagtaggatcgatggaggcgaagttatcgttttctcaggacagcccgccaatttccataatttctgctgctaaggttgccggtgtctccctgtccatagatcctagtcttgctgcgggctcagcacccgttctatgcttcagttctgggtaagtggctgctcttctctgtatgtgtttttttttcttcttgtaggattgcataaggttctaggcatttgtttagctatctggagttgattagctataagtggagatgctactaatggcaaaaataaagatgttgttttctttttagcaaaatatgatgtttgaaacgttgtgcatcattactgaatgcaatttattgctgacttgtgttttccaagtggctattattatgatcattgttttgattatatttttcacttggctgtgctgtacttgttttttcacatagaagtacatgaccaattttagtttccaaattatcactttacttttacttgtcctttattttatcttttgggtttactcaccatctggaactgatagtttctcatgggaatctttgtttctacacagagaatcactccgtggtatcaaccctattctcgagtacattgcccaatcctctccaagcctccatggccgagatgctattgagtctggacatgtatgctgtgaccaagttcttgctaaaacatatttcataatctttgttttgttagtgttctaaattgctgttgttaatgaactggcaggttgttgaatggcttgaatacgcccccaccttccttttaggatcagaatttgaggttgcctgctcatttgttgatggatacttgatgtctcggacctttctggttggtcatgttttaacgattgctgatatcactgtatggtcaaatctggctggtgagccatgggcttctttcacgttctactctcaagcttctcctatgcttcataatgtgcgctaacaattgatgtatatcttctctttcagggattggtcaacgatgggagagtctacggaaatcaaagaaataccaaaatcttgtccgttggttcaatggcatagattcagactacaaagacacattgaatgaggttatagctgcttatgttgggaaacgaggaattgggaaatcccctgcaccaaaccttaaggaaaaggttaatgactcaaaggatccttcagctccagaagttgatctccctggtgcaaaatttggagaggtgtgtgttcgctttgccccagagcccagtggttacctccatataggtcatgcaaaggctgcactcttgaacaagtactttgcagaaagatatcaaggtcgattaattgttcgatttgatgacactaacccttcaaaagaaagcaatgagtttgttgaaaacctcctaaaagatattgagaccctgggaatcaaatatgatgctgtcacatacacatctgattattttccaaagctaatggaaatggctgaaaaactgattaagcagggaaaagcatatgttgatgacacaccaaaggagcaaatgagaagtgagagaatggatggtgtggagtcaaagtgcagaaataatactgtggaggaaaatctgtctctatggaaagagatgataaatggttctgaaaggggtatgcaatgctgtgtgaggggtaaacttgacatgcaggatcctaacaagtcccttcgggatccagtttactaccgttgcaacactgatcctcaccatcgtattggttcaaagtacaaggtctatccaacttatgactttgcttgtccattcgttgatgcgctggagggagtgacccatgctcttcgttccagtgaatatcatgacaggaatgcacaatactatcgaattcttcaagatatggggatgaggagagtagaaatatatgagttcagcagattgaatatggtttatactcttcttagcaagcggaagctgctttggtttgtgcagaacaagaaggttgaagattggacagaccctcgtttccccactgttcaaggcatagtacgccgtggcttgaaagttgaggctttgatacaatttatactccaacaggtattactatctgctagttagctcttgctttgtgttatttacatatgaaaatgatgaatcctgattgcatgcccatttctttgctgaagggtgcttcgaaaaatttgaatcttatggagtgggataaactctggacaatcaacaagaaaataattgacccagtttgtgcaaggcatactgctgtgttgaaagatcagcgtgtgatcttcaggcttactaatggtccagagaaatcatttgttcaaattttgccaaggcacaagaaatttgatggtgcaggaaagaaggcaacaaccttcacaaacagaatttggctagattatgctgatgcatctgcaattagcaagggtgaggaagttactctgatggactggggaaatgccatcattaaagaaatcaagatggagaatggagtaattactgaactgattggagaactacatcttgagggatctgtgaagacaacaaaattgaaggttacatggcttccggacatagatgatctggttcctctctcattggtggaatttgattacctgattagcaagaagaaggtgagttagcaattccagctagatgtagttagcatgaaagcttcttgcttgccttaactcaaatagtctgtcttttttacttgatattacatgctatcttttctctagtttctctatgtggatatcatattttcctgtacagtaatgttttttaaaaaaattgtggaactaaaccttctctcttttgtcatgcaaaatgtgaaccatttcttggttggagttagctcctatattactcgttcatttatcaatgagttaacactgaatgtcttctatgtttgtggccatgtgtacagcttgaggaggatgagaacttccttgacaacctgaacccatgcactcggaaagaaaccctggccctaggagacgcaaatatgaggaacctcctgcgtggggaggtcatacagcttgagaggaaaggctattacaggtgcgatgccccttttgtcagatcctcgaagccggtggttttgttcgctatccctgatggtcgacagcaggccagtttgaactaggcggcatgattctgatgagcttctcaagtcgttgagttgtcagagattcctgaatgctctactgaaacactcccatctcatactgtaatgtcgcttatgtgtcatgggtgatttgcgctaagttttggtgcacagtttaatgtttctcatgctccatgctccagttattaagaagacacaacatttcttagatggcaacgtgttagcttggcgatatcatactgccagatacaagcatctgaattttttgaagactaatatctgatattgcttggcatctgaattttttgaagactaataccgctctgggaaactgagttgaggacatttctggtccatattgcttgacatgcccttttatgtttccagttgttgattataactggtgaatctaatatcagtgttcgttggttttgtgtcagaaatcttttctacttttgcaaatttcatttgataaaattcctactttttttcctttagaaaataaaatgttcattgctatatcatcccctacactaacatttgggtctcacatttcatattattacactatcctttaataaagttctctcccattttatgttggctcttcaaaatcattgtaacgatgaaaatgatgtaagtactatttggactaaatatgtgcttaattgatttatgttgtgttcttttccccttctttctcaactcaactttctctttttttcatgcgcatgcttttcaatctgcttaacggtgtgtggttttttttaaaaaaaagttttctatacgaaagttgttttagaaaatcatattaaccctttattttttaaaaaaaactaatacttgattaatcatgtgctaatgagtctgtgtgggattagttaacaccaaatgccgatcgcagccttaataaggtcaatttgtttttcgttgaaatgccgattcttatgccagtgagaaactgagaattcattagaaatgcctatgcctctaaaatgaggcttatgcagtcagtcattgtaggctaacgaaaacatgttggttagttgattacaccttgcgattacatgtaatactggttgccacttgctacatatactgatatatacagatgcagtacataatcacaatccatcaggtttgccacaccagtttgaagttagtcaatactggttgctacatatacataggcataatccatcaggtgccaaataagtttgaagttacagccacaaacgaggttctgaggtcttccaggaaataggctgcgaatggaattgcatgcagttttggtactacacgcctgattttgcaacggcgtattgtcctcaaaacagatctctatgaacaataatccttggcgacatatatttccctgctttggattgatttcaccttcaagattacaatgaatataataacttggatgttgaaggatattaacacaaacttatgatttgtatgcctcgttcatcatctacgtccattgggttttcacagatccacaagccctgttcattggagcggcgcaaactaatcagcagttcattctttccaatttggaattgcattatctagtcagtaataattagatgaaatatgaagtacgaaaagtcgaaaacagtgagacctcaggatcttggaagtgacaacatggctgctgaaagccaaatcagtcccgaaagatggtatttttggttccagatttcatcacaggtccccgacaaatccatagaaaaacaaatcaaataaaaataaaaaacaacaataactataatggcagtaccaacatcatctccagattgggttggcctcagaattgcagaatggcagcatggccgccgagcggcggccgatcagccccgaaagatggtgtttttaatcgaggttttcttcaccggccaacgcagacaacagtgggactcgttcttaactcttactagtatgcagcaacaaaagaaaagtttaaaagaagaaaaaaaaccaagaacttgaggaagaaacgaaagaacagtcttggtagcaacggatcagcaatggacatcagaattgcagaattagcatcattgcacgcgcggcggcgccaaatcagccccgaaagatggtgtgtttttcttgcggtttttcatcaccgtcgtccaatccgccagccagacaccaaggcataataataacaagtgaaaaggcagaagaaacgaactcagctttctttctcgatggcaaactcatcgcaacggagaacaaaaaggaaaaagagagaaaaaaaaaaccaaacgagacccaatcaataactcagatctgctcgtcaatggcggaagatggagcggcggcggcggtaacctttgggtgcggagctaagtgagggagggacgagtagtttatatggaggctttgaaaccctagctagtcatggcgatagacgggccgggccctgtggtggagaattcggatgacgtgtacctgaaggcccagaggccggcccatgagccattcacagttcggtctcacctctcaagcgcagagattctgagccacggggggcgtggccatccgaacttcgtcggaacctgtcatcaggaggaagctccgtgacgtgcgaggagagaggcgaaaccgcattggagagaccgtgtcctcaaatgcgaagcagcagtcccctcgccaccgtcgtcgtcgaggccgccaccgccgtgccggccccgccgccgttgtcgagtcgccgccgtcgtcatcggactactccccccgccatggagagggcacgggatgccatcatcatgccgcccccgtcgtcgtgctgccaccgctgtcaaaccgccgccgccgtcatcgaagaaaattatttctaatttttttctggattttagggtgtttattgtaaattttagatcttcacataaactgaagataatattataagaactgaaaagaaaagtattagggactgaaatataaaattaaaaccacttgcactatgaataattcaaattttataaaaactaaagcttcatagtgtgtgggactgcctttgccttcaagctgtcgtcaccgtctcccgaggtcagatccggcgagaagggggtgcgaactggccaccagtggtgctcggtcgagctgcgccaccgctgcccgtcaccgcctcccaaggctagatctgacgagcctcagaccagatcttgcgaggagtaggaaggcagcggcaccccgacaaggaggaaggggatcgacggtgatgggagggagagcgctagtggggggagggtgagctgcggaggggaagcgacgttgccgatgagaagaggggaggggaggggagaggagccgctggtagggagagatgacccacggtggagagggagcgatcacgctggtgggggaagggggaggagcggagagggagcggaggaggaggaaaggcaccactggtagggacaagtggcccgtggtagagggaggggaggggaaaatttcgatctggggttagggttttttgcaccagcggttttgaacgagttggaaccgattcagccgtccatcaaattgaacagctcagattgatcgcgtgttgagtcagcccccatactcaggccacagcactgctgggctaccgcgcttcatgggtcgcgcgcgcgaatgccctagcaggttggtgagtcagaggtctttttttttcttttttttactttctttatttctggaggaatatatatttttaaaggctcatacataaaaactaaaccctaatcatctaatatttttatatttgttataactttagtttacctgttgcaacgtatgagcatttttctagtaaaaactttataaaagaattctaaatagagttaattgcactttgtctaccttttatttccaaagtttcactttgggccaccctctagctaatatttgcagtttggaccacccaagtcactttttctagctgcatataccctctaatctcgtaaagaatagtctacatgtaaattgggaagattatcggtttatgagtgccgatgtgattaaagttatttatgtgctcgagaaaagtttttgggggtggttcaaagtgaaacaaaggcaaactaatctagtccaaagtaaaagagatggtttaaagggttgtcgaaagtgaaactttggtgataaaagatggccctaaacgtaatttactcttttattctataccatactagattagaagtttacatgttaaattatagtggtttaaaattttatatttcatttaaaatagaaaaataagattcaactaaatattatcatggatttgtgaagctaggaatatcccgtttcgaagaaatcttggaccgggagttataccaaatagggacttaacattgtttgtagctcgaacagtgatcaaaaaattatttactacttcttttccaaaatatagactcataacgttagattatttctaattcagttctaggttattttattttgagtaaaatacatggctaatccttaaacttgagagcaggtgtttcttagatccctaaacttgaaaattacacatataagtccaccatcctggtttaatgaaccatagtcggtccaaacctcatttgacccgagctaatcgtcaacatgacattctatgtaggcaacatatttacagctagctccctccacggcgaagagtggtggaagaattacaatttgccccttcatattaaaataccctggaggccgtgagggaagggggagcacgtgtagtgaggccgggtcgaactattttttttgggatcgtgagagagatggaggctgccgggaggaagggattagggggagggaggaggaggcggaggcgcacggggagagaggagttacgtgtctgagccttacatattttttaattaggtatatagattggtagtatttgttgttggctgacttaatgatgaataaataaggtaatagcacaattattagcgaccaaacactagtaaacaatatcagacggctcctatcgttagggtttacgtcattgattagatagggggttatcgctaattcgatagatttcgaagaaacttcaccgaaattcatagaatttcattgaattccgtcgaattttcgcctgagttttgtactaccttgaggcatcgagcatgtgcgccacaactgaacttgcactaccccaaaagagtgatacaaatggcggagcaccacccgcctcgcctcccgccgtccgccgccggcgccgcggcgacgtcgtggccggagctcctcacgccgttcgacctctcccgccttcgagccacgctcgccttcccgccgctcaccccgcgccgtctcggccgccttcttgcgctcccgctctccccgggcacctnccttcttcttctcacctggtacgcctcctcccacccggcacttttctcccttccgatccggcctattctcgccggcggagaccccgaccgcgccctctctctactcgacttcctaccgcccggctttcttccactccgcgagtcccttcttctcccggtgcttcgaattttgccttccggtcgcgcccttcacctgttcgaccaattgccccggcggttcggagttcaaccgtcgttccgctcttacaacgtcgttcctgtaaatgcttgccaggagcgactggcacgccgacgcgtttgtgttttaccggcggatgtgtccacaaggacctggttccgcccacctactttattttctggattgtcctggcggccgctcttgcgactttggccggccaaaaaggggctttggct

SEQ ID NO: 6524 - DNA, 21069 bp, Oryza sativa
cccgccccctcggggagacagagggaggggtgaccatgtcaccctcgggcccgacctccccgagggggtcaggccacgggggtgaccgcggctactcaagcctctagtcacgatacccccggtcccatgtcaccgacagtagcccccggcgttacgccagggcgatcgcccccctcgagggaagcgctcgggcgtgacgccactccttaggcccggtgacaggttgggccggtctctacaggcgggcagaaacccagcggtcgcaaatcgcgcgcatcggcaagggaaaaccgaccgacaataatgagcagcctcttcaagaccgcaacattactcgagcagcgtgcgaatcgggacgagccggttcgtttcgcctggagacatgatgatggcgcttttcacgattggcaagcgcagttaatgcgcgcacaatctgccccatctcaaccgccacggccgcacatctgccgcgtgcgctgcaaacgggcgagtggggttagtggaggcgtgggcgcgagaaacgagggggcgaggtagtgggcgcgggaagcgaggagccaggcatagcaagggtacaaagacgccaaggaagggattcgtttccttcctctcgccactcttccccttgccttcgccacttgtgctctgactcttcgtttcctgcgccctacccttgccatactcgctcgctctcaagctcctcctccgccggcgtcatggcacggggctccgcaccgctcgatggtagcgtgctgctgccttcccgcatcgtgagcgagaggcaggctgggctgccgcgccgattcatgccggaatctgccaccggccgggaggtggtcgcgctgggcgagggacgcccggcgccacactacccagggcggtccgtcttcttcctctctttcgcaatggctaggctggtcccgccattctctaattttttcatggatattctggagttttatgatctccagatggcgcacctcacccccaacgcgataatgacattggccatcttcgcgcacctgtgcgagatgtttatcggggtgcgcccatctctccggctgttccggtggttcttcaccgtgcagccggtgtcgccgccgacgatagtcggtggctgctacttccagccgcgggggcaggtgctgaaccgctacattccctgcgtcctccgcaaaaagtgggacgactggaagagcgattggttctacacccccctcgccgacgaagcgcgcctccgacttccgagccagcctccagcgcaggcctccagctggcgggcggcggtagatctgggagacggctacgacgccgttcgtgaccgcttggcgggtctgcgatcccaggggctcacgggggccatggtgttcggcgactatcttcgtcgccggatcgcgccgctccagcggcgcgcccggggcgcctgggagtacacctggcccgaggactccatgaggacccaccaggggcgcacatgggactgggaccctgaggacttcaggatggtggtccaacgggtgctaaatctcagctccgtggaggcatccctcatcccccaagaggtcctccccctctgctgcgatccagagcgcgccaacatcctgaccatcatgcaggaggtcggggcgtcgggggagcgggccctccgaggccacgatggcgcgggcgggagccgcaggggggaacaatctaccccaggagggggtcgtgcttctgggccccgcgacgggggcccggggggcagccgcccggccgacgcccgggggaagaggaagcaggagggtaccccttccccatctcctccccgagggggcggggcggtgcgtgccagcagcaggcgcccggagggtgccgtgccgacgtcgcagcccgagggggagcgaaagaagaaacggctctgcaagatggggggaccgagccatgccgggggaacctcatctcgtctccgaggtggtcgtttagccgacctccccgcaggttcgtccctgcgctcgccgcggccgtattcattctcccatctcccaaggcgagttttcactcacccgtttctttttgtcttctggtttttcttctgcctcagcgagatcccgtcgcgcccctcccgccattccaagtccggccggtctgaggccgaggagacggcgaccgcggaagcccggaggcgggaagctgaccggcgagaagccgcggaccgcctccgggaagccgaggaggccgcccaggacgccgtccgggttcgccaggctgaggaggccgctcgggaggaggccagacttcgccgggccggggagtccgtccgggaggcagaggcggcgcgcgcacgccaggcggcctgccaagcccccgacccgactccgcccgaggcgacgacgacttccgaggccacccacgacgaggccgcgggcgcgccgctcgggcccgacccctcgggcgacgcttgggacgagccagcttcagggggcgcccccgactccggcacgtcgattggcgggccgagccgcgcggcacccacaccgaggcggctctcccctctgccttccgctgccccactgagcgcggagcccctcctgcaggccttggccgccacgaacaccacggtgctggacgggttaagtgcccagatggaggtcctgcaggcagagcgggcagagctcgacgcggcgtgggcgcgcgtcgaggaggggcggcgctcggtggaggccatggtggaggcgggccgcaaggcacaccgccggcacacctcagagctcgaggcccgtcgtagggacctggcggagatcgccagggaggtggaggaggagcgggagactgccctcatcgccaccaccgtgctcaacgaggcgcgggacgacctccgcctccaatacgggagccgggcggcggagctagagaagaagctcgacgccgctcggggagtccttgacgccgctgctgcacgggaacggcgggcggcggagaacgaggcagcgtcccggcagcgcgaagaggcccttgaggctcgcgccacggcgctggaggagcgcgcccgcgcgaaggagagggacatggcggaccgcgaggccgccgtcgccatccgggaggcaacactggcggcgcacgaggccgcctgcgctgaagaggaatctgcactccgcctccgcgaggacacgctcaccgagcgggggcgagctctcgaggaggccgaggccgcggcgcagcggctggcggatagcctgttcctccgcgaggcagcgcgggaggagcaggcgcgccgcaatctggaaggcgcccgcgccaagagggccgcactggatcagcgggtcgctgagctcgaggctcgggcgaaggagctggatgcgagagcgcatagcggcggggcggccgtgggcgacggcgacctagccgcccgcctcgcagccgccgaacacagcatcgccgagctgcagggcgcgctggactcgtccgccggggaggtcgaggccctccgcttggcgggcgaggtagggcccggcatgcttcgggacgccgtctcccgtctagaccgcgccgggcggcaagcgggcctctggggcgggcggtgcgcgaagtatgccgccaaccaggggggcctcgcccagcgcctctcagagatggccgggaccctccagcggctccccgaggagctcgaggagacgatcaagtcatcctcgagggacctcgcccggggggcggtggagctcgtactggcaagctaccaggccagggaccctgacttctccccgtgggcggcgctggaagagttccctcccggaaccgaggacggcgcgcgcgcacaggtccgggacgccgccaaccacattgtccacagcttcgacggtacggcccctcgactcgcgttcgcgcttgactccgacgaggagggcggtgacgacggtgcgggcgatggcgacgacgaggctggcgacccgggcgcgtcggagtgagcctccaggcccccgccaattttaatagcttttcctttttcttccgaggccttcgggcccccttcttgtatagactgatttaacctgtaatcaaataaagaggaaatttctgcgtcagttctgtttattgcgtatatgagacgaggatggtctgtgtcgcgatccttctgtgtcttggcttgaacaagggctcgtgcccaggtcccaacctcaaacagcgcgggtcggggctagtgcctggggagatccacgtgtcgagattggccaggccgggagcgcggtgaccgagggttatggattacccgattgtgggcctttgccgattccccctcggagttcaccacgccccggggcacggctcggttctgggccccgtttggcgatttccgccggcccgggccaccgagggcagggtcgagcacgagtgtgctaattcaagccaagattcttcaaaaggaaacaatggcacaggcatagtccttaggaaatcgaaaaaacttttattgaaatacggaagagaaaaaagataagtatatgcatgtggtggcccccggccaaccctgcacgcccgagggggtgcggggttggcccgagcccgagacctgacacccgacccccactaggggtagaagcgacgaaggtgttcgatgttccatgggttaggcaactctgtgccgtcgcccgtggccagccgaacggagcccggccgggggacgccgatcactcgatacggaccctcccacattggtgagagcttgctcagtccagcacgcgtttggacgcggcgtaggacgaggtcgtcgacgcagagtgatcgggcccggacgtggcgctgatggtagcgccgcaggctctgctggtagcgcgcggctcggagggccgcgcgccgccttcgctcttccaagtagtcgaggtcgtctctgcgaagctgatcttgatcagcctcgcaatacatggtggcccgaggggacctcagggtgagctcagatgggaggaccgcctccgcgccgtagacgaggaagaaaggcgtttccccggttgctcggcttggcgtggttcggttcgcccagagcaccgctggcagctcctcgatccacgagtcgccgtgcttcttgaggatgttgaaggtcttggttttgaggcccttgaggatttccacgttggcgctccacttggccattgcttctggggtgggcgggggaggcgaagcagagcttgatgcccatgtcttcgcagtagtcaccgaagagctcactagtgaactgggtgccgttatccgtaatgatacggttaggcaccccaaaccgagcagtgatgcccctgatgaatttaagcgcggagtgcttatcgatcttgatgaccggataagcctcgggccacttagtgaacttatcgacagcgacatagagatactcgaacccgcccggggcccgcctgaacggacccaggatatcgagcccccagacagcaaacggccatgaaagaggtatgatctgcagggcctgggccggctgatgggtttgcctggcgtgaaactggcacgccctgcaacgccggaacaggtcgaccgcatcgttgagagccgtcggccaatagaaaccctggcgaaaggccttgccaaccaaggtgcgtgaggcggagtgggctccgcactcgccttcatggatatcggcgagaagctcgacgccttgttcccgaggaatgcacttcaggaggactccgctagccgcgcgccgatagagggtcccttccaccagcacgtagcgcttggagatgcgttggacgcgttcactcccttcgcggtcctcgggtagagtcttatctgcgaggtacgcctggatctcagcgatccaagcaatcaatctaagggagctgggagcgctcccctcgggtcccgaggcctggactccgacgggcctcgggggccgttcaggtgcgtccgtctcccctagggggttgggtcgcgccgacggctggacaagcctttcttcaaaggcgcccggtggggtctgggctcgcgaggaagcgagccttgagagttcgtcggcgaccgcgttatcccgtctgggcacgtgccgaagctctatcccgtcgaaatggcgctccatacgccgcacctggcgcacgtaagcgtccatctgcgggtcagagcatcggtagtccttacagacctggttaacgaccagctgggagtcgcctaacaccaggaggcggcggatccccagtccagctgccactctgagtcccgcaaggagtccctcatactctgccatattgttggtcgcccgaaagtcgaggcggaccaggtatctgaggacgtctccgctcggcgaggtcaacgtgacccccgctccggcgccctgaagagacagggagccgtcgaactgcatcacccagtaggcggtgtgaggcagttgtgaggggctcgagctggcctcggggacggagacgggctcaggagctggggtccactctgccacaaagtcggcgagggcctggctcttgatcgcgtggcgtggttcaaagtgcaaatcgaactcagagagttcgattgcccatttcaccacccgtccagtaccctctcggttatgcaagatttggccgagggggtaagacgtaaccactgtgacccgatgcgcctggaaataatggcgcaactttctcgaagccatcagaatagcgtaaagcatcttctgggcctgagggtatcgggtcttggcgtcccggagggccttgctaatgaagtagacgggccgctgcacctttcggcagggccgatcctcttcgccaggggccgcatctccagggcgctcttcgtccgagaggccacgcggggcgcactcggcttctgtgccgacgacctcggggtcagagggcgacaggtgcggccttcccgcagtggccccggggccatcatgggggtcgggggcgcctggcaccatcagacaagcgggcggagggccagctccggccgtcgggggcctcgggccgccgttcggctcgggggcctctcctccctgctctctcccgggtcgagtcgacacagggtggggatgcgcggagtgagggttgtcctcgttgcgctccacgaccaacgccgcgctgaccacctgcggggttgccgccaggtagagtagcaacggctcatctggctccggggcgaccaggactgggggagaactgaggtacgccttcaactgagtgaaggcctgctcagcctcctccgtccaggtaaacggcccggagcgtttgaggagcttaaatagggatagcgccttctctcccagcctcgatatgaaccgacttagggcggccatgcagccggtgacgcactgcacatccctaagcttgctgggggggcgcatccgctctatagctcgtatcttctcgggattggcctcgatgcctcgggcagaaaccaagaacccgagaagcttgcccgtaggcacgccgaacacgcatttatcggggttcagctttatgcgggtggagcggagactttcgaaagtttccgctaaatccgagagtaaggtctcttggttgcgcgttttcacaaccaagtcatcaacataggcctcaacattgcgtcctagctggctacccaaagaaattcgagtagtacgttgaaaagtaggaccttgttaaggtcggtgtagtcgatgcacatccgaagcttgccgttcgccttgggaacgacgaccgggttcgccagccactccggatggatgacctcacggatgaatccggcctccagaagtcgcgccacctcctcgcggatgaaggcttgacgttccggggcctgccgccgcacttactgccggaccggccttgcgcccggccgcacggcgagacggtgctcaatcacctccctggggaccccgggcatgtccgccggtctccaggcgaagacgtcggcgtttgcccgcaggaaggagacgagcgcgtcttcctatttgtcgtccagaagaccaccgattcgtgtggttttggacgggccgtcgcccagggcaacctccttgaccgggacttcgtcgcaggtgaccatccgctgcctcggggcggccgggacggaggtgctgagcctctcgtcgctgcccgcgggcttggacgccgcggcgaggtggtccgcgcgctgctccatacaagcaagcgcgactttgaggtcgccatggacggtgatggggccaccggggcccggcatcttcatctggagataggcatagtggaccgccaccatgaacttcaccaacgtgggcctccccaggaccgcgttgtagggcagactgaggtccgccacatcgaagtccacccgctccgtgcggaagttggcgggaccaccgaaggtgaccgggaggtcgatatgacccagcggccaggtgtgccccggcgtcacaccgatgatcggctgggacggccggagcaccatccccggggccttgatggcgtcaaaggctgcgggggaaaggatgttgagggctgcacccccgtctctgaggacacgccccaacttcacattgcaaacggtgggggaaaccatcatcgcgatctgtcctccccgggcaacgcacggcgggtggtcggtctggtcgaaggtgagggcaacctccgaccatcgcgcccgccgcgtcgccttatgggtaggggccgcggccagaagctctcgcttcatggccttgaggctccagcgagaagcgtgagcgcacgctcccccatcgacggtggcgacggtggccccaggctcctggaaccccaggtcatcgtcgccatcgtcgacgtcctcggcggtggccttctgcttggcctcacctcgccggttgccggcgggagccgccggggccttgccctcacgacgctcctgcctcctctcctcctcccacttcctcgtccgctcagccaaacttttgaccacggcagtccgcgaggtcgtggagggaggtgttgtgcacggaacaccacttgccggtcgggcgctccctgctgggagcgccggcctccttctttttgtcgctcgcaggcctcccctttcgggtggcccgcgatgcgccctcgacggcgaggacgtgaccctcgtcgtcggaatgggccgacctcttcttcctcctcctgtcccgccgctctgaccgagcggcggacccgggggcggccggagctgccacaccggaaccggaggagttccaggtccaggcctcctccttgcgagccacacggtccgcgagctggaaaagctccgcggtggtctggggctccttggaggcgatcttctcgagcatgcggttgtgccgcacgccccccctgaacgcgtagatcaccgcgtgtgcggggatgcatggtatggtgttgcggacttgacagaaccgctgaatgtacgagcgaagagactcatcgtcccctcgctgtaccgcatgcaagtctgcttcttcacctgggcgcggatatgtgccctggaagttcatggtgaactgctggcacaaatcctcccaagagtggaccgacgcgggtggcaagttcattagccaaccccgcgcctgacctttcagggccatggggaagaaatttgccatgaccctgtcatcacccccggcggcctcgatcccggtcgtgtagatctgaagaaactcggcggggttgacgcttccgtcgtatttttcggtgatggtgggccggaaccttgggggccaacggacgttccgaaggctcgccacaaaggctcgacagccggcaccgccaaccggggacacgggaggctggcccccgtgcccggaccgaagtggcgctccggacgaggaagcgcccttcgttgcatgggcagcacgacgaccattgcgccggcgctcgatattgaggcgggcatccggccccccacgcacatcttcttgggtcggaggcgttgacgagggaatggcggacgaacggcgggtaacggccgccgctcgccgcgccctccgcctcgacgacctggagccggcggcggcagcgccagaggtcccggtggcggaggaccgcccgccggcacctaggcgctgctgcgtcgtcatgaccaagtcggccacgtcatccagccaacgtcgggctggagtctctggatcggagacgacgggcgggtgacgcaggagcgcgcccgcagcctggagcgcgccctggggcgtgccgccatcgccgtagacgaggaggcgacgctccccgtcttgccgtccttctccattgcccgcgggcggcgaagtcacggatctttcgacctcctcgagcgcctcctcccgcccaagatttcggcgagagggggacggtggagtacgagctcgacggcgcgggttctgctccccgtcgtcaccgctagcgctcggagagaggttgtgcgccactgcccgttcggccattttggctgagcgggagaagcttggcgcacacgaaagaggacgaggacttcgaaagacacttgcgccccctacctggcgcgccagatgacggagcatggggctcctcaccgggagaccgcgcaggcccccctgtgccggttccgccgggggcgctaagtgaggttcttcaccctcgatctgtggaaagttcgcgagagaacaaatgcgcaagacacgggcgacgtagacaggttcgggccgctgagaagcgtaataccctactcctgtgttctggtggatctgtgtgtgaaggagttacagagagctggagagcaagagtcgtctgagagtcccctcctcgtccccccttttttcggtgggcaaggtcctccttttatatctcaaggggataccacatgcaccacttctacctactcttcttttgggtggggacccaccctatcttcaccaaaacttggcttgcgccttcgcctggaagctaaatcacagcttgtccttgagtgaggctcagtgccgtcactcgcctgacacaggggataaccctgtcatttcctcattaatgggtggagatttgcaatggccgctgtccgaatgactctccgatgggatgggtcatacctacctccactccgccggaagcagatgcaacgtgggagcatggttgtctgccgatgacgtgaccggcgtcagaccagtcacaaaccggtcattcttgtccaccacgcgtcagtttagcatgccgcacgtctgcccttcttcatacaatgacttccttgccatggttgcgatgaagcctggaatgaatctggccgggactgacgtgccaactccaggagttaacacgccggctccggctagggacgagcgcctggaggctctcatcattccgacgggacggggcgaggcgtgtgacaggccgcctgttgccacctaacccgcgatctgaccggtctgtgaccggtcacacactgcgaccggtcacggaccggataagcgcgcgctgcgctgcattaaatgcggcgtggcgcgctcgtccaaaccgcaataaatgcgattaggtgagccctgccgtgctcacctaacccacacgtggcgccaaaaccacagggggtcggggcgccccagccctcggggccgaaacgggaacggcccgacccctcggggagacagagggaggggtggccatgtcaccctcgggcccgacccccccgagggggtcaggccacgggggtgaccgcggctactcaagcctctagtcacgatacccccggtcccatgtcaccgacaccgatcctcaagaacctttcagaccatatggtcatatgctagctttccagtctttatctcaattcttctatgaaattcgggtaaagtacctccactagcctagattttcttagaaaatctgcatttagcatccccaatacattactttgatttgaaagaaaacatggaattctgtaggattccaatcctgtaggactttttctatacgatagtttgtaacaaaggatgagatagtattgaaacctacgtgttagcgtttcggtcaaggagtccctactttaccagtttgcttaattagaaaggcaagtcgatgtatctacgcgattagtgggccatcacatcctcgccacactttaagccaaaaaccttacgcagagattcacatgttctcttgccgtccaattctacaattaaggaaaagctggaattgttcgagagtctggtaggtggccctagacctgctcggagacgactacgtgtcctctgctggagcatgggactatctggttttctacccatgaacaaggttgttacatcatttggaggtgagacccatatcctggcttgcccgagaactaccaagggtgttgcgtctttcatgtagctaaccatagcaagtggctcagtcctctttggggcttagcacgtggctcagtcctctccagggcttagcacgtgactgtcccataaaggaggccagtcccacacttcaagtgtgaagtgtttcaccgtgggaacccctcattagcccgggaagggctagcatgatgttctcgttagctagagaatggtggaggcgtatcttacaggatgctacgcctccatcggatgtgttgtgctggctctcgtgtctatctatattattgaatttctcgagttgtctcattgtattaacatggatagataacctatatatatatgggcatctcgttttcacactaccataatggaaacaataatgataaccttgtagatgggcccgacgtgaagtttcacaggcgggttacatcggtggctaaatcggtgtggagctcgaagggcagaaagtgatctaatgattgtaaatagtgtaatgcgcttctcagatataaaaacccaaccgggactcttagaaagtgttaggttcttcataatcggcaaggactagatctgctagctcgagagctcccagcttgtacgaacattcatctcatagtgatgtactcccttcttccctaaacttttgatgccgttgacattttcaaacatgtttgaccgttcgtcttattaaaaaacttttgtgaaatgtgtaaaactatatgtatacgtaaaagtatatttaataataaatcaaatgataggaaaagaattaataattacttaaattttttaaataagacgaacggtcaaacatttttaaaaaaaagttaacggcgtcaaatattttgggatggagggagtaaatactagtaggcttgttatccttcaacaggcccaaaccagtatagttgttccgtgttctttgcttccgagcacactcaggctcaccatctcggttagaacccctggttcatctaaactcgaggtctcctacatctgccggagctcatccctccaacattgcgaaattcataaggaatgcctcaattcatataagttaggaatgccttgatccatataagttttagaggaatttatacatgaggatcattcctgtattacttttgatccatataagttttagaggaatttaaacatgagtatcattcctgtattactttagtctagttaatcgatcattcttgtgttactcttatattataaaattatttgttttgcacttacatttctgttaaaataaaatccggggcttcctgttactccgttttctcaatcctggagacagaacaagaaatgagaacacatttgcaggagtatatacgcagggcatgagcccttgagacggaagaatggagtacgtcacgatgatgacagtgtgttgttgcctctgaatctgattgagcagtgcaggaactgcagcaggttgagcacgctgagtgcagccatcatccagaagaagtagtccagatggccctcgtcgagcttgtccgggatccacccggcgccgccgccgcgcgccgtggccgccgccaccaccctgagcatgccggagttgaggtagttggcgacggcgacggcgagctgcacgagcgccgtgccgaggctcttcatcgacgccggcgactgctcgtagcagaactccagcatgccgatgacggcgaacacctccccggcgcccagcacgaagaaggacggcacctgccacgcgatgctcatccgcgtccccgccgccgccgccgccatcgccagacgccgcgcctcgaccagcgccgagtacgccatggccaccgcggacagcgcgaggccgacgccgatgcgctgcatgtgcgagacgcccctgtccctgccggtgacgcgccgcgccagcggcaccagcgcggcgtcgtagaccgggatcagggcgaggacggcgacgacgtcgaaggtggcgagcgaggccggcggcacggtgaagcggccgacgcggccgtccatggcgacgccctgctcgatcagggtcgacgtcatctgcgcggtcaccatgaagaagccgaccagcgacgcccagaccgggaacgtccgcagcagcatcttgagctcctccacctgcgacacggtgcacagcctccatgggctcgacggcgccgccggcgcgcagttcttgtccgacaagatggcagccttgtccaaaaacctggacatcatggaaatgttaaagttaaataatcaatttatagaaacttacacaatttaacataacaagatttactacgtttttagatttaccatcataatcgaagtatatcatttatttccttttataactatggaaagtccatattacccttgattgataagtgatggcacactcatacatgataggagtcaaatcaaccattggaacttctaaaacattatggtctagaataacatggcaatatcttaaaagaatctttcttgacagtggaatttgttcctactaattcacttagtttgttctatagtaaattaaaacaggtttgactattttgtccgacaactcttgtggtaattttgatgcaatgagcaatacctgaattgataggtatgttgagttctgtagtcaccttcagtcactcctggaagctcatgcaggagtgagctatcatcaggcaagttcagcctatgatttcttacagctgcaaccagcacctgaaagacccttgtcagagggctccctcccagtttcttgtacctgtacgccctcctaccggcgatgaacatggcgaggccgaaccccaagagtagcattgggccagcaaaaccgacactccaccctatgttgtcctgaacccagacaaccacggtggacgacagcagcgagcccacgttgattgagaagtagtaccagttgaagaatgagccctttgtcacccgctccaccgggtcggcgccgtcgaattgatcagctccgaaggccggaatgtttggctttatacctccagttccaagggcaaaaaggtagagccctaggtagacagttagacgagaaatacccccattgtagaaagaagcattcaggaacaatggtgatgccgaaaccgtcagaacgatcattccctgacaaaatagaactgtttcagagttgcaaatgacacatgaaactaactacagattgtatctttcagttgctgctctgcttgttggccttacaaggatgataacaaggatggacattactactgtccagtatcttccccaatatgtgtcagccaagaaggctccaatgagtggtgtgaagaagcaactgccgatccagatcgacacactttgtgcagcattgacgttgctttcatggagcacacttgtgaggtatgtgactaagttctttgaaaccccgtagaagcagatgcattcagtgaattcaacacctaggacatgttcaggactcaataggtcagttgtgtatgttgaagaaggaagtttatgagcatcaacagaataattttgtgaacttctcagaagtacctaaaatgaagaaacatgctctccaattccccgtactctgcttcagcgcgggcttactgtcaatattaaccgttccatcgcatgtgtattttgaacattgttcctgaatgacaaatgccaaaactaatgtatgttgcacaggatttaacattaaatatatgcaaagattcgctgaagaacaagaaactgcaagaactcattttttttgtttctgtgtaacaaactgaagccaaagtggcaaagtatcaactgtacatgtcatggggtcacatggagatacaaaagtttggtacctacctaggcaaaaaaaaaaaaaagataatgggaaggttatcgattaatacctgtggaggcaggtgatgaatcagtggcctgtcctcatcagatgcctccatttgagcctctggcttcttcagcaattttgttggaagaaaaccgacgactctaagctacttgcaattaattcagtataatcttgcacctaaggaatttttcgtaagccatctatgtgggcaatgatgagataagaaattgttagaagataaataagaaattatctaacaaattgcatcacatacccgacaacacccatttgtgctgtcttggtcttctgaaaattcagtgacattaggccactagcatatcactcgcactttttctgattgattactcatatccaattctgcattttgattagcacaatcacgcaattttggtactggaagttatatatgaactctattgactacataattctgtaaacaactatttcttgcaagcaacacccttctgtcagctgggaaattaggaaagtaattatcataaaaacagaagaggacaaactgacctttttttggggggtcagaccgtcagacttcctactttctagagaaggaagcattccatgcaaatttttttgacaattattacaatctttttaacttgggcatttaaattgagagctaacccctatgtcttgtcctattcaatcttgaacacaaacacaccaaaaacctaagaaatgaagtgtcaaaacaaaattagccttgaaccatcaggtccatcccacaatttcttttatttctttgaagcaaacatccatcccacaatttaaccaggggaaaatgaccacacactactcataaagaactagtaggcttcattcaaagctgatacactttcttttttatccaaaaaaagttcaggtgcagtattaattccaaaaatgaagaaagatttggcctgcaacaagcatgcttatatctatccctaaaatcctctaaaaacatatgtaagccatcgattccagcaaaagtaccaggtggagagagagagagagagagatgagacctgaggagagtgagcgatggacgattggagagggaagggcaaaagcggcggtgggaggtcggtctgggagggagatggagatggggttggtgtggttgccgctccccaatcgtagctcacactatagcagtactagccagtagcacaggaaagccaaaagcagttaaggtgagtgagacagtagaggcatcgaaatgattccggttcttggacagcaatcaatcacgtgacggatatatttattgtggcatgaatattttattcgtatgacctaaatctgcggagaatacaaatagagggcgttcgatgttttacttgaaaaatctttttgaccgttgtttcatcgcaacttaaaaaaaattcattattaaatgaaaaatatttcagattatcaaaatggtgaaacacatgttaatcacgattgaaacatattattctcacatatgaaacatcaagcttcaagagctgaaacatcaccaaactacaagagtcatgtactaaaatatgaaacaccatcaaaacatgaagtgcaacattagctgaaacatcacatactcataaaaaagtatcggttcaaacctaattttatttcttctcttcgatgggcttctcaagtttctactacatattcatgtagagacgttattcttctactccatcgatgtgggtagccgctgctcccaagctttcttcacctcgtcgtcattggtatcaggccctcgttgtgtcatcttcgctggcgaacgacacctccaattccacataaggtcatcatctttctctagctaatcaatgagcactagagcacaacgtcggcgctccgcatggccccacaaaacccacaacctgtgcatcccaaacttctttgccacctcgtcggaagccatccctccggccggccgcgccaccatgttcattgcaccaaagcatgccgcagtaatgcccacaacatctaagggcaaaagaaccgcttgcagaaaaataagggtgaaaacggattggataatatccgatccgaatccgtccaaaacgaggatatggtatgagcttttagaaatccggcggatacggttgcggatgcggatagtatgaggcggatgcggatgcggatatggtatctctaaaatccggcggatgcggattatccgacatttttgtcgaattatccgataagttgtttcccagataatccgaaattatcaacatatataaccactctatctattgcatataacataagttgtacaaccagtgccctcattcatcaattaacaaagattttttagtctaaggcgtttatcgtctcatgtcacacacacgtagctatattttttatattatggatatcatgcgttcatgttgtttagcacttaatcatataattattacgatgggtcatttattgattattgtattattgttcattggattgctaactcaatgatgcattgattgcatatacacgtaacatccgataaatttaatccgtttccgaaccgattccgcacagactccgcaccatttccgacatccgaaacaatccgctcctcatctgcatccgtatactatccgcacccgctccaaatccgctcaaaaaatatggtttaggatatggtatgaccactatccgtccgaatccgcttcgttttcacctctacagaaaaagtcgtgggatctcatcggagacacatggcgaagacgcccccactgctcatagacgacacaagaagatagagagaatggataagaatgcagaggaagatagatatatgtagaggatgagtgggctgttgagctcttgattgttttttccccgtcagtcgactgatgcaaagcattctcggacctaagaatgtgttctattggcaactccaagcgacaattttttttaggagtttgttaccaaactgctaaataatactcccttcgtcctaaataaaatcgattcctagatccacgagacaagtttaggattaatgtaaaattattgaaggaccctcgttaactacgtccatccatcaaaactccaattctctccacacattaatttagtatgctactcgagtactttggtggaggaaaggaaaaaaataaattgcattgtgttgatgtaaaaaacacacactggtttgggagatctgcttaggtctagtgcaggtccaaaacttgatgagatgcaggcgtgctagtcagtttgatcctgcaactaacaagatatgtaaatagtagatcaaatagccgatcggctgataagccaatgtagtaatccagccgatgccgatactagttggtgccgatagggttttgagctatcggccatgcgtccaatgtatattctgacacttgatgtaaataccaatataaagacaatcggctgatgataatataatataacagtataatccagaagaaacaaattggctaacaatgatttgatagaatagaacaagcactgatccgaaggttaaagaatatatcggctggaggtccgatgtcataaaatccacaagattagattaaacaatgaaacatctgttgtcatcggctagatccaacttatatatacaatccttgtaagccaatgcaacgtccagataactcatcagctaaaaccctgatgaaacccttattggcagtcaacaaacaggctagagattatgattctaagcacgacttagtagatgaaacttaactaatgcaacactaagtatgaaaagaaacataatacctatacaatcaaacccttgactgattttcagggtgatagatacccgagctaatctaatctagtaaagcaatttagccgataccggcataaaccctaaagcgagagagccagtctgaccggcagagtccgagcccgagtttctttcgtcgggtctcaagttttccttgcttgggaaggcatgtttcgagtttcctttggtttctatcctgagttggatgtggaggagagcctgtagaaggtaagaccaacccctatataaggggataaggccggttcaattgtaaaaaatattctacaatcaatcaatcgaatcgttttttcaatattgcttctagttctagtttaatttgtccatctttgtcgatttgcaccgtaaatcgtccgctgccgctgcgagagtgcgacacctctttgtaggtttgtcctgaaaaccttccgtttgtccacgaaacgggtagttatccatagtttcatctaaatcggctccgctagccggtttagtttatgaaaacccatcttgatttagtgcttgctagattagggtggttggtgactctaggatcaccgcaaggcgtttaagatgttgcgatcgtgcttgtcaacttgttaaaaaagttgccagcacttagcactaaaatagaatggttatatttatgactcgggtcttttaacatgtcatatcttaacattagagtgcaggttccctcctctacaaaatataacatatccctctgatgtagaagctgcaaagattggtgccatctttttgtctaaggatctagtcatgtacgaagaccttggaatgttgatgcgtaccccacgtatcttccatacgatcctccggacctgcaggatctcgcatatgccctatttagtgaatttataagagtttgacaatgaccaatccctttcctcagactataatatatgacaatcttactgttgttgatattcttttttaagattacacaacaaatgcacacgcatacacaccactacacgcgcgacaccacactctcacccccgcaaatgcatcctctaacacatgctctaagacgaaaaccaatgacacattcccgatctcactaaaatcatgttaaaagtacacctgcatgtacatagtattcgtaggcatcaggatttaaaccctatgggtagagtcatgcacccacgatacaccaccacaccactggtgcttcccctactgttgttgatattgattacgaagttataaatttagtgccatgatatgccccaggtataaactgaacattatattcaaatgctcattctttagtggaaa

SEQ ID NO: 6525 - DNA, 24370 bp, Oryza sativa
ctgttgtcttggctggccaatggaatgctttcgaggggaaggaagtgggcatggtggcataggggcggcgacagtggcatgagctcggctcacactttccgcgaggacgcgtgactgcgggagctggagcacgaaaacgcgaggcggttcaccgagtgcatcggcgttggtgcggcacggacaatagggaaaaagacagggctagggcgaggtgtcgtgcggctacagtttgggcggcatcggagtggggccagcgtgatgatgccagccacatcagccaacatgagtggtgtactgggaggcgaggaagtcggattttgcgggcgggaaggtggaggtgtgtccgggattcgtcgtggagcggcatgacgtgatgcagcacaactcgggcagtgcatgacgttgtgtgccctttgcagcgcgactcggtgcgtcgctcgcccgcctcgacatttcgtcgaacaagtggcgggcatgtgaagctgcctgtgtggggaagaaggaataagttcaccggaggtccctcaacttaacagcgagattttttgaggtcccttaaccacaaaaccagaaatctacacccctaaactatacaaaacccttcactcaaggtccctaggcagtatatataggtggtttcgctgacgtggcatcttagtcagcaaaaattttttaaaaagtatgtaggaccaacatgttagctgcacatttttttcttctccttctattctcttttctctcttccctcttctcttcttcagtgaggaggccggcggcgggcagagcggcaatggcggcatgcttcctcccgcggggcccagccacctttctcccgacaggacggcgctatccgtcgccgtgcacaatgcggtggccgccttcgaggctccgcggcagtggtggggcggtccaagtcgtcatccggactttcggaggcacctttggaacgtgaacacgtacggcggcgcagtagcggatgacggtggcgtcattggcgcgagcagcgacacggtccacggcaaggatctcctcctccgccatgctgcagggcacctggccgatgaacagccgcaccctctcgccgtcgccatcctccgcatctccggccatcaccgcgatctctctctctcccgtctcttttccttttctgatggctacgcaacctcctgtccgtcctctcctcgttcttgcctgcgccttttgcctttctatatcagacgagcactaaccactgattgattgattgattgatcagtatcagtgtcttgagtacaagttaattaatcgatgagtagtaccaagtcttgatctcgagtagcagtgaatgtgattgaatcatctgattgagcgaaaagcagcagcagcattgatgcctccgcctcgccgtccaccagcacccgcacccgacgaggaggcactggccttccgcgtccgtccctaactcctctggcggcagcgcgggacgaggcggttctgcgccaccggcgaccgccgcgtcgacctggcgtgggacctcacccgcgcgcgcttcccgggctcaggttcgcccgagccttcctttgtgtgcagccgacgagccgccgccgcgccgtggtgccgccccgcagccgcaacagctatgcggcttgaacggcggcgccggcctcttctcctccggtgagtatagatggacggactacgtcaacgtcgtgcgtgcatgcatgctgcaatcttggcgtctcagtttcgtgcatggatcttatgaaggtcgggggatgacggcgatgatggagtgccacgacgtcgagatgccgttcttgcgggggatcgacgtgaaccggccagcgccagcggcggagacgacgacgacgaggggggcatctttagcgaggaggacacgaggagtccgacgcgacctcccccaacagcacgctctccagccggcagcaacgacgaggactccggcggcggctgcggatctagtgtaccgcggtcagggcagggacgggagcagcaacagcagggagaagaaaagagaagaaaataagatatgcagctgacatgtgggtcccatgtgctttgtttaatatttttttttactgactaggatgccacgtcagcgaaaccaaccatatatactgtctagggaccttaagtgaacggttttgtatagtttaagggtggggatttctggttttgtggttaagagatctcaaaaaatctcgttgttaagttgagggacctccggtgaacttattccggggaagaaagagggggcagctgggctgagttggccgtccaggaatgggagagggaggtgggctggcctaggtgagggaagggactggcctaagcgaagaaaaaagaaaggggcagcccaacggaacaatgatatttctcaatttctaggaatatatcagagtttgaattttggagagtattgttggaattgtaaatagattgtaattggaccgtggactccaataattctaggattgtgtatggccacatttggatgaatgatttgagatcttcaatggcacaaaccaaaattcaaataagaaccaacttttgaaaatagattttgtatttaaattgggtttttaaaatgtagcaaaaatcgggatgttacatgttcactggatccatgaaggatggggaggttggtggcagcgaattggcacctcacctgccgctgctgccggatccgctcgaggttggtggcctcctactacacctctcctcgttgttgtcatcgcccggcgacatctcccatgtcgccggtcatcgggtgtgagtggaatgtgtgaggaggggcaacaaaaggggaggaaaagggaccgagagacttaaggggaagagaaaaaggtaggatggagatagaggagaaggaaaaaaaatatagttgggtgatgcgggcctattaagaggtccgccttcaaaaatttagtttcacatgcatgtctttaccgaatctctatcaactccttttacatgcgagcctcttgagaactctttttagtccggctgaagacaaaggagggtttgtcctcaaaaatcatttttagtagtgttatttgcccacagcggtgtctcggccttctccagattgtagctgctgctagcagggtcggagctacatgttagagagggggtgcccaggaaccagtcaagaaaatttttcaactatagtttatctattttcaccatatatgtactctctcaatataaactaaggcaccaaaatgaacttaaatttggtccatttcactctccgctcctggctgcccggtaatcgactagataccactgccgtcctttcttgctctcccctcctccagatctggttgctgctagctcccttgctcaaggaggccacagtgacgacgggagaaaaagttgtggtggcgatgattgaggaggtcgcaacgtcagagaggaaaccacggcggcggctatctcttcttcattcgcggcctcaatgcctcatcgcatcgaggatcacgtggtggctatggcttgatttgctttccctgctgatggatctactcgcctgagtcctctcccggccaaatcagctgcacggtgatcgtgatcctccacagggtgaaaacaggtgggtacggtcttattatgcatgacattttcatatcctaacccatattttcctttaaaattggaattaggtacgggcagttccagataatatatcacttatccggtcatcccatatttcattgaatcggattcggaaacagatatctatttgtatttctaattcataaatattaaatataaatagacaattaaagtgttaaaagagatgcatcaaggaaaaaaatatattacatgtgagctcgtaaataccaatctttaactatgtttgtgggtatatttataatagattttcatatatgttttataattagaaaaaatacccgtgcgttgcaacgggtgaagtctattttaatcttattattgttatatggtttagttaagatgaaattcactgtgggagttcacttcgatatatatatatttttagaaaatcatgagctacaattaggggtccgattgtctcaagttagcatgcgagttttttttgaacagatttcttctatgattccttctgtgttaccaaaagtgaacgatcttaataactgactcaaatatagatatgtactttcaaaagcaaacggacttaaaaactgactcatacacggatgacgtaccaaaataccgttaaaaacatcttcaatttttataattgtagagaagagatatagattaaaacaaaaacataaaattaaaaccgacttaaatacggataacgaactgtggaaacatctttaatttttataatcgactcaaagacggatgacggaccgcggaaacatatttaatttttataatagtagagatatggaacatatggatgtgtataaatatttccgtatcctaacccatattattttttacggattcaaattcaaactcggattcggatagtatcaagttaactcggacaggcgagaccactccccgaatcaccgcgttgggcatactccctctggttctatattaattgacattttggacaaggttgagatcaaacttttataactttaaccatcaataactttaaaaatattaatttagtttaaagaaactagaacaacatatatagatttgtcttttaaagcactataataaaagtaaacatatatttatttattatgtatattataatagaaaaataagggttaaagatatatcttataaaccgtgtaattgtccaaaacgtcaattaaaatgaaaccggaggcagtagccaatgaactcacgtacgttgttaactagcggagagcgaaaggacatgccacgggatcggctaatttaattaatatcgatctatgcacgagccagttaattatggcaaaaagacgataccaaagtacgactgataactctgttaattaatcggtaatgaagacttcacaggctgcaggccaggctggccagcaattcaaccaagcgattaggaaagtgactaacccacaaattcacttatatactatttttaatctataagtgaattcgcaagttagctatttacatccataattatgcatgatgcgtctgcatgcatcttaatttgtattttcgtacttctttcattatttcacaaaagatcttgatatgctgttatgtgcctttacgtcttgtacattctatttgtgctttgattaatttgttcgttcccttgtgacctatactccatgcatccgtccaggaaaatcttaacttagtaggagatgtgatccgcagtgtaaagattcattgtactagtaagagttacatctttttctaggttaagtttgtttagaactgagaagtaaaaattaatttgtttccttgcagtgcagatggcatgcatccaacgtgggcacacactgccagcagtgcgacgtatagatttaattaatacagcttatttaaattttgaaacattatctttcgaaaaaataaaacttttgagtcatgccccgacagtagagggacacaacacagagaatacaaaggatcgtccaaatctacttcattctctagtttaagtagatcaaaggtcactgggatagtagaaaagtgggccagctagtgcacattgcgcaagctgaattcaattaataatacgagtaaataatctcctaaaaaataaacaaaatgaataatggtcattaattaaactgaagaggccggcggagatctgttttgccactatgcgtaatcatcaagatctttgctttcctacttgctgggaatataatatcatattcatttggctgaccgtcgtgctcgtgcggttgaaaggggatatatatgtgttgtttttctgaaacaaaaaagtgaaatatgctttttctttaccggttttaaaggaatatacacctgttcaaaaattagcagaagtataccgtagtttgttcgagtaaagatatgaactcatggcgagtttgtaaggtatatatgcgccaactcaggagatcgagtacgcactggaacggcgtgtcgccgaagaaaatgtgcccgatctcattgcataggccgagtttagttccaaacttactttttcaaacttttaacttttctatcacatcaaaacttttctacgcacataaattttcaactttttcatcacatcattctaattttaaccaaactttcaattttaacgtgaactaaacatacccctagctaagaaaacgcgacccagaacgttgcacatgatttagcaagtcacatcaatcaatcaataactatactctttctcttttataaaacacaaaccttgaaataggataaacctaaaatatataggatgcaacacattttatagttatgaatctggataacctaagttatcacgaaataaatttattttgtaatggatcaagagtacttagtagtacgtggttattttgtattttgtttttttaaacattgtattttggttttaatcatatatatgagagcacgcttttcttttttgttccatagcagatggcatctcgattgtgttcctactgtcagctgtctgcagtgaatgcattttatataaccattgagacgctatctttccaaaatgataattaaatactctaaataaacttttgaatcatgccccgacacacggacagagcacagagaatatgtataagatcgtccaaatctacatcattctctagtttaattagatgaagggcaccgacagagtacataatacgagtacataattgtcggtgagtgtgagcctcgggtaccaagcttaaagggaagaagccgcacccaacatccatgtggcgttcccccctagggggtcgggcctgtggatgggtggcatctatcccttccgagcccaaggggtcgggctgccccgacccctcctggcggtcaccacgtggccaccatgtaagtgaggttaggtggacactccccaacgcccacctaactgtatttaacgcaggcagaacgagcgcacaacgtcgcattaaatgtggcgtgttgcgcgtctgaccagcctgtgaccgatacgtgaccggccgaataacagatgggatggtggcaagccacgcacgccctagccgtatgtcaggcggcatgcggcaggtatgccccgtcccgtcacgatgataagaggctctacgcctttcaaccgtccggaatcgtcttgaccactctgtacgtgcccgagatcgtgttcacggtgcatgcgcgtccccaagtcctcctccattaaatggtgaatgacgagggctttccccgtgtcagccggcatgatttaatgggccccgcacagcagccgacatgcaaacgactttcgggttaaggcacaagacatgtatttaatgtagagaatattttccctcttcacgaggtggtactcacagtgcatgtgggaaaccccttagagtataaaaggaggtccatatccagtgaagagggggttcgaaaggtaaaaggcttagccctagcttgtacatcagagattcagagactttgtaagctcagaaaaatcatcatacacgggagtagggtattacgcttcttagcggcctgaacctgaataaatccctagtgtctggccttcatcgagggcccgaccccctcgattccttccaatccttccatctcttcaactttcacccgctgcccctggccgaactaacaaaggaggggcctcatggtcccccgctcgaggagttcaccctccgacaataatcttccaaaaaactcgatatgaataagtacgtatataccatgcacgttggccccattatattgggggtctttccgacaacgtacaagctcgtggatccaaaaaaagtcgtgcataatttgcctatatattttaccccactgggacacaattagacgatccatgactagctaattaacagtacttatttagtgtttttttcttttcctgcttagactgaagagtaagtgtcggcgccgttagtgtgacgcagtttttttttttctgtttacgttcaagagtatattcggtgcgaccgtgagcgtgaccatgggttatatataatatttaagatcgagaggttgattcaaatatatataggcgaactgtttgtttgtaatgatgcagacaggaatagagcgaatcccgtccgtggatacagatttggactgagtagtgttacatagtgaaagcacacaatcatataagaaaactagggtctgccgcactacgccgctgctgctctgctaagaggaagtgaggaggagatgagacacaccgaaccctaaatccctcattaggctgtcttagattgacttgggtcttctgggctgcggtatattcatataggcctgttcgaccctgagttttgttcatccaacggtgtagatgcaatctaatctaccgatccaagggctgtaaattaataatgacgtgaatcatttaggtttaagctttaggatcatagttgcacttagtaggggataactttataggaacaagggattaaagagaaagaaggcatcgatctactaactaaaatctggcaagatacattagggaattaagaggtgttcgtttctaccgtgagaaaaatgagaaaaccattaacaacagtgagtaattaagtttttaattattataaaccattaaccggtgatatagttgtaatgaggaaccggccgggatgccgccatgcatgatacgtagccggcgctgcacccgcgccatgttgattgttgagaagggggatgatgaagaaatccaacaattaatggtgaagaaaacgacctagccattaattagaaataggggaaattaaaacgtcaaggatgatggggggctgcctacggctcgggcgcccgacgatttcaagaaaaatcgggcgctgacgttagcgtccgatttatgtgcaaaactactttaaactatttttctcttaaattacttatccaaatcatgattcgattgcaccattaaattcgttataattaaatcttcaaaacaagaccacacatggatatattccgacggaaaaaaaatttagctcattattaaattatttttaaatgttgcacgatgttccataaagtatatcggaattgtttcattaagtagatcgaaaatgtttcactcgtttaaattgggtgttgtttcaccttatataaaaacaatgtttcaacgaatagcgaaagaatgtttcagttcactgcaacattagatctatacatagtgaaacattgtgagtacactaggtgaaacatttttcgatggaacaagaaataaaccaaattcccttaatagggtgttttcaaaatatgtgggttttttgttgcaatggaatgttttgttcactgcaatattagatctatatatagtgaaacattgtgagtacactaagtgaaacatttttcggtggaacaaaaaataaaccaaattcccttgatagggggtttccaacataagtgggtttttgttacaatagattatttcagttcactgcaatattagatctatacatagtgaaacattgtacattgtaagtaaacttggtgaaacatcttttgtgaaacaaggggagggataagtgagtgggtccagatgaggagaggggagcgcgcgcatggggggaggaggagcgaccgatttttcccacctcccccggtcgcccgattttaatcaatatcgggatgatggaggtgatgcatggtggggaatatgaatggtgcgcggcagctcagaacatcgtgagacaatctgacatatatatatatatatatatatataggacgaataacatgaatagagtgcgtacgtcggttgcgatagacgaggggttgaggttcataaacctcaaagtacatcgaaaaaattggtgtatattctagttcctgagttaagacaagagcgtataaggccagtccaaccaaagacactagacatagtttttataaactccacatcatcaagaaactagtaccaaacactactctttaaatgcaaacatcactcttccattcttaaatttaatgatacttatctcacatgatggcttggatgctgtgtagaaaccatgtctcatgccaaacatagtttccttctctttcctcatttattcacttgtcacatcatctttcatcctaggtgacagcttatctaatactatggacaccattctagttattgggttgggaatagcctaagtgctctagatgcaccttgtaaatataatttaatgtaacaaattaaagctgatctactttcaacggaatggtttgtgttctttgagtttcgacggtagatccggtatactaggatattaagtcgcacattcgctcgactatcaccaaacatattgctcctaagttgttttatccccatgagcttcagcaaggtggagaaataaacatcttcttttcaccaaatctctacctacttcctcgttcgagagatgtgttaagggaattggtatgagactgctcagagacttgcaagcttcagagggagactctctaaatgatggacctgttaaaacgcttctcattgtactctttttccttttgtgagtttttaccatctggttttttcatacaaagtttttaatgagacaatgatagacataaggttatgcgtagaaagtacccgattagtatagatatagatagatagatagatagatagattatggaacagatatttcagcttcataaatagacaaggtcccccttattggggctagatgttttttttggcacagttctcttttcttcttagagactatgagaaaaccatacatttttaatatgcaatagatataattacttgcaaagactaattacacatacacagagagacaagcgcgcacataacagaccattcacaaatgatggaattattgtactggacaaaaccaatgacaaatgacataaagtctcccaaatgtattagtagtaaaagtaacaatataggcctcacaacaatgctagggtcagtcatttgtgggttcagtgttgttctgggttagtcgtttgtgggttcggtgctgtgctgtgaaatctaggtagttagaggaatcattaataattcaagtaagattttccgtgtcgttaaattctgttgtaaagccatcagagtactaaacagagcctttgagatgtaagtttgttgctagctttacttttcagcattgctttgcttgagaatacataataagttgctttatgtgccagagtcaattctatttacaattttcctcctttttttggtttcttttcttgtaggtattttgttgtgattgatgacatgagtgcagaacggtggtgtgatatagagcctgctttccctgtagatgacggtatcagcatcacgatagttgtgaccacaaatatccagtccatagataatgcatgcagcactgcagacggttatgtgtacaaaatgggaaactcaacactgaatattcgaaagatttgttcttccaaagtgcttctgttgaggattgttcaccagacatggagagaggctcagaacaacttcggaagaaattccatggtctacctctagctccgatctacataggccatttcttgcagtgagaaggcacactaacagggcacacttgcagtgatgtctgcaacaaccttggtcaccatctggaaaataaggacaataatgtcctagcaaaaacgcaaaggacgctgactatgaactacacctacctgtgtggtgatgctgccaaagcttgcctactatatcttggcatgtttccaggtaaccatccaatcaggaggaagaggctgttgaggtgatggtttgctgaagggcttgtcaagaaactgcctcacccttggttcagtggcagtgtagtcaagaacttcaaatgttcatggactgggacattgttcagcctatcaacgtgcgtaacaacgaaggggtgagatatcatgcacaggtccatatcagagggtttcatcaccatattctgtgacaaggatgagatgctcctgctgcctgatcaggacgcgaccccgttgtctctctctccaatgtcatagcaccactgctgcaaatatcgtactagggagaaatggtttctctcttctccggtctctcatggtttctggtcaactatgccgagattttttggacttaattcaaggagtacaaactgctgcaagtcttggatctagaagaatgtgacggctttatggatggctatctcgacagcatttgtaagctgttactgctcaagtatgtgagcattgggggagctgttaccacacttccaaagacgattgctggactaaaacttttggagacacttgatttcaggagaaataaggtagaggtggtgataatctcagtcgaagtactcgtgcttcctaagttaattcatctctttggaaagtttgaacttccaggcagtgtatcaaataaaatacaaaaaaaaattgagccgggaaagagcaacctgcaaattctggcaggatttattgctgccaataaccatggttttgtgaaactgatgtgccatatgaagaacctgagaaaagtcaacatatggtgcaagtctataacaaaaggaaacaagttgaattccctttcaattgccattgagaagttcattgagaatagcaacgatccaaacgatgcgcgcactctgtcagtggatttcagtcaatgctccgaagacatcctgcaaatttctatttagttacaagttcatcaaaatagttcccggcaatttcttccatgtgttgtttattagccgaatttatgaaaccttcagccgccttcaatattgtgtagtctgatattggccgtatgcttgttggtagaggctgaagatgtaaatcattttctaaaagaattatagtccgatggatacaagttaaaataaagtaagcatgtattctataatgaggaagatttttttagctaagactcaaaaaaaaaatctactgagaaaaatagttttctcaacgcattcataatcagtcatttcatcttaaaaaatgaatctcctctatttggatgccgctgcaatctccacaatttaattcatgatccataattagcatcccataagccgtcagctataataatgtacttctatctaccaaaattaattagtatttagatgttgacgtcaaatttcatcgtggcacacgaagacctgcgagatctgcttattgccagtgcaggtcctatcgatcgggttcaggacatgctagttaatttgatcctataactgataagacagataaattgatgatcaaagatccaatcggccaataaaccgacgtagcgatactagccgatgtcgataggtattgaacaattgactatatatccgatgtagatttgacacttagataaagaaatggaagaatttgaacaaacaatccaatcaaccaatgataatttgatgaagtagataccaaatgaatcaattgatcaatattgatacaaaatattaaatgtaagctcgatgatcggctggaagtccgatataaacataacttattggcttgcactctaataaaatgtagcataaatctataaacttagcaagacttagattatcagcagtaatatagatgatcggatccaaccaagacagttctagattacgtttgatcaaataagttagataagtcgatatatttatactaatgtgatagatataacaaatctatttaaaacaacattgtgattgtagagatatatcaactaagacagaagataggacctaaccgagacagtcccgaataaaccgatacatccctaaacacgatgcaattaaagatagaattgaaatatcgggtagacaaatataccaactgaaccagagcaatccagtagatcgaaccgatgcagccttgaacaatgtcaacatagccgatacaattgccagggccgaaagaacttaggacttaccccttcaccggagatcaaagcgatgtagccctacgtcaggtgccaagttccgccggtgataaaagccccgaaaaacagagtggcgatgcacggagatttatattgatcgagagataaattacaatgaccccatgtgtatatatttatacccacaggtaaatactagtccatattggacgcgacacatgtttctaaatataaacggaaaaaatacaagtcttgattggacactagaaaaacttcataaagataaagggaaattactataaatcctgtctaattaatagatagaattaaactgctatgccatggtcttcatgattccttcttggattaggtcgcttctagataaacttccattggttgatcgacctctttccttaaccgaatcactaaagaaccttaccaaattttggcgttaataggcgtgactcagtgacatggtggtggtggatcttctttggtttggtgtggtgagttgatgctcagtgtggttggcaaccatcttgatggtttcctttgaagctaacgatgaatggatggctcagattttgggtgagctagggtttctccctaagggcaaattggacattgtctgtgaagtattttagttatcttgggctataaatagagaggtggatgctagtgttagaggtgccgcttgtgtccctttgtgagagattgcctaaatggttttttgagagtttgaattcaaaattcatgtgaaggtgtatctttgagtgttttttgttcaaatctttataattagaatgatttgagttgtacaatttaatttcaagttctggcactttattttcttgtaatttaaattaacgcaatttaatttcgtacgggtattgcctccttccttctattttatgtggagtgctttttttcttctactcttttgattttccttgcaatgacggaagagacaacctcatgtggctttcgagcaaattaagaggataaagcctcctaacgagcgagcaaggtttccttctcgatctccagcttgattatagctatggtctaagggagcaatttgagaaaaaaaatgagcgagtattaaggggaagataattagcttgctattataccagttttacccctagcaaaaatgagcaatgggaagataattagcatgctattcacctccctctacaacggataccagtttctatttatatgttcccaataagttaaggcaatgcaatgcaaactacacccattactacaacacgcaaatcaaataatggtaccaatgtttttcatggtcgccgtgaccactagcttagctccaacttttaaattagaaaacacttccaatatcacattctcggcaaataatggaggaaattaacattttagtaaatggaaaagagaaccacttaatttgctactggctctaggactttcggtatctttttttttgttttggaggaaaaatcctacgctatcatttttccaatccaaattgtaagataaaagattacattcagaagcctacatacaagataaccaaactcatatcaatctaaaggccacaaaactcaatgtcatccaagagattcaccattaaattaagtggttttaactttgcattcttgatgctgtatcatttatccacctaacaatgactcaatgagcaaaaacaagatttaataaaataattaggattagaatgattcgtttagaaactatcatggttgtaaaatttaggttttaacattatattctttatgttatatcatttatacacctaaaaatgtctaaatgagcaaaacaaatcttaataaaatccaaatagaattagaacgaagttttttaagaggtcatgcttgaatagtttgagctggacaacgggccctgtcacttggagtcccatgtattttccagttaacgttttgctgtttatggatctcaatgggttgatagcagagtgagcaccatggcataacattcttacgttagacattgtcttgtaaaatgttttagctggaggtattcatttaacctcaaaagtttcaggacacacccattcgatagatcatccatgtattccatttagtgctttgcttgcattctaccaattctggcaccaatcatgcgtatcttttgaaatcatgcatatcttttgaagtgtaatcctgcaaccaatgtgtacccattgagaatagataggcaattgctgagaacacgatgtcaaatttaggttcattacatagtgtgactcccgctgctaacaaaagatcatctatgattgggtcagaggggcgatagcatgaaagtgttgtcagctattctctaaaagcgcgcgtgccaacaaaagctcgtttatttaatccattagggcatacattctgatagtttatcttttgacctagaaattgataatcttctaagtgtcgcccatccatctattacgaccgaggataaaagtcacccagtatctctcatatttgagctcgacatgcaaagttacatttagagtagttgtatatgtttctagttttgtttcaaattttagattaacaaccattccattgcggtaattcctgaaacgactgtggccaatggtatgccagtaacagcagtaaatttgttgcatgcttcccaagcttaaaagtgattgaggtatgcaaagaataacaaaaattcttagtggatccatcttattatgcaaaacaatatttttttaatgttttcatcgaattgcaaaaatatgggtttatataatctatatgatgctattttgttatttattgtgcacgggtattcggttcgtatgcaaacattgcacttgacctttccttcacaaagaatgcgcacactctgttggacaataataagtatggatttgtagttaatgcaatgcttcatggtgaaaatattgttttcttttctttttgtcaaattcttcatggatcagattctttatggagtcgtttgcagttaattgttatttatgaataacatgttgtcctcatcattctttcagggtaaaaaacccaaacatctatgttggattgaattactcaccctaggtataggacatgtcatatttaaaggcacgatgcgcatggatcgctaggtaggtgccgcaagaggagatgatgatcccatgtggttgtcgcaagattagatggtgctagggcttgacgtaagatcgaggcgatgttaatgtcttgtgctatgcaatgaataaaatcatagacatatagtagccacacaagttagtcccctcttcgtaaacacaaaaggagaaaggagcttatgaaatatttctattatagaatactccctctttcccaaattgatcatcatataatggattttaaaatttctcaaattaatcatcatataaccacatgtacacggatttcatcataatacaattaatgtagcatgggagaatgtgtgcatgctaaggtgtaattgacatagtgtttccaatcaatgtatgcattgtgggagaatgtgtgtatggtgatcttgatcaatgtgatttaaattatccttggtttcggtgaataaacatatatgatgatcaatttgggaaggagggagtatataattttggacgatacgtaccagaaagtccatactcacaaccagttcttccttgaaatgcccgcggacgtcttaacgaaaatttgccaacgccatacagttgcaaactataattaatctacatagtagcgatagcgtctatcataatgacagtagcagtggatgacattacctgttaatcatgccgaatattgtgtcgaatgtttcctgttcattacgcatatagtctaatacatgaatatagtggaatatgcaaattacatgaaattggtataaaaggcagtaaaaaaatttgtgaatacgagaaggaaattggtataaaaggcggtaaaaactcacgtgttgtagggcaataatatgaactccttataatgtagttgcactaggaatttgtaaatgttatcctcggtttctcctgtgaaatcatctacagtcttctccttgattatgtatgggtccatgaatccacacttgaagtatccacccctacgacaattttgaataacctccattccacagccaaaaaaagacgttaaatctttgatgttacatacgacggactaatcaatgaaataaaattaaacgacacttaattacagaacccagcaattgacaagagagacgtcaagggcgtcttgttggtatacattgtacacatccttgaacttgatccacatcgtacatcccacagaagtctttatttttaaatctttcagcgaacataaccctaccatgagttgattgatccatgtaccatttatggaatcgatacatctatacatctgtgtacttagttccttgaccagctctggcttgacaagtggtgcgccgattgcgtatgagtgttttagatcttcttccatggctttcttgataggcgctttccccatcaattgctctttgataagacatgtatctgccataaataaagtaatttcatcaacagtttgcaaggggtcaaccgcgtgtttatcttgcattccaaactaggggacattctttgtctttcttgtcctcttctcaaaagatttgcgaattgagtggtctagtcttatgctaaggcatttttgtccaattcgctcatcttctaaaaaaagaccttagttgtcaggtctattggagtcttgttctgtggactctgtgacttgaagaactccttcacttgccttttcacttcctcgtcagtcctatcatacgctcttttcttgagagcggctttctttggctcgtcaactctaggcatcttcgtggggcttccactcggcgatgacgatgatggcgagaagatgattgcgaaaaactgctaagtctcgatctacttataactagatttttagttccggttggtatgaacaaccgagactaaaaatagctttagctccggttattcttaccaactgagactaaaaatccgttcccgctatttccaattttttaggtatcggccttggataacatctgggactaaaaattaatgagaataagttaaatatggcccaattaattgcatcaaaaataggttaaaaactttagtaattaaccgtggcccaattaactgcattaaagattaaaaaaatcataaaaaataagtaaaatacattaaaaagaggttaaaaattatagcacttggtcacaggccaagtgctatgaccgctgctcatctctccaaatggacgtttcatggtccgttaacatacgctccaatttccggacctccttttcactttcgcaatctttttttacatcatacaacatctgaccaagatcatccgaaccgtcgttttcttcaataactccttccgcctcgcctattgtattttctacaaatctatcgtattgagcccagtccggaatgttgtcgccttcttcttcatcttcttccattggaactcctaactcttcgtgcgaggtccaacaattatagctaggcatgaataccgtcttcaacaattggatatgaagagttcttgatgaagaatacttcttctggtttttgcactttttgcatggacaacatataaaacccttaggttcgtgggcattggcacactcaaaaataatgcacgccatcaataaactccatcgaccgtcagtctatggtgtacatccatttccgattcatctacatcaaataaacaaatgtagagtaagtccacaaaagtgaaaataattaaataatcatataataatttaaaacatcataattaaaatcaaaactgacggtacacgtttttaatgaattcatcttatttataatgattttaacgagttttaaatggacttaatcgaagtcatggttaattacatgaaattctaccagttttaaaaaattgtacatatattttttcatgtattatccttattttaattatttttaagagttattttgaagttgtaaacatatttttaatgcactctacctatttctaactattttagtgcttttaaatcgactttgtttcctattcttttgtcttcattttctatatttttcctttgttgtcttttttaaatatttttatccaaatgtttctaatattaagaagtacccatattttctctaaaaatttgttatctctcatctttttagatataactttttgagaaggaatgatgtattaaaacatagctagaaatgtaatgtgttaaccatacattaatagaggatgaagttgctaaccttttagttcccttcgatttgtatcatatcaccaaaatattttcacagaaaattttggcagcacctctcttcctcctcctttcactttgcagcaatggcttgggctagaggaggaagctatataaaaaggacatgatctttagtgccggaaatctatcaccaccacaaaacaaacaaaatacaacaaacgcacaagggtgaaagtaagagagagataagggggagagagaaggagggggaagaagtgaataagagagaggacggcatatgggccccatatgttagtgcgtcccacaatttttttgttggatgaaaaatgggtctcacatgtttttataaattctactgctacataaacgtcatgtcaacgccacatgggacgaagacaggtcaacaccgccacgtcagcgaaaccgctctccaaaaccgttcgggtatcgaaatatccagaattgtagtttagggataagaatcagattcagccactagttaagggagtcaaagtggacttattccttttagatatggttttcagttgtacaattattttcactcatatttcccaaaaaaggaataagttcaccagccatccctcaactttatgtcgagtctgtatgacatccctaatccccaatacccactcctaaaatatacaaaaccgtgcaatttaggtcctatagcggtatggatctctggttacactgatgtggcatcctagtttagcaaaaaaaaattatggggcccacatataagtgagaagaaaaaaaagtagggaccgcatctcttttttcttcttttttctcttctattttctttctgctcttctcttctcttgtctacttcagggagcgaggctgccggcagtgcaggctagtgtggcagcgagcggcagatgaagcggcggcgggctagtgccgcagtgagcagagcacggaacagcggcgagcgaagcagtcaggggacggtaggcatagcgtgaccaccgagaaggtgaagggagctcgccgcactccctctctcatcggcgcctcctctctttctgcgacggcgtccgtcgtccctaatccttgcctccgagcctaatcggtgtcatccccaatccttgcctccgagcctagtcctttttgcgacgacatctcgttggcgtatttcccaatcattgtgcggtccaaaaccatcgccggtcatgctttgctccgcccacatgtccctactggctgctctgcctactgctgcccggacgtccctgcactgcgtctccgccccatgcctcgtgcccattgttgagcccccatcagcgccgaatccgtgggcagagacaatctagcatgattgggagttcgttcgccaccgtctatgccacgaccgcgacggtgcacccatgagctcacccatcgcgggagcctatggaggcgttcaccgcctccttcaccgcgacgcccaccacaatagctaacctagaggacactgacatgtggggctcaccgtatgccacgtcagcgaaaccggggaaaaattagatcaatactgcctcgggactttttttttttttttttgcatgattggggaccttagacagattcgacgtaaagttcagggacgtcggatgaacttattacccagataaaatagtggtcccagggatgcagtcgcgacatgcgggccgggcctgattgggccggaatgggccgcctccgccgccaccacacggcgagtacatttctcgccggcaacacaaacagaaacaggagagagagagagaggagaagaaacaggaggaggaggagatcgaggaggggatggggatccggttcgtggtgatggtgaacaagcaggggcagacgcgggtggcgcaatactacgagcacctctccgtcgacgagcgccgcgccctcgagggcgagatcgtccgcaagtgcctcgcccgcaccgaccaccaggtcccaattccctcctttctcctttctcctttctccgccgccgaatcttgtgtggttcttggtagagagagagagagacagaggagatccgctctgatctgattggatttgtgtggtgcgtcaaaaatttgcagtgttctttcgtggagcaccgcaactacaaggtggtgtaccggcgctacgcctccctcttcttcctagtcggcgtcgacaacgatgaggtaatgcgtgtgaattcatcgtcctcctctctccccatcatcttcatggattcagttttaggcagcaccaattaataagcactgatatgaaggtagaattggtttgtatagacgacgtgtcaatggctgaaaatccgtctttgctgtagaggtgtggttgctctttgtcatccggggtcttctggctagctccataagctggtgggctagacgacttgggttcaaagcctcacactttctaattatttgatattaggtccttccctaatattcgcttctttttttgctctttgtcatctgtctttgctcaacccaaacacaaatgatgtgcttaggattgagtctaaaagggatagattttgcaattttacatgtatatttggctcgctcaatgtcatcattaacttgtgtcctatcattattgacctgtccttctatggcatatctgtacttggttaatttccactattattgtttgcaccgtgtctcaatcctgtattgttgagctccgatttgtttctagtgtctcaagcaatctttgctactagtttccccttcccccctggcacacttctgtgcgtctgaagcggaaatctaactggaggtcaacagcacttattttggcttctaagagttaatgtaaatccataagtttgatttgctatttactggaaatcaaattatttggatttacttgatgaatcataatagtttcaaatttccttgtttggcaaggtcgcaagagcatcatataaggactaatattactaattacatcgactaaaggagctctggagttaactctagaaactttgcaatgtcgagctcatgtgtactcagactgtgcatgtattaaatctgcaaacgttcagttcaaataaacataaaaggcagcctttatacatgttcttttagcagacattggagcaagcattgattgtattctacattgctgatacaatttgggcaaaagctttgttgcctgaaagcatcaaattatctcataaagaacccctctatttcgcatttggaactgctaacctctgattagtctgacggatatttcctgaacatcgatcttctacgatgtcttcagtggtagttaaacaaagcacgggtgaggtggacaaaatgatctaatgatggattgtcagccctcccatcagaaacacaacttcccctcattttggcacattgccaggatcaagcacatcagaatcaacgatgcgaggtagggagtgaccagagagggagagagaaagataggtgtttgaaataaggagaaatgatcttaccatccattccagaacccctaaaaatgtatattaataaaaaagtgactactgccttgatctacagtcatgtcggttcatttacgttaatatttgttcagttatactcacgtgcaatggttcattaattgggtgcagtggtttgtttatgcccgtactgtcagattggttattacaatagtgggtcacaacagcagaggctagagggggcatgagggtaggtgctgttttcatttcaccaaacagtgccctgggcatctgacagtagattatattctagtatggtcccattttgtagggattaattttttacaatgtctctttattgagcctgctccctttggttagttgttaaccacctggcttatctatgaattttgttgcaattggtgatcgttcattttctcatctaatatgtttctactcaaacaatttatgtatctaagaaagaggattctccctccaaaccgttattgttttcatttttcaacttacaagagagatgggcacttgcatttcaaattttgtgatgagtagattatgttgtagctatacacaagagttctaaccatcgtcacatccattttcttgctttcgtccttgtaactgaatatgtttgaactgtgtctgttttggcagaatgagttagctatccttgaattcattcatcttttggttgaaactatggaccgtcactttggcaatgtggt

SEQ ID NO: 6526 - DNA, 6784 bp, Oryza sativa
agttacattatagttacagtgtaattacatacaagttacagtgtaattacactacgattgtactgtaattacatctgacaaatatcagggggagaaatttgatgacaaatatctagcaaaatcgttaattaaatacacacatcttaatccgattagctacaattcctagcaataaagtctttaagggataaattaattttggagtgaattgcactttgggccaccttttattgctgtagtttcactttagatcaccctagtcaattttttcactttgtactagctaaatttatgcttattgcactttggatcatctcaactctcttcattagccatgtctacctatactccggcaaatgtacgacctgctcatagacggagaattttgctagctgttataaccgatgtcttcaaggttattgatgtgataaagaagtgattttaggtggtctaaaataaaacaaatgtaaacttagttagtctaaaataaaaagattagaccaaacgtaatccaaaataaaactacgacaataaaatgcggaaactctaatgggcaattgatcgccgtggcgatcgggtagcgatcgccccccctccctccctccacctggtttccgtttttggcaccgtattactttcctattttagtaaatttatgcacctaaagtttatacacctcaagtttacacatttaaagtttagagaccaaaagtttataagtcaaaagtttatatatccgattcaaatttgaatttaaattcaattttttttatatatagtatttctatacatctaaagtttatagacttaaaatttataagtcaaaagtttatataccgttttaaatttgaatttgaattatatcatattcaaatttgaatttgaattcaaatattttctatatatagtatttctatacatctaaaatttatatacctaaagtttatagatctaaagtttataagtcaaaagtttacatacccgattcaaatttgaatttaaattcaaattttttatatatagtatttctatatataaatttttctaactttttgttttttttaaaaaatattttgtggtgtactgtagtaggaagggaaaaatggaaggaggaagggggagaagagggaggagcgtatcgctatagggggtgctgatcgttttttttatcgcttgaccctccctccagcgagtgatcgcgtactaggaccacccaataaaatgtggccaaaagtgtaattcactcttaattttagttgtcaatggagcacgaaagaatagagagagtactatttcgttgaaaatatcatttatttgcactctggatgtcacggaattcgtaaacatgtaattgctacagtcataaaaacttcgtagaaatgaatggaaatttttagatttagttgttgctgccaaaaaaaaaaaaaactgaggggaaaagacgcctctaccctcgcaaccgatacatcagacagacttgtcttcgttagttcgttccctttgcccgagggtgccaccgaggctcgccgccgctctccgcttccaccgccggcgggagggggaggggggctcgatcgatctcgatagctcggctgggccggcgaatcagcctcggtagtggtaggcgagggagaggatccccgtggcggcgttgctggcgtcctcggtggaggcatcgagatggaggggcttcgtcgccggcgacctcggtggcaggtggcctcggcggcggcgggaaggggttccgtggccggtgacctcggtggtgtggtgtcatgggggacacgacgttgccggtgcctgggtggcggctgagtgggggaggcttggccggcgacttcgacttcgttgccggtaccaagcatttttgacatttgtgactttggatggtatattcgtaatttctaagtaaatcttccaaaacaatacttggtgaagaacagaaacctggtgctggttagtccaagccttacttggtgaacttttcagaaaacaatactttgcccttcaaatctatttttttagggaatccaaatcatgtccagttatttttcaacaatgctagataggtgtaatgtgtatttctactcaaccatgtcatttgtacgctcaaaattagcaaatttgaacgatttgcaagggaaaaaccatctggcctagaaaacttgcttcgacttgctcagaattgaagtttattagacacccttaatttatgtgtgcagaacgaaacctatatgaaatcagattattttcttcaaactaggaaatactatgacaatataactattatccttgctctcaatttgttccttgttttgcaggaacactggagcacatacatacttgagaacgacttcaagtttatctcatcaaatggattaaatgctgtaagaatccctgttggatggtggatcgccagtgacccaaaccctcctgcaccctttgttggcggatctctagaagcattggataatgcatttcgatgggcagagtaagaatatttacttttccatgtcaccacagtatagtagtttcttttttttttttagcaaaaccaccgtaatttcttcatcattaaataaattctcttagcttggattgaaaaaaggatgtcatatacgtaataagcgatctttgttgttgtgcacaggaagtacaatttaggtgtcattgtggacttgcatgctgcacctggatcgcagaatccatgggaacacagtggtagtagagatggttcacagacatggggcaccaccgatgaaaccatcatccaaactgttcaagtgattgatttccttgcatccaggtctgacaaagatatcaataaataatattttccttatcattatcttaaaaccggaaaagaaaaaccaaagggatctcatctttcgtcttaattggtctacagatatgccaaaagcccaagtctcctggcagttgaactactaaacgaaccgttggcaccaaaagtatcagctggaatgctaaagaaatactaccaagatgcgtacaatgctgtgcgaaaatatacatcagatgcatatgtgatcatgtcgaatccaattaatgcagactactcgaatgagattctccagtttgccggtggcttctttggtgctgtgtttgatgtgcactactataacatgttcaatggatcgtttgacaacacaacagcggagtggaatatacagtttgtgagaaatgatcgttctgctgagctcaggagtgtcacaaagcagaacgggcctctcacatatgtaggtaagttgtcgctctaacatgtctgctggtgtgctttactcctccattggatcaacagcgacaattatattcaatcaattgatcaataatacaatagctaagtgattctccgttccaaaatgtggtgttttacttttgtcctaagtcaaagtaatctaactttgatcaagtttatagaaaaagtgcaaaataattacaacattaagctaagacatatttcatcgtgcatttgaatgaaactaaattgatgatgtcgttgtagatgttggtgcattttttctataaactttaccaaagttagagaagtttgatttagtacgaaacaccttaattacaatatggaacagagtgagtagtatttgtcaaaactatatagtttgttgacactcgacactatctaaatgttattactcagtggtatattgtctggtatgagctcttgattgctacaggggaatgggtggctgagtggaaagtgaataatgcatccgaggaagattacaagaggtttgcgcaagcacaattggatgtgtacagccaagctacctttggatgggcctattggagcttcaagcatgtccagaaccattggagcttggagtggatgatcaagaatggttacatctcactaaatcagcctaagttacccatccgagcagtgaaccttggcggctggctcgtgacggagggctggattaagccatcactctttgatggcatttccaacaaagatctcctggtatatctattgaccaaaactatctgataccctctttctttcattttgtgctcaccctaccacgtaatgataagtaatcctaattgctgagatactataccacaattagctagctattttcatgtcctatattatatttccattattgatctcttggttaggatggcacccagctccaattcaaatcggtcaccaacaatatgtaccttgccgctgagaacggaggtggcagtgctattgttgccaaccgggagaaagcgtctggttgggagaccttcaaactgtggaggatcaacgagactacattcaatctcagggttttcaacaaccagtttgtgagcattggtggcaatggggcagttattgcaacagcaaccgtgccggggccgaatgaaacatttcagatcattcgccttgacagcgacaaaagcaggatgcgcataagggcacccaatgggaaattcttgcaggtaaggttaatttgcaaaacgaaaaatgccttgtcagtgtgcatctagttgttacctgctactatcatgtatgcattctctcaatatctgcggaacatatgtgattatttcaatttactgatgaatgtctattgatttaacaatcgtctagtttcaaggagtgatttttttttaattcaagttgttagtgtagtggttgtattatgctcatgcacctttggtagagctcaggtgctagatttctatactattaactagtttgcgcagcggtggaaattattattatgttcaaggactagagccaccacctaagtaatacacaccttaaatctagtgacagagcctacacgcatacaagattttaggacgcaaacggtgcaagggtgaaaatgtacttagtttgggaagttctatagcgacatactccctctgtcccattttaagtgcaaccatgattttccgtacccaactttaatcatccgtcttatttgaaaattttttgaaaaaatttaaaaacataagtcacacataaagtactattcatgttttatcatctaataacaataaaaatattaatcataaaaaactataaataagacggacaatcaaagttagatacaaaaacacatggttgcacttaaaataggacggagggagtatttctatggaaattctgcagccacctgtttttatggaaatgctattagccccatcttttcacttatgtttatgctttttaaccaaaatttaaattttcaaccttaaatttggaattgattttgggtttttttatcaaagtttatttttcagcctttgcttttagatcgctaagaacgcgtatataaaagttttattcacaaattatttttcttttgcaaatatgtcgtagccacctttaatttccatatgtaacaccatatcttaaattcatcttttttttaagggagatgtctaaaattcagataaaacagtcttcaggttagatttgtgaaatcttcaggttagtcgatcttaaaaaaactttttttatcatggttatctggtttaacctaacttaatttgttagtgttttttattgtgtgtgtctggcaacacagtgtggctattcgagaactgcatttggtttgataaagcgggcaagttgtgtagtagttatgcaaatcattttttttaaggtttctttcagtcgcacgtacttctattagattaactgcatcgtcaattgtaaatatatttctccttttgagatgttaggtgaaggccatgggttcagtcactgcagatcatggtgctagcacaaattggggaaatgatgacccatcagtctttgtagtaaataatatttatggcttgcaaggggaataccagatttgcaatggctacagtgcaggcaatgccacagaggtgctcagggtaagatgtgacactgttgtttctattctatttttgttgagacactgaatggataactgtaggcatacgatgtttagatcacttgttttttctatccttaaaaaccaaagtgttatatttgtatcactgttattattggttcaacaattccttttggttttgttcaatagtaatcttcaacaattaatatatgctgagttccttccaattttgtactagttaaagaaatggtagaacctcactgaatagagttattgtctttcttatgaagaaatctttcgaagaaagagaagctagcacttacatagtttatttatggtattcattactaattctagttgtcaaatgggcaagccaaaaaacagagcaatatgcatatccttttttgaaataaattactattgtagtgtataaaaatactcttcttcttgagacgaaaatatagtcataattgcagttcaatatctaaagttctttgtttgcaggagcactggaacacatttatagttgaggatgacttcaaattcatctcatcaaatgggctaaatgcagtgaggatcccagttggatggtggatcgccagcgaccccaaccctcctgcaccttttgttggtggatctctacaagccttggataacgcattcaaatgggcagagtaagcatatgcacatgtttctatttaaaaataatgagagaagaaataccttgtgcgattgagttttatagagatggacataaatatatattattcctttacagactgaaaagactattacatgcttaagctgttattgtgattattgtgttttattgcaaatgtcatgatattgctatatgccattttgtgtgtgtaggaagtacaacataggtatcattgtggacttgcatgcagcaccagggt

SEQ ID NO: 6527 - DNA, 19816 bp, Oryza sativa
tgaaaagatatataaaaaacgactctatttatggtttttgacaatgtaaaaacattctgattattatacgatgcacccatatatatatggatttgcgtatgcgaacaatccaacctattttcctgtaagcgatcgggtcttatacgtagtttattaagtgtactgtatttcaaaatatttatttttaaatatacagtcgtatttctcacgcttttcttaattcattgacaccaagtttttttcttcatattctattttcactcatatttcttagactataataataccatgatataaccatatactagtctctacctagcccttgaaattgaccctattttcataatacaataaagaatcgtaatatttctgacactaactaattatgtcaatttgagatacaaacataccagaattgatgaatcgtaatactttgagacaggcagacactgatgatgataattaatttgattcggtttttgaaggtaaacccaaacgacatcgtgttcggtgggtgggacatcagcagcatgaacctggccgacgccatgaccagggctcgggtgctggacatcgacctgcagaagcagctccggcatcacatggagtccatggtgcccctccccggcgtctacaaccctgacttcatcgccgccaaccagggctcccgcgccaacaatgtcatcaagggcaccaagaaggagcaggtcgaacaggtcaagaaggacatcaggtagctagtctctgagctaccaaaatgatatcatcttgcttgttgcctctatttcaggttataagttgtttaatttgattttggtcaaagtcaaactgcttcaagtttaaccaaatttatacgcaaatataatatatttatattagcaaattagttttattaaatcaataattaaatatatttttataataaatttattttgggttgaaaatgttactattttttctataaattaagttggtcaaacttgaaacaatttaactttgatcaaagttaaaatgacttataatctgtaacggagggagcagtagactgtatgtgtgttattttcttataccaaaacaagctatgtgattttctgtttgacatgaactgacaaaattcagcaaaagtttgtatgtacattaattttggttttgatggacatgggtgggatttgttggtataagggagttcaaggagaagagcaaggtggacaaggtggtggtgctgtggacggccaacacggagcggtacagcaacgtggtggccgggatgaacgacaccatggacaacctgctggcgtcgctggacaaggacgagccggagatgtcgccgtcgacgctctacgccatcgcctgcgtcatggagggcgtccccttcatcaacggcagcccccagaacaccttcgtgcccggtgcgccgcccgccgtctgctagctacatcctccattaacgacgacgacgagacattgtttcatgaatcccgttcttaggttgacgatgatgtgctgatgcatggacagggctgatcgagctcgccatcaagaagaactcggtgatcggcggcgacgacttcaagagtgggcagaccaagatgaagtccgtcctcgtcgacttcctcgtcggcgccggcatcaaggtatatatgtacatatgatgaactccaactcgggtgatcgcgatcgatgaaacatgaattggtttgttgtgcatatggaaattggcaatggcagccgacgtcgatcgcgagctacaaccacctaggcaacaacgacggcatgaacctgtcggcgccgcagacgttccggtccaaggagatctccaagagcggcgtcgtcgacgacatggtctccagcaacgccatcctctacgagcccggcgagcaccccgaccacgtcatcgtcatcaaggtccgcccgcccccattcttgatccaattcattcttgcagtagtggcactcatcatgcatatggtgtggctgatgatttggttgctgtttctatggattaattgttaattgctttggcactcatgcacagggttagaaattccggaatgaaatttctgaaattcagtcatttcgaatcctcctattccggaatgaaatttctgaaattcagtcatttcgaatcctcctattcgatattatttcggctgaattttttttttgtttttttaaattcggtaatattttgttcaaattcaaatttggtgacctccgatagaatctgccagaccgaaaaattataccccgctgatgcacggtggctgatgatttggttgctgtttctattgagtaattgttaattgttgcagtatattccatacgttggggacagcaagagggccatggacgagtacacctcggagatcttcatgggagggaagaacaccatcgtgctgcacaacacctgcgaggactcgctcctcgccgcgcccatcatcctcgacctcgtcctcctcgccgagctcagcaccaggatccagctcaaagctgaagaccaggtaacaacagcaatgcaatcacatcttgcacagatattggaatggacccagttcatctctgacaacgaactctctgaatctactgtccgttctgctcattgtgcaggataagtaccattctttccatccagtggctaccatcctgagctacctcagcaaggctcctcttgtgagtgcattcatttcctgaaatcaaatgcacttttggcctgttaactttattgccattttagaccataacaaattttagcgttaccaaattttagtaggataacaaactaaatataatcttattattgccatcataccaaaatttcgtagttccagaagttctctcatgagaacactactcaaatttgacaaacctccaaaccaaacacgttacacatctaacgctagctaccaaaatttgataacatcaaaatgtaccaaaatttggtaattttggtaaggttgattttgacaacaagtgaacaagcccttccattttcacttgcaggaacaaaacaaatttctgttagtttctgttgcaatgcaatgtgctgaaaaatcatttgaaattgatgaggagtttggttgatgaaactgcaggttcccccaggcacaccagtggtgaatgcactggccaagcagagggccatgctggagaacatcctgagggcctgtgttggactggcccctgagaacaacatgatgcttgagtacaagtgatataggccttgacaggtcctcttatcaggagggatgatgaacagcaagtggtggaggaaggtgacagttttcttcaacaagaaaaagaacaaaaaaagagagaaaatgaggaacacctgaaagaaataacaagaggccaagtggggaagcaaatgaaatgatcaagtgatattcattcagaaaatgggtgtcattcacttggatcctcttaattgggggcatctattgacagtttgacactctgctccatgattttttttttcattttttgtttttttaattgagatggagacttttttcagctctgctgctagtatgctgtgagctgcatgaacattggttaatattgtgtatgatgataggtgaagcaaggaactaatcgtcttctatgcttatggatctatagtacaagttgtcagtattactgttaagtcttatatctggaacacttttgaatcaaagaacagctttggtcctagtctgtatttatgaggccatgttctgcttatcaaaatgcagcaatttcctgttattatcctgtaattatgcagatagtgaaaaaaagcaaccttcttcaacatctgcatatgctgtgcaaattctgtactaatggctaaaacatcttggcatccatgggtaaacatcaggttaatgtgaaatgaggtgtgatggttacagttgccagtgccaggaggtgtcttgcggcaatttccagttcatgtcacataatcaatgtatgttcctttcctatgcacggttgtctctcacacacacggcagatttcttccaccggtttacaactcgaaccaaggatcacaatattactttccaatgctaaattagcccaaaaaccgcgagcaattcggctcaaagatacttacacaggttaatggcctcttgctcctcgctcacagatagtctttttcagcagctgcacttctggttgtacaatatattgatgagtgtggtgcaccttgctaggaggctaggagtgcagcttcaaccaaacttgagagggggacatcatggatcatggatgtcttttacaatttagatttcagatttcctgacaatggacacgacgacggctatgtcatcgagtttgcccccgctgaaacccaggtaccccactgcaagagcggcatctgagaatggggtacttccggctgcagatctaccaacttcctgcgccttggcagccaggtgttcagcaatctcctgcaagtggaatagccatgcaatgattcaatgttcagattcgctaggcattttatttatgaggcaagttgattctaaccgttggtttgagatcggcttgtaaagatttcgagaccatggtggctacttcttgctcatacacattgtcaaaaagaccatcacttgctgttacaatgacatcaccatcctccagctcaattgtataattctgaaggaaaagggtaaacaataatgttagttttaaattacttaatacgattgcacatgatttatagtacaaaggctaatctttgcacctgtacaagtttcaggggattatcgcccttctcaatttgcagtggaaagttgaaaccataaaccattggttttgatttttggtacacctctccatttcttatcaccagaaatccagagtctccaatattcgatgcattgaggaactaaaacaatgacaaatgtagcattgaggaactaaaacaatgacaaatgtaacaataaatacagtgcaattggttcattagaaacaagaagagtcttgatcaaaagaacagacctggccatcaaagtgagcaaccaaaacagtggaagaaccaggagagtgcgcttcatctgcagccttggaaagaacttgttcgggtttaatatctgcagcgccttgattctccataatgaactttttacaaccatccattagctcccttgcataaagccctgcattgatacctgtttacaaaaattatacaacaacttagcacttcagcattcccatgaataattatgatacactaagaacttcagtatgaacatgtatcagacacatagtgttggctcaaaattaactttgcagctaataaataaatgagtgaatgttaacattggcccaagggtactaccgatatgaacacattttgccctcttacttgaagacttggtccaaaccaggttgtatgcctttcattctatatccatatatagagcctgtggtagaccagtggcctgtgtgggttgacatttcaaaagaatattcttctaaagaaggatgttcctatttcttgtactagtagtaataaacttattctacaacctccatttgaccatttccacatccattctacagtattatagttccatttcttttgtgcaagtcaacttttggtgaagagtagatccaatacggggtgtaaaacagaaaaacccatattcatctcccagcacctgctatggctattcaactcgatggttattgtgtaaccctgatggtctttgaattgccatcgtcctgctaccaggcccacaggcaggacaccattttcccattcctatggagtttagaaagagaactctgtcccttgttcctcaaccattattcttgctagtagtaactatctggcagtacttgatatcttactgagctggacgtaaagaagctaaagttggttcgtattttcccactacgatgtcaaacccataaaatactcaaggaaccagaaagaaaatgaatactaaagtattctttaaatactgaaaaagttgcttttggttaataacatcatcagtcaattaattttcactatagtaaaaatgtaaaacatgctttatatgtcttgtccaacatctatagactatagatgatatagtcactaagtcaataaaatctgccaaggtccttgtgtttattttgtttaacaagcaaacatttcttgaattttctgatggataaggattgactacatgtttggaaaacacattgtcttctaaagtgagcagtaactaaaatttaagaatagaattggaatgtggaaacctgcgcctggaatggaaagcctagttcacactgttgcactgaaatattcatgcggtttaccttcaaatgaccactggccaactccatcagccacaccaaaccagccatcacacgcaataaaatatgcatcttctccacctgttgctgcctggaaagttattcaaaccataattgaagcatcaggtgaaccattagtgtttctgacttacagtaatagtgttatcaaatggagtaccaaagaaaagtatgtagaatgtggaagcaataattaactgcttatttcagcaatagacatactttaaatgaatttgcttctgtgatagggtcaagatagactaaagtccaaaggtatacagcataaaagagaacacgtagcgcaattattagtaccttagaaggatgaggcaagatcgcagcacctgatgccaacacaagcgttgatgaggctactggaaccatcctttatatgaattacaacatgacaaaattattaaagctgtttttggaggtccaggtttaaaagcataaagacaggaaaagccataagatatgtttgcatgaaaaagttgcctaactaaatgaagacaaaatacaggtcatatccagctttgtaagcatcagatgcgcacaaccattactgcacaaacttgtatggaaatatatgagctattaataatttactgaatgcctttatgatttgaaacacttgaaatcgaagtaagaaaacaaattaatacctatcagtattcttcacctctgaagtgtccttttcccaatctaccttgttacaaacttcttcctatagggaaaaagagagaacattaggccctcacttgcacaaatcaaactaaataccaccatgcggtaaatatctgatagcacaagatctatgcccccaagtacagatcatattcacaacaatattaccattgtgcgactaaatttctagaggcatataccaaactctcaaggtgtatgtctggacccagtttttatgaagtgttgatttgaaacagaggcagtgtgttttagtataaggtatgatcccttacaagatactgtcatagtataaggcaggagcagacaaaacaaaaatatcgtgacaacaacagatgatatacaacattgatcccgagtatgaacagatggggaaagcgaccacataacaactggccctcatccaaacaaaattgttacagacatcagtgagctgcggttataaaaaaaaaaaaagaggaaaccgagggtccaccaaaatgcttcaagtttctgactttgtgtgtgtccatgaacttagtaaatgatttactagtgcaggtaccaacaacatgaactcttcaatttactccttgtaaacagatactagtaaacaaattacaaatcgattgaagcattaaccgagtcacccaaccttgtcaagaaaaaattaccatcttcaatcattcacaattgacagcatccttttttcagaaattaaccatgtttcacaattcacagcatccattttcagaaaaaaaattactacaaatatatttttcttgatgaaggtacgggtgaaatcgggtgaggaatatcaatcagggcgtatcgaaatcagaggagtaaaattgagcaggtgagggaaggggagaggcataccgccggtggcggcgggacggcgaactcggcgggctggtcgtcgtcggcggcggtggaggcgctggactcggtgtcgacgtcggtgtcggaatcccgcgcggtggagccatccgaggcctcctcccccgcatcctccaaaccggaggtcgccgtcgcctccgctcctccactcgccaccacctcctccgcgtccaaacccgtcgccgtcgccgtcacctccccttctccaccgccatcccgggcctcaggttcagcagctgcggcggcgtcaccgtcgagccctgattcgacgacggccgcggcctcgggagccacggcgtccgcccgccgctgctgctgctcctcgtcgtcgtcgtcccgggggcgcgcgaagcggaagacgatgctcccgtcggcgagctctgggcgggagcaagagagagagacaagtgagaccgagagcggcagagacgctagctgctaggctgctgctgctgctactgcttaccggtggaggagtggaggtcgggggcggcgcggcaggcggtggcggtggagtgggggcggcggtggtggcgaggggagggggagacggggaggggcgggggagggggaggggcgagcttgcaggggcgcaggtcgagcagccccgccgccagcggcagctccgccatggctcacctcgagcaagcaaagagagatttgaaaatggagatgagctcgagagagaggaggaggaggagacgaggttttttgtgctggagtagtagtggtgggagtgaagagattagcgttggtttctaggcgaggaggaatgagattattatgagaaggggtaaggaaacaaacaaggagggaaggggacactggggggtgggcccggggtggagtaatggtgagttaatctgggtggttaacggtgcaacataaagaaatgggtttggacggtggtgctaattgtgtggtcgttatttttgcatttacccaccggtaactccgtcgcaaaggttcatcctacaaacacagcctcctactaattggctataaataaaccctaacctgtataaaggtatatactcgcacacactatcctatatattcctactacacatatcttgtacaagaaaaatagaatcacaggaaacaggaatagaaaattagaagaataaaaaaacacataggagtaagtaaaaaacagaggattataaaacacagaataaatacatgaatgatcgttcgattaaaccacacaaaaatatagaaataatcatttgattggaccactggaaaacacaggataaacacataaataatcgtttggtcggacaacacggaaaatgcaggaatgatcatttgattggaccacaggaattagatgagagatagaatcaggaaaattttcaagaggttggaactctggctaaatttatttgaaaatctctataggattgtccattacataggaactagcatggtggcccgcgcagattgcgcggctagtatcattatattttctctcatataatagcatatatgttttttattatattattcaaatatattaaaatgacaacataattttaaattttacaataactttacaaaactactaatgtgtaatattcatattgtattttatatacgtgttagttattaattatttttaatatcaaattttagttatttgtaaattatatatattcctatatggactctagactcgtcttttaatatattttttaatttcgaattttctgtaaaagtgtatttctatatagactctatactcttcttccaacattatttatttttatttctaaatttttattatttctaattgtatttctatgtggactctaaactcatatttcaatattctttaatttttaatttcgaatttcagttacttcttgtattcctatattgactttaaattcttcttcccatgtttttcttaatttcaaattttagttatttgtaaattgtatttttatacgggctctaaactctacttttaattttattatatttatttcaaattttagttagttttaaattcctatatggactctatactctacttctaatattccttatttttaattctgtatttcagttatttcctaattatatttctatatggactctatactctatttctaatattccttatttttaattccgaatttcagttattttctaattgtatttctatatggactttatactctacttctaatattccttatttgtaattctaaatttcaactatttcctaattgtattctatatggactttatactctacttctaatattccttatttttaattccgaatttcagctatttcctaattatatttctatatggactctatactctacttcttatattccttatttttaattctgaatttcagttatttcctaattgtatttatatatggactctatactctacttctaatattccttatttgtaattccgaatttcagctatttcctaattgtatttctatatggactctatcctctacttataatattccttatttttaattccgaatttcagctatttcctaattgtatttctatatggactctatcctctacttataatattccttatttttaattccgaatttcagctatttcctaattgtatttctatatggactctagtctcctcttctaatattccttattttttaattccgagtttcagttatttctaaattgtatttctatatggactctagtctcctcttataatatttcttattttttaattccgaatttcagctatttctaaattgtatttctatatggactctgtcttttctttttctccgattaatgtgagaatttctaggccatgagagcgaacgtgaaggctcctttttctattcctttaataatataatagattccaaaacatatgatatgatttaatcatttctttaaaaggtctttatagtaaattttcctatataattaaaattctctaaaatttctatgtttttccttcaaatcaaagggacccttcaaattaataaagtcatcatgaacgctgcattatcgaatggtacatcacctacttataaaaaatagtcataaatatgagcatccatattaaatataggacataaacctgaatggactgatttcatcacaaacaacctaactaattgagctacgatcaatttgtatttggagataatatttgacgttgagcatatgatttgatgaaaaatgttcaaactttgatgttacttttatatcgaaataagtttataaaacctacatgtttttctaggactaagacctatatattatggtgtttttcatggtaaatctagacagatcattttgtatttttataatctacggggctaaaagtttatctcaaaatcgtcctaaacattaaatatatatgcttggagccttagaggtagtataattttcataaaattcctgattccaaactagtagtagtgctactactcaaattgtttctccaagtgtcatgtcaatgggtggtgttgatactagctagactcgccaaacctacgcatggtctctacttaggttgagagaaaaaaacatttttcccgacgtaagggtctttttttcgcagatgaacatgactagccaaatgaccgcctaaaaaatataaatcggcttgtatcttctcacggctttctttacggttactcttgatgcaccccaataactactgtatagctagattttgtcgaatttcatgtcagctggtttggcttgttttccaactatggctagcctaacatcacccctgtcacacacaagatgttacccccaccctacggccagttgtctattttgtcatatgcaatttttagccccgtctctcctctccatgacaaacggcattagcagagtgataataacttactctgtcggtttcatattataggtcgctttgagttttttcctatttttaagtttaagtaagtttatagaaaaaacattttaaacaccaaatcattttcattaaatctagcacggaatatattttggtaatatgtttgttttgtgttaaaaaatacttctatatttttctataaacttaatcaaatgtaaaaaaaattgactaagaaaaaaatcaaaacaacttataatatgaaacggggaagtagacaaaatcagatcttctgacgcattgtcaccatgatgtcgtagctgacatgtggactctagacgattggtctcatatgtcaatgaccatatcacctataggatgaatatcatgttcatcgaaggacttatgaatactgtattaggattatgggcaaggaaaatgctctggtactatgtagcatatatgactataagaattttatagctaattataaatctagttcataagaaaaaacaatatatgtaccgatagatattggtaatttggtacatagccatattataatacatatatgcattatgatttatccatttaatacccagataaataaaaagcacaataaatataggcatttactttttttatcatacataaataaaaaaaccgtgttcatttctttatgtaacactttcttccaatttgtttcatattttaggttacctttttcattttaaaaattctcctataatctaaataaaacttttagtaaatttcacaaaactacatgtacttttagaggtgaaaacggagtggattcagacgtatagtggtcataccatatcctaaaccatattttttaagcggattcagagcgggtgcagatagtgtacggatgcggagcggattgtttcggatgtcggaaatgatacggattcggttcggaaacggattaaatttatcggatgttgcgtgtgtaatacaacatcgagttagcaatgcaaagaacaataatacaataatcaataaacgatccatcgtaataattatgtgcttaagtgttaaacagcatgaatatatgatgttcataatataaaattacagctacgcaagtgtgacatgaaacggtgaaagtctcagactaagaaatctaggttaattgatgggttaggctattagatggaccaacttatgttatatgctatagataaagtggtcgcttgcgttgataattttggattatccggcaaacggtctattggataatccgatgaaaatatcggataattagtatccgccggattttagagataccatatcctcatccgcatccacatccatatccgctggatatctaaaagaccataccatatcctcgtttcaaacggattcggagcggatcggatcggatattatccgatccgttttcacccctaggtactttggtcaaattaccacaaaactataaatttaacatgatatattacaaatttacatatttaacgctaaatttgtcatagaactgtagacttaagatagaatatcgtaaaactacagatttaataacaaaattatcacaaaactatatgctgaatatcaatttaatcacaaaaattggacatttataactcaaaaataaaattaatgctacggatttaaaccccaaaatctgtagttttatgataattttattgttaaatatatagttttgtaatacttagacttaaacctgtagttttgtgataaatttattattaaatctgtagtatgataatttgaacaaagtgcctgtagctttgtggaatttactctacggatttaggttacctagttcttttacaacacatgtttcttcctccatgcaccctggtgttggccggcatgcatctttgatgttgatgggtggtggatacctttaatctcctttcattttaggtcctgtttggttcgcgggacaaaaagtttttggcgtgtcacatcggatatacgggcacacatttaaagtattaaacataaactaataataaaaaaaattacaggttccgcctgtaaagtgcgagatgaatttattaagcctaattaatttgtcattatcaaatgtttactgtatcaccacattgtcaaattatggagcaattaaacttaaaaattcctctcgcaatttacacgtaatcggtgtaattagtttttttttctatatgtaatactctatgtatgtgtccaaatattctatatgatagggtgaaaagtttttgtttactccctctgtcccataatgttgcaacctaggatgggtacgaatctggacatgcctcatgtccagattcgtagtcctaggatgaggcatgtccaaattcgtagttttaggatgggtctcatcctatcctaggttacaatattatgggacggatggagtagaaactaaacaaggccctagtggccagccactcaggtgccggtgcctagcaagcattgactacatacatagggttgggaaggaggtcgccatgtatgtcattaacacccaaaatcctaataataaagggtcactatttgctaattaatctgagaaaaggtgtggatgtcatcatgcgttgttttatgtatgtagttaatgaccgactttaaagtaccctttagaccgggttatgtttggttccgatatatttattagattgcaaaatgacaaaacaaagtcaaatcaaagagcggagctatagtgcaagaggggatgcctacaactcggtaaaattttttaactataatttacctgtttttcattatatacgtatccttctaatacaaacttagtcattcatatcagcttaaacttatccaaagcagagtaaagtttgcgggtgacaccccctcaatattttttttaaactacccctcaatttcatatacaacaaaaaagattacaaccctaccattacaagaaaaaaaccaaataaacatatgttaaaatagaataatgatgctgcacctcataaaacactgaagatatgtgagctgtagagtgcagccacagcgctggcagctctggtatgtaagaaaaaaaatacattaataaatatcggtcaccatttttatttcttcttacagaacagccgaccgatgtcgtcaaacatgtcaaacaagtcgacgacctgaatccgcactgccaattgaattatcaacaaactagaaattaaacaatcttaattgattgatgagtgatgacattgtgaacgggataaccttaaaaagaacgaggaagaccctgtttctttcagcttgggattattataatccagattattgggagtaagctgaaagaaacagacaacttattgaagtagcttattataatctgataagctcatttaggtgagctttttccagattattgggtgaaaaattacccagcatgccaccccactccctctttagactggcaaacccaataatttaggctctaataatctatgaaagaaacaactaaccacttattctactacagattataacaatctagattagagtaatctgactcaataatctagattataataatcccaagctgaaagaagaaacagggcctaaaagactctaaacataactctataaacttcataaaagataaatcctagactactaatactcaatagatttttttcctacaaaaactttattggaaaatctacaaacttagtagaacttaggctgagttctttcttcactttcccaactcacgcctctcgttttctgcatgcacgttttttaaactactaaatgatacgattttttgcaaatttttctagacggaagttgtttttaaaaattatattaatttatttttaaaattattttagctaatacttaattaatttacattaataaaccatcagtttttccttgtgagactaaactctaccttctgaacagagcccaagatggattgagagatggcatgcttccctcttgcctctagcaagaacgcccaaggcagaggatgggataaacggatcgaaatggtgacaaaaagtttcgagacgagttgcgaccttggtaatttcgtaagaatcgtatatagacgagaattttttttaaaaaaaaaatctcattttccattgctctaatcgaaattcgataatcacgtctatagtggtcctactgtgcgaaaattaatcatagagatgcaaccagtcattaaccaagataaattgcaaatgatacggattcatcaatatgtgatgtgcaacacacaccacccacctccaggtaggcccggcccccacgagcctgatgctactgattattaagaatagagttgacaagatccttatctgtttggatatatgccctaaccttcgaagcaagaacataatctattccacgtagcaaatcatttttattccagggacaatgatgatatctctttcttttcactatttctgatctacactagaagattaaatacgaacagttttgatttgatttggacggcccctatttaatttggctctggaactgtgttaaatagtaccgtagtatgaaaaatatacgggatcttttaatgtggtcgatctgtgaggttctttgaaaaggtttttattagaaagagaacacaaccaggacagaattttttttagaaacatagtacaaccacatacgctctccggaagactaggtcggtatatcttgaaattgatggagtcactgcggatgcctctcgctagatatcgactagtatgtcacctagcattgaaagaataattagtagtaaatataagcaccagtcaaatctataatttgaatctgggtgggctggttctaccgcgagcaagctaaccagttgagctacgcgcatttcgcagctgaaacggaaaattatggagcaaattttattatcggtgctaattaatgacaagactgatcgtatgtgctgatgtaagactaaaaacacattaattaaaataatcaagatgggaaagcctgtatgtatggatgctcttaatttggtttgatgtcttggtagctggttgctggtagatttgagttgatagagtgccaggaaaattcgatcgatctggaggttgtcatctcaagatcaatgataagttggtttgaatatcctttgcacagtgacactctaaaagtgacctttttgccaataattgctgggcaaagacaagataactagtattccctccatactcataaaggtttaggataatatttaagtcaaaccttaagaatataaattatgaataactctcaaattattaagtttgaaaatataaaaattatatgaatagatttatcttgaaaaatactttcataaaaatatacatatatcacttttcaataaatatttttatagaaacaagaagtcaaatttgtgttttggagatcgtgtcgctgtcttaaacgacttcctttatgagtacggaaagagtactcataacagggctcatattgaggttttgtactgatacctcctgttgataacctagagagatcgtgtatgcatgtttctgatattgtaatttaggcaatcttcactctttttaaaaaataacagccttgctaagaagagtgacaaccataatttagataatcttcaaccaaaagatataatttttacaattttttactagcttgatcatgaatatgaccaattaagttttctttagttacactactgcctacatttttttgtcgaccataactcttaggctctgttcgtttcctggagttcccaactcccccatctcattttccgcgcgcacgcttttcaaactgctaaacggtgtgttttttgcaaaaagtttatatacgaaaattgcttaaaaaaattatattgatccatttttgaaaaaaaaattagcaaataattaattaatcacgtgctaatggactgcttcgttttccgtaccggagggatgggttcccaactcaaccaaaagaacagaaccttaggctgcatttgttcctttttgttggcaactaatctctcgcgcaagtaaaacagaatgactcattagcacatgattaattaagtattagctaatattttaaattaatagattaatatgattttttaaaacaacttttatattatttttttcaaatacaggagtataatttagcggtttgaaaaacatacgcgcgaaaaacgagggatgtgaattgggattcaacttaagaacacaacctagtacctatcagtgccttccttcaaagactttagtacttcttttcgagtttcaatacaaccttttgtgatatccaggaattttagataatggaaatgtatattacgataccgagacatgtatatatatacctctcgatacctcctagccaataggacaatagagtatttctctattgcatcctctcaataaggaccgtaattactctcttgcaagtttagtatcactatcttttgttttgattcatctagatctgaattataaataggtccttggaaagttacaactcaccttagtgaagttacagctcaccttcaccagtctcccggagcaagaagttattaattattattgcaattgacatggtccatgtgtaagagagtacctaaccattaatctctcaaagcctatgcattaacaaattcctcgatctacatattactaacaaattaatcgcacatcacatcatccactctgcatataattgaccccttttacggaacactgcatactggtgatattttttgccacttttgaaagttttttgttgttgataattaattattgagttaatccaaaagctcaaattgattgatggccaggcaatccaagtgtactggagtacatcagtaatgactttcccctagagtcaataatctcagccgtccaaatgaacaatcgaattgcttgaaaatgtgcagtacacaaggcaagctgtaatcactttttttttccttaaaaagtttttgtgatgtaatggagtacctccccatgtgctaatcgccatggtttaagcaccgggttttacgctaattgaggtggtgcgccccaattagttgtcataatcattatcataatcactaaattaacctctgcgagttgtgtgaaacgcaaagacaagaggaggaatacactacatatctgagtcggaataaactatatgtgatcagtgggggtgtacactctggaagcactactagtgtatagtatacatatatagttttatgtaatgtttggatatgtagctagctagcaaagcaacaagttatcatcaatccacttacatctgacaccccccccccccctaaccaacatgccacttctattcttttcttctcttgtctcactatgattctgaatgttttcttcttcttttgtctcattgtgtttctgaatgtgttctcaatttctcacagtgtgttctgaatgatctctctgtactccgatccacccatttttcagtgcttggtggatttatgatttttatgatcctcggaaaataatgcactataatgttaaattatggtatcgctcagtatctcaacaccaaaaaaatatcaagagaagaggatgggtttaaagaaaaatatggtaacatctacatgtctcggtatttggaacgggtggtaagaggatgttttaacatgggagcagtctaatctacggattgatgattcttagtatttcttggacattttttttattataaaaactagcgtgtgttaggaaacgataggcgaacaaacgataaagaacaatagatcaatcacagaagacacgagatttaacgtggaaaaccctcccaaaacaggagagaaaaacaccacgggcgccagccagcaaaatatcttcactatatctgaggtgaggttacatcgccgcacggtggattacaagaggtatatatatggtggaatcctaaaaaggatgacgatatcaatcacagaagacacgagatttaacgtggaaaaccctcccaaaacaggagagaaaaacaccacgggcgccagccagcaaaatatcttcactatatctgaggtgaggttacatcgccgcacggtggattacaagaggtatatatatggtgg

SEQ ID NO: 6528 - DNA, 28096 bp, Oryza sativa
ttacattgtgaaacggaggaagtaattaagtatttagtatatgaaatgtaatgtgggtcaattgtacaatcgatgtttgccatgtgtcacgcatgaaccatgagaaatgcattggttgagaacttttgatgcaaacttgaagatgcagctccatatttattatgaattcaataagactgatattcttaaaaactttatcacgtattacattgtataaaacgtgaacagaaacctatttaacaggcaaagttgatattgaaatggcattgcaaaagaaataccatatagaacgcaatcctcgtacttaaggaactgattcgataaacgacctgcattactaatttgctgattcgataaacattgataatatattttgtttgttgatatatgtttcattacttgttcaattcaaattttgcaggccagaattaatctagtatatatatgctggttgatcatggtactttacatgtcatgtttatcctcagccatcttccttttactatggcgtttgtatactatatattagccatgtgattccaactcggtgttgacctttcttaatacatactccctccatcctaaaatgtttgacgccgttgacttttttaaaaatgtttgaccattcgtcttattcaaaaaatttaagtaattattaattcttttcctatcatttgattcattgttaaatatacttttatgtatacatatagttttacacatttcacaaaagtttttaaataagacgaacggttaaacatgtttaaaaaagtcaacggtgtcaaatatttagggaaggagggagtataatatatagacatatcctctgatcatggagcttagatatgtatatctagcacttgcataaaagcaagacaaacatatgccattagcttataagtctcccccccaaaaaaaattatttacaggtcaacctgggccatccactcagttaaaatatagtggacaccaatagagcttggacaaacaaaccctctccattacattgtgtatatctttatgttgtcaaatccctgatagttttttagttgactttgtttttaattaagggtgtgtttagttcgcgaaaaaaaaatttgggtgtcacatttggacgtttgaccggatgtcggaaggggtttttggacacgaataaaaaaactaattttataactcgtctggaaaccgcgagacaaatttattaagcctaattaatccgtcattagcacatgtgagctacttagcacttatggctaatcatagattaattaggctcaaaagattcgtctcgcgatttacatgtaaactgtgtaattagtttttattttcatatatatttaatgctttatgtatgtgaatttttgggaactaaacaaggcctaaacaaggcctaaggtcatggtaacatgcaatccaagctgaagaacattgactatgactgcatatatgcaaaaagctccaccaccggctgcggtgggcggttgtgcccatttgaattcacattaacgggcggaaggtgaatcacaagcaggagcaactgcatatgtctgccagggatggcattggcatgatccattgatccgtggaaatctgtgcggcttatatagaagttgatttcaatagagagaaaatttgcccccaaaaactttcagttcgagagttgctcagttctcctctgttttttatccatttgctctgttattgctggatttgatacagtactatcttaagatgttcgatatgccgcctttgccaacaagtggtatcagacctccatccagcgacgtagagcgtgttgaagacgagctcggtgtcacagatcagggtggtggcccaacgagaacgatgccacaacagcgcgtcgttagaagatgctttgtctcattgcgtttttttttttaatgagacaactatcatttcggcccgtattccataacgagtcagctcgagctggctcgcaagctcaatgagccaagcgcaatcaaaagaagcacaacactcattaggccaacaacccacttgacggcccaggcacccaacccaattctgcaataggcaaaaaaaaaaaaagaaaaaaaagaaacactctgaagctaactccaaaaagaccagcgacaatcagttcgcatcgtggcattgtcattgtgcccccatcggctcctctgcagcttgcatggcggccctggcacctttgcactccactcatcgggagcgatggtgcattgcagagcatggctacgtaaaaccaagcaatggtgacgatggagtcaaagcaacacgtgctccacgactcatgtcgtcacgcttgttgggctcacttccccaatcgtcacccaatgcgccgctatcccccggcgtcatcatacaatgcactcctcttgttgctctcgctggccagcacactcctctcgtcgtgtccattaccgtctcattccatgcccctatccgtgtttgccaaagaggaggaagacaaggtggaagagatgaaggaacactggctcgcaagctaaaacaagctagattgaaaaggggaacgtgggcatcaccgcattgacatcggattgggatggacttaggcttcgtcgaagcggctgaatcagtgagctaatttgtttgacgtaaaacgaatgtagcatatgattaattaagtattactaataattatatattttaaaataaatttatttgattttaaaaagaagagtaaagtacacggccagtccttaaagttggagcgaggtgtcacttaggtccatgatctagataaatcgttattcaggtccatgatcttgtttaagtaaattatttaggtccaaagcacctctgattgggttgactggcttacatggctatccacggtggcagcatatttgcattttagccccccccccccccaatcttggctcccccttgtctctatctcatttctctatttccacatgctgctagctgctgaccaccacgcgtgcatgcatgagccatgcatggcggcggcgggcaagcagctcacagcaccttaccaagaatcgccgccgccattgctgcttccgttgccgagcatgctgctattccagaaccctggggtctcatggccaccgatgacgccgcctccgccaccttggttcttgccgtggtcgtactgatgatcgccgctgctgtttgcgtcgctagccgtggcgctcgccaccagcttcaggtcctcgaacgggaacaacaacctgccccaccgcgctctcttgcaacccagcgctgcacgcgccaaacaccctggagctgccgcctgcacccgccatgcgtgtcctgggagaaaccgagcgcagtctgagcttgttgctgatgctactgtggcggtggcggcatgcggaactcgccaagatggaaccccacaactgcatattccaccggcatccctagcggccccatctgaggcagaggaacgtagtagccgatgctcctcagcaactccatcgccgagaacacgcgcccacgctgcccctgccaccggcgccgttcgccgccgccaggttgcctccggggttgcacatggtgctgctcttcaagctcgggaatgccgtgaactccggtgactgcagggcatgaccatggtgatgagggaacgccaggttgaggtcctgcgcgccctcatgcatcagcttcgggttcttagccgccagccccacggggaccgagccggacaccgccgcggaggtggaggcctacgcggccgccgacgacaccatgaggacgacgagcgcttgttctcccgtgccgttgccgtcgtacgcgcctccctcctcttcatcgttgtcgtcctcgcggccgccgccacgtctccaccgccaccccaatcgacgctgcaatcgctaaccctagaaatcacacaggaggaggatttcggggagaatggttggatcggaaatggggaagccaagatgtgggggggctaaaatgcaaatatgctgcctccgtggacggccacgtaagccagtcaacccggtcagaggtgctttggacctaaatgattcacttaaacaagatcgtggacccgaatgacgattttcctagatcatgtatctaagtgaaacctcgcttcaactttaaggaccggtcgtgtgttttactctaaaaagaaatttctatatatatatattatttttcacgaaaaactcaatttagcagtttgataagcgtgttcctgataaatgaggaaatagtctagctcaatggttctttgtaactcacctttatcccattcagaaacaagctgcgtttttttcatcggatgggttaggtcgaacccatttctaaagtgtttaatttgaggatatgtgagatgggttgatctccaaaggggaatatttccctaatattcgtgttagattcacacctcaaaatctaagggtccaattcaacccacctcctctctctccctcgaaaaaatggaaccaatccattcttaatgccaaatagtaaaactatcccattaaaaaatacggatgattttaacccatttcacctgatctctaaactaaacgcacacaagtgttctctttcaaggatggatcacgtgaagctacgaagagctagagctctagccaatggatgattttaacccatttcaccttatctctaaattaaagcattgctagttctctattatttttggacgtattgacgatcgaaattggtctataacgaccatcaatagtatgcaggtgattacttgttccaattgagagaaaacactagtaagaaagcacaactccaaccaatcagaggagagtacacgaattaaagggcccacacaaggaggagaacaacctaaacttgaggacgcaccaagcggtgaccctgacagaaaacggcgcgaacaggatcggccgaaccctggctggctcccctcggcctcagcttccacgtggcgacgattactgatctcctgaagtaagtggcgtaagtcccaaggtaggaaaccaccatctaatgtcggttgtggataggtggaggtttgagaggagctggagggagaatattcccttagcatccccactctctcaagtcacttccacaccataaataggcctccactcctcactctcaaacacacaccaaggtagaaatcaatgccacattccaaaggtgaagctctctgcaagcgcacagataccgttgtagctttcacccaagagtattccagggtgtcatatccgcagggaacgtgtgtgaactagttttctaactaaattacccaaggacacaacataaatggtaggtgaagatatgagaggaattccaatggcttacttatcttagtttaagttaaagtaaaattctatcaattgcttcgggcaccggcttacccctgatctgccaaggagactctggccttatgatgtacccgaacgtggaggattacgaaggatggacatggctatcaccaccagtcatctacctctacaacccgtggggcacacaaaaaacaatggtaatctctagcctagacaccacatctatgctattaattactaccttaatctcagtacaaagttaagattaatgtactctaccgaagcagcgcaatgaacccacaacgatgagaatatatcttacttaaataagaagagtgaataccataatgaatacttacttatactagaaaaaatgtccgtgcgttgcaacgggtaagatgtttttgaatccattctttggcccaacctgcaggtggagccgtgggtctccatcttctacctccacgagatggtgccatgcacatatgatgtttgagctgattctccccatcaaatctggccgaatgtttttcgatctcctaaaattggtttagggcttttgatctactcgatcttctctttccattttttccaaaattggagcgaacaaaactcgggatcaaaacggttgaggaagcttactggccggccatcatcgacgacactggccggccatcatcgacgacagttaaatggagattaaatccgcccaagccgaattgtaggggaaaatcatgggaaaaatgatgagggatgagtggagaatcgatttttgtaatcaattagaggaggaaacgcatggggaggcagattgacatggcgacggagctagggttcggcctagcgaaggaaaaacacggattggtgacagccaacgtgattaatttatgtaggactaacaatgcacttcttcttgttgctgggtgtaacaattttgttcagttttaatatttctaattaatgtaatttaaattagctggacttataaattttttacccattagttgaaagggtaagttaacctgaggtaaccaaactctaatatatgcaaccaaccaaacaagattttccctcatgtgcattcatccaaccactataccattgcatccaagatcaactgatctaaccagccaaacaacatcaattgtacacacttatccatgacacggtaagccaggatgatccatacgggctatgctagactagtgcagataaacaaacacatcttagtggttcattccttgtgtatacataaaggtatatagtttaaggaaacatagtagccaagggaacctattaagctgctaactaacggaagaaaaatctgctaactaagggaagaaaatcttttatagttaaagaaaaaaaatactgctagcttaccacctaaccctctagactaactcacaaactatagtaaggattatactaacaaattattcttttgtggaaaataatatatatttttttatgtagctagctagctagaagttctccttgaatattttgtcaatgcaatctaaagacgcatatggtcatgatcttcaatcacttttaagacctacatttaatatcttgtattgaagatgtcacttctcgcgttgtagattagcatctaactgaagacatagattctcaatattgaataaggtataggatatttccaactagaatcaagtatctgagatcaccttcaggtatgtgccacttagcatggtaatctccaccacaaacacattagttatatcaatattaacatatatacctaaaagagtgaattaattttaagaccaaggacaatcatatgcagtgattctacatatactgagtggataatataaatggataaaatgttgttttttgattgtttcgaagaggtgcatcttcaatgtcatcagaaaactcgagcatccacagtgacaaaaggatgtaatgctgcctagcttattatcctcaactattgtcatcgacgaactcgatgttaatgatgcaagactcgtgagcatatctctattttatagcccacagatttttaaaatcaataaaaagcataaagtatgataggttgatatattagaaactaaattgcatgttagttctaacactctacgaatacacaaaataacataatcttacatacttacaaatccatcataataataacgttacatacttacaaaagaaaagaaaacagcagcggaattaacggtctagcgatggcttcagctccactcccacaggcagctcaactggggtataagccaaatggtcaaactttaaggacgaatttttccgacaaaaatgatttgtgaaaatttctcctttcttccttatctagaattctttgcaaatcgtttcattgtctactctcctctctctttcaacttgagtagttctaaaactagtggtggaaacttgaagatattgatgtggacaatttatggaggtcagtcaagtggatcgaggaagaaccgaagtgccaagtggtcaagatagagtgaagtttggaacctatcttagaacctatgccgccaaagtgtctttgaagaatagttagtagggtagaacgcttgttgtttgctttgtgtgtaggtatggttgcatttccatcattggagaagttcattgatgagtgtgtgactatactaggttgcttgcttaatcaacttgaacaatataatggtctacacacatcagatcagtgttaacctggttaaggtcttgtctttagtgtaacccctctccttctaccttttctaatctgcatcagaatggtgggatcatttccggatgaacagagcagaacgacaaccaatcacttgggaagagtttaccgaaggattcaagaagacacacgtacctgtaggagttgttgctttgaagaagcgtgagttccgggcacttaagcaaaaggatcgtaccgtggcagagtatcttcatgagttcaatcgtctggcacgttatgctccagaagatgtgtgtactgacgaggaaaggcaggagaagttcttggaaggcctgaaggatgaactgtcagttatgttgatctcccatgactatgttgattttcagcagctggttgacaaagcaattcgacttgaagacaagaataacaggatggataaccgtaaaaggaaaatgattgtattccaggaggcacaggatagtagccagaggcagcgtatcaagccactccaaattggtgaatctttttctgcaggtcaagaacagtcacaacaacagtcacaacagttgggcatcagtggtgagatcaactcagagactaatgcaagcaatgaagacaatgatgagcaagctactcaatcagtgtcatttcagcaggatcagtctcaagaagataacagtaatggaagggagcatcgggtgtgtttcaattgttatgagccaggtcacttcgtaaaagagtgtccgaagccgaagcgtcaacagccacaaggccaagtcaacaacattgtcctcacaggagcaaatgcagtgccggttgcgtctcaagggatacagctcagccatcagttccaaagcagcagtagctttctttaaaaccttagaataattatcggagttatggaataagatagactgcagtttacctatgcccttttctttctagccgttccgaatctcgggacgagattctttgtaaggggggtagatttgtcacatcctgattttcgtttcaggatttataaattatttaataaattattaatagaatttatattaaatgttcattaatttacaagtgaagttaaatgtgggaaataaaatttcctaaatataaagcatggatggatttaattttttattaaattctccatgattaagtcaactctctggaatattctcggatttttcggagctcaattcctaatttttaatcttacaaagagcatttcagtaattacccacatattaaattaatcattaaatggtctaattataattttgttaagtactttgagtgtccaagtattttcaagatttttcttggaattatttgagcataggaagtattcttaacaattcaaagatcatttcagtgattaatttaattggaaaagtatttaaaatccccttctccttttcgggccgaaataggaaaagttcagcttctatcctcggcccattctcccttcctttcggctggccttatccctcctccaaagtctgctttgtgtccctttttcaatcgggccaagaagtagaagcccagcaaaaagtctagtttgcctccctgctacagtgtcatcttcaatctccagccggctggagacagagcccgagccagccgcacagtacctgtatagccgcggttttcccctccaaatctgacctttccccttgtgtttttctaaaattagttgaggggaaatattcctcttatcctcctctatctttacctccaaaaatcggagcaaatcgttgagtatcttatccgaatcaaactcgttttcgagtttatctccaaaaccgagtttttgatttcccggatcgatttcttgcgggaggagtccgatctcttcaatccaaggctataaataggaccccctagtcctcctctttcgtttgccccctctcccgtggtctcccgtgcctcgtagcgccgccgccacgtgctccaccccgccgtcgtcgccggccgagctccatccgcgtcgtgccgtcgcctccgtcgtcgccgccggtcgccgtcaccgccgtaaggtgcgccgaggtgtggagaagcccggccgctctctccccgctgtcgccggtcaccggagccccgtcgccgccgtcgaccgaagccgtgccgccgctagacctcgtcgccggccgtcgtcgttcgtcgtttggttcgagggtgagtaccgttgggttcgtctcgtcgtcctctacgtgttcatgtcctccaaagtcgcagccgaccatccaatctccggcgaggtcgccatcttggtccggccattgatgaggtcatcatgacgtcatcatcgtttttctttttcctgtttttctaatagattaaatcttcggaaattcataactaaatcatcgtaactcggttttgagtggttcaagttgctaaattcatctaaaatcatgatctacatgtttgtttactttatatgtactgtttatttggtttttattagtctttttcttcgttttgcgtgttagcttgtcgtttccgtcgttgcgaaggttcgtgagtgcgtcggaagtgatcaagaagattacttgaagaccgattattgcaaggcaagtcacacagatcctaaacacaatcctttgagcatgttgatcctatatttaaattctctatttatttcaactgtgcatttattttcgaatgtcaccgggtggtgtgaacttattcctttgttatggccaatttgcattgattactttattccttgataccttgggttattataacttgactagttgggctttatatattggttcagctagatattagttatgattgcttagccatgcttagaaacattagcacactattgggataacttatgactcactattatttaaggatggcttaatgatagttcacgatggtcaatcgtgattggttaattaattacttgccaactaaaacttgataatggtgggttgtgagcacatggttttgagagtcgtgctcatgacaattaaggaccggttcgcgagctactgttgtgaaacatttatcgtgccaaccacaagccagcgtgggcaacggctttatcttttgtatagcgtgattcattatagtgcgccagactgagaagtggcgagaagtccacgggggtcgctggggagtccatgccttgtttataagggggtgattatgatccaggaaaggtgcgctgtaatggattatgttgtgcaaggggtattgtcacaactcctttccgaggtaccgtggtggtattgaggcacatggtgacatgatgtggggttgtgtcttgtgggtacagtggtacacctctggccagagtaaaactattcgaatagccgtgcccgcggttatgggcgggttgagcaatgtttttcgtgattagtctcacacctttcacaataattatggatgttataactggtaataatttgcttagctcctggtttggagttagatctgtacagccgggtatggttgttcaggatggttgggcctgtgcagcatgggtgtgctgttcagtgttgattaaaatttttaattaattactctactgttttactactcttaactctttgctaaatgctgctttcgcaaatgagcctatattatgccatcctttggtatccttgtgcacttgcatatttgctgtgtggcttgttgagtatgtcatatgcttattcttgcaataatcaatcaacctcagttgaagaaaaaggatccagaaggagaagacgtttggcttataccccagttgagctgcctgtgggagtggagctgaagccatcgctagaccgttaattccgctgctgttttcttttcttttgtaagtatgtaacgttattattatgatggatttgtatattaaattgtcagtttgtgtacctcggctgattcctggacgaggattttatgcacaaataagttcggaaattactagtgaatttccgggcgtgacacgccgtcacagaagatcctaggcgctatccttcgtccatgttgtgctgcccaaccaggaacagccacgcgtcccgcgccgtctcctagcctcagaacttatctgcatcctcctactttgcaccaatagccaattgacatgttgttgcctcgatcccttgcgtcgtatggctccagcatgagtgcgtccacaggcgaggcgagacgcctctcccgcacccccactttgtcgtgcgcccatcaatctgaggcactgctgacggtcgttatagacaaattttgactgtcaatatacccagaataaaggagaattaggaatgcttgcatgcatatttgtttaagaataatctatttccgacaatttccgatcgccacaaccatcattggcagcctatttaaggacctcactctctccattccaaagtgcaccaagaaggatcaaatccaagaagctctctagtttatttacattgttctagtgctagtggagtaggatagaatagtttctttagttcttcaagtcttcaggagattttgggtatgtctctagtagcttttccttctattttaagacactcattaatgaaatattcttctttatatagttttggtcttatacttcactcatattattattcagctgccgactttaattagttcatatttatcttgtaataattatgtagctagcttactggaaatatgcaatggtgttggtttaatgttcatttatatgattgctctgtgtcatttgcaaagatgtagagtagtatttagtaatgtaagtgctgtgcttttattattagataccattaaatggtgttatatgccacgggtctatagaggtaggccactgatgggagactaggactttcccaaaaagaaaaacaatgcaatgccgtttcaggaaaagaacggaaacggtcccgcgaactgacatggatacggttcgtcatgcaaaacaaaatcgcggactgagaggggagtgaattgggcacaattcatgaccaaagcaaaggaagaaaactattagcttgacacttttaccttagcaacattgcctccggtgatctgatatttaatctccggtgacctaagtcatgttagtgattttcggagcaaagagaactcgaaaaaaaaattatccctgacaattccaattattaaatgtattattagctggggttttctcctggttaaccaaagcaaattctcgaggccatttatttgtgatttggaacctaaggaaagggaaaactccgggcgtgacaatagtttagcaatatgtcctctttagattaatattgtggccaaggaaaatatagaggtgttttaacaaatgttagtgtttcttgaatatctacgcttgctatctacattttacttccactaaggcaactatggatgatttttgttttggaattatatgtgatgaccatttcgtgcaagtgaaatagatttaaacttcgtgttttgcagagcacatgaacttctactgcacacatggaaggagctagttgtatacacctcattggtgatgatgtaaatgctattttcaattgatggccatgacgggtatatttgaagtattgttggtgaagacatcgagtcctttttatacgattactgtagctaacgtgggaaacgtgtattgcacgtacacaaattactagtatttgttaagctggcaatatgtatgtatatgataaggcaaactaatactggttggtaggtttcatcgcatgctcactttgcaaaagtccgtaactttacgggcccctttgattcaaaggattggcaaaaggtttcataggattcaaattcctatgaaatgtttcttacaagaccctttaattcataggaaaaaaagaaggaaactataaatgtattcatatgcttcactttcatagaaaaatagcaagaagtatgacctatttgtaaatttcttttctttttgtatggaactatcaaagaggccatgtcctattttttggttatttatagtcccataggattaacggaattgctattcgtcttgcgacagatttgtggctcctgctgatctttcgttttttgcgaaaccgcttcacaatatgtgcattgcatatatgttatggtgatatactgatatatagctcccgccttctcgttcaagcaaccattcagaaatttcggatagctttagtatatgtcttttatatgtcagatgccagcattttgcaaagcaaaaatgcctcatacgccaaatgagatttcgtcatcggatgaatctggggttgactactgcaattctaattccgaccgtgaaccgtgcaactacactgtaagtggtctgtaactaccctttaaatgatactccctccattccataatataaggcacaaccactttttttagatgttccataatataaggcatacatgcatgcatgccattaactatgacatattctccattaaattactactttttaaaatccttcactctcacatactctaactctattggatgcatgtattatatttattaggatgattcaaactacaatatgataataattatttcttggttttgggttaagggtggttgtgccttatattttagaatggagggagtatgtaactacgtagaaaagtggtatgtaactattatgtaattggtatgtaactacactataagtgctccgcaaactataagtgctccgcaactatcctatggctgcgttcgtttgtgccggttaggggtctatccctctggcacggaaaacagaatagcttattgtcgcataattaattatgtattagctaaaactaactttaaaaatggattatgattttttaagcaattttcctatagaatttttttacaaaaaacacataccgtttagtagtgtaaaaagtgtgcgcgaaaaacgagggagtgaggttggacagcctataactagtattaactacattgtaagttatctgtaactattatataattggtctgtaactatagtgtaaaagcaatgtgaactgtaactacggtgacctgtgcatggttctgtttttttcttttttttatggtcgagcaagttgctatctgtgtgttatatgggaggataagttgctgtctaagtaagttgcatcttcttcgcgaaaaaaaaaagaaataaatgaaagtaaattatgcctcacataaaaatattttatataaaatatggaaatttttagaacaaaacatgactccatggcccaatggataaggcgctggtctacggaaccagagattctgggttcgatccccagtggagtcgtatcatttttttttattttttcctaacaaagtagaattcggctttgtgccaagttggccatgtatgttttgatattgctatacacaggatttttttttcttcaaggtggtatttgtgtattcagaaattcttgtcgttgttcagcaacttgacaaaaagtttgtacggtctaatctattttactttctttttagaggagaataatcaataaaaaatacgccaaataattaagaagagtgaggcctcgaacccagatcatctagctcatcaccttatgaagctagccagaagatacgtgggcgtttctcgaataatcaatcaattatctcccatcccaaccaagacctgactagcctcttttaagatcaaacaaaacactccccgcaaaaaaaaaaaacaaaacacgtcaaacacactacaacgctacaatggcaaatttacttgcaaattacatagaaatgctacacccagccccattcaaagctaggcatactcttgaatcattaatacaaaccgaggaactgaaattcatcgatcagtcgaaatcatccccctcttctccatatggagttatggacaatacaatacccattcaagggagtccaaatgttcttataatccgcaacgtaatctttagtgctatggtataaaagcgcataattaaccatggaaaatgccaaactcatcgttatcaagtaagatggggcagcacacgcgcacgccacgctcgtcctggattccggcatcgacctccgcgaagatctcagcgatcgactagcgtggtcggggagaggacacggaagttgtagtggtgataggttgatccaaactcgtcggtgcttatccttatatatatctctgtcgaatccgaagtctaagttaccatgggcacttctaaattgctagaaaattagagtcatatgaaaacaaaaggaataaaaatcttcgagagcatgcacttctggaagattccattttgcatattccaaatactcttttctcttttgcactatttcatttgcaacactttaacaataacaataaattcccatcaagttcctaactaaagtcaacaaaagaatatcaaaacgaaaaaaataagtagcccttctatttccttttgaattgcttgagaatatgtctagaaatttactgataacttggaatgatcacatctaataaatcacatacacatagcgagaacttttatccacttctccatgtttgagagaatgcaagaaacaaaatgagtccaatactgaatatatttgaaaagaaattagattatctaccttctatgcaccacttataaatctatagaaaattatactagttctttcatatgaaaaatttagaatatgtttcatatcaaaatattatgaattctgattcttagggttaataagaaaatatcgatatgtcataggttaaataaaaaactaactggccttcaccaattattttatattatgcaaaattgttgtattctaaaggagaatatgaattgcgaaagaatgctagtaggtccaataggaataggtaaggtgccgccaatcgatccaatcctgaggttagactcatgagagctagccaagggaattttgtggtttttcagttaaagaaatatattattacatgttaatttagaaattaataacccatcaagtggtccttctaagtatcggtagaaattcaatgggatataactaactccatgaaaaaatttcttaacttttgtgtatgttaaacatgacataaacaatatacattgactaattacaaaattacttaacaaacatcttataaaataagaaatataataagaaagtacagaaggtatgatatttatactttgaaagaaaaaaataaatataactttttaagaacaaaaaatgacacataagtatgagctatttgctgaaattaaacaaaacatatattattttagattttttataaggatgacaataatctatctatctattatatactaaaagttcagtaagcttccttaaaacactctcaagatgccacgtggcttcctaaaaaatgctctcaagttgtcatgtggtgccaataaaatctatcccttgatttttacttaattctatgggtccaatactataaactactaggtgattccctacgctttgttgcagaaattagtaacttctattttttaaaaaatcaagctaaaagtaaaaaaaaaattagttattaacaacaaataaaactgatttgtcaaactattttaagagaaataaatttagtagactttgtatgaaattatagatgaaatatgatgtcctgtactttgattatatggattatatggatgaatatatgttaagtattataaaaatgattgatatatatgttaaaaaatattgtgaaaaagaatgtgaaggaagatgattggatattgatgtgtagaactcaatgaattatagatgttattgcatgcttgtataagtttatatgtaattattgctagtggataatgagatggcatgtttgtatgttgagctttagaattagtgggttataactttatagtaagataggattagatttgattaaatctaaaacaaaccagagatacaacgtcaaagtttgtctttgttcaatcgtatacgtccatagcagcacaacggttggattaccactactacatgatatattttcctagacgccaccccttttgtttccatgtggtccataagtagaaccacacgggaaaatagggggaccgacgccgggttgtcccccgcacgagaaaatacatttttccatgcgggcatcttaatccgaccgaataggatcactacgccagattctcacacctgtggcggcatatctgtgacggacataagtgctggtcagtgatgagggtcacctttgacgggtcctacaacatgtcatcatcggtgagccatccggcggcgacccatcacaggtaactagtcacctgtgacagtccaaaaatggaacccgtcaaaggtgagttaaagtcacctgtgacgggccaaaaatatttagcccgtcacagctaactagtcacctatgacggtctaaaaatagaacccgtcaaaggtaaggtaatgtcacctgtgacgggtcaaattttgtgtgcccatcaaagatgataaaaaaatcgctctcataaccctcccctcttcccgtgcaactgtatcgatcgatccttatcctctcccaaacacagatagccacacagggatccttatccttatcctcttctctttcaatcactccccccctctctctctctctccctcccaaccctttctctcttcatcggcggagggcactggcgccggcgggtgcgcgggccgtagggggaggcggcaccggcaggtgcgaaggccgaaggcggaggtggcccgggcgggtgctggggccggatgtggaggcggcaccggcgtcggcgccagttggaggccaggagctcggggttgccgcctccttcgccggagataaggtcggcctctctctgtccctttctccaattctctcgacttctcctctctctctctctctctctccttctctctctttgtgcagcggcggccccatcgagccaaagatgaagacaacgccactgcccaacgccatcgacaagccccgccatccatcgctgcttatctccagtcgacgacgagcttctgcatccccacctggcctccccttgacagccccagcaaccatgaacccgggggctctagatccggacaccctgaactcgaaggtcgcggatccagccatcccgagtttgggtgctccagatccgtccgcgaggaaagcagtccgccgtccacaccactccgcgtcgtcgaggtcaacctgccgaggggagagcaggcgtcggctatccccttccaccccatcgtcggtagtcactgcctcctcatctattttacttagtttagtactaagcagaagtcaccctttccttctcttgcgtccagatctgagcttgcagtcaaccgattctagcatctcctgtggctcctgtggctaaatccttgtccaaggatgcatctagctttaaccccaggcaaaaatcacgagctactggatcattaattagatgatctttgtgtactagtattttgtttggatagtgggcatgctgtttcgctttgttttcttgttctatttaagttgatgcatcactagatatgtttttattttccttattagacctcttaccagaagtttttttgggtgtgttcttggatactctacaaattccccaatttctatgctagctgaacaaattagacgctagttctttctacaaatggtaagcttcctctgctagttgatgtatttccgtttctttcacataatatttaactactgacatgcatatggatgactatcaaggatgggtgaaaggctaatgaatactaatctgaggtaaacttctctgaatgatgtcattgcaggcactgggggctgtactcatgatctaattgtaagtttgtatgttataccatattcgtcaggctcagaaaccaaaagaaggaaatgctatgttcaagtttgtgtcacttaggctgtatttctcatttttcagtatgttggcattgaagtatgattctttgtatttttgataaccctgtgtgcatattaatgagcacggcatgaagtatgttctcttcttttctggatttatttgtggtgctttgaagtatcggcttggctcaattcgagaacttgcaatgcatgtgtgtgaatgtctatggattttcggtgacaacatggaatgcatgtgatgttagtttgaaacttttaatgcaatgggctgaaactggagacatatatattgcatgtgtatgttctgtttttaattccagagggcatgtctagcaaatcctagggctaaccaacatttagaaattatttttttctagatgtaagctcatcactgacggttcatatcgcaaaagcctgtcacaggtgaccataccagtgacggctttgcacatacatgccgtcacaagtgacacacctgtgacggtttttactctttgagccgtcacaagtgagtcatctgtgacgggttgcaaaatggcatgggttagtgcagacacttatctctgacggaccgtagagttctagcccgtcagaggtgactgtcatcagtgacggtcttccacccatcaaaggtgactgtactcaccagtgaccactgatcactgaccaagcccaaagccgtcagaggtgagggtttgggcccgtcacaggtgaccttgtccagtgtagtggataatcctcattatcccgtgcggtcgacttaagaggaccgcacggaaaaatcaattttcgcgtgcgggcatattaagtggaccgcacgcgaaaatacatctccctctcactcactttaaaattttcacacctctccctcttactcacttcaaaattttcacacatctccctctaactcatttcaattttttcacacctcctctcccttcctttttgttttcactcccctctctctcactttcctcctctctatctgtctcactttcactcctctctctctctatctctctctctctctttctcactttctcttctcctatcctctcctctccgcaggaggcgcgcggccggctggcgacgaggcgagcggcaaagcggcaactgggcaggcggggtgaggcggcgaccgggcgtggcggcggcgaggagtggctgtccccctcctagatccggcggcggcagttgacccccgcccggatctggcggtggtggcggccggcgcgactgtaggccaagtcggcggcggtgtccacgatgttgctcatgcccggagttgatgtcgcaccggacgtgagggaggaggaggaggaggtggtggtggcagcggttgcggctgcggctatcggctggagcgggactgcgcggctgcggagcgcatggggcaggaccagctgtaggacgtcgatgacgtcgtgcaccacggcggcggtgaccttgccgccgacctgccggtggcgaggaaagactcgccgcagcggctggttgcgtgcgggccggcgggcgggcggcgattttcgctttttttttatatttttggttttttttttgttccgtatgggcggtataatttgaccgcacgggataatcgattatcccgtgcggtccacttaacccgaccgcatgggaaaatgattatcccgtgtggttgtgacgtccacacgcgaaaatattgatttttccatacgcttgggtgcagacgggcaaatcctccacatgggaaaattattttgaccgcacggaaaaatgtttttttcctagtagtgtacgttgttcacaaaatcacctagagttcctctttttctctaccagtaaatctatttccttgtcaccatagctgacatggctggttgcattgttgtggaaatctcatctctactcatattcacgagactcaaacaccagcattagcacctaggttgtatgtggttttcaaattgattaatctttggttggaaggagaccagcttggttagcttcgctgaccttaaatatatattatcttctctcccccgtgagcagttgctcttttgatttacgagaaaatcgcttctgtacctctaaaatttattttagttaatcttttctatgcccctaaatttaatttgcttactttttgtataacccaaaatttaattttaatcccttccataaataccccttccgtcagttgaccgttagtgaccgtctaatttctataaagatgatcattttacactttggatgaacatagaaattcatgaattacattattcaaaatgtaaaagtttgtcgcataagactattatagttatgagtgagtattcagggttataaaagggattgagtgagttttcaggggtatatagggtgtttactcttgattcatatcgcaagatctcctggagtgtccaagggcgagactatgtgtgaaggtgaggtaacaggagaaataagatgaaacaaatgaaaagctaataacaactgcagaagcaagcaagcagggaaagtaaaccatggccaaatacaaaggggctcacgttggagaataaaggtaggagtatagcagttatgagtttcttcacatagtatttgtgatatataagctacactaaggtagcagtgtgtagttggtttaaaagttatatttgttgattttaaattcaaattttaggactcatcttgactaggtattttaaagaaacaatctctaggatttatatatctattgtctttatttactcatatgtaatagacatcattaaccaactagaaggagaagtagcttaatggtacaaataaaaaatatttattatcaataataatattttatcaacttaaaatggaaaaaaaaaccttattttgaatttagagttagacatgtcttttaaaaaaaactaagttaaccctctttgtacataatgaaaaagattacaaataatttcttataggaatgaattcaatattatatagtttgaagttaaaaaatggcttgaaaaaaatttaccaagcaacgttgacgaagaaaatttgtggagtagtagttttgaagcttagcaagtgttatccgtttcatattcattccttattagtttctcaaacacaacttacaatacatatccatgcaaatacacgggctacttcctagtctttataaaactcataatataataactctgaataatgcagtcacgctaaggctgtgttcgctaggggagaattggaacatgcacagtgtacacggaaaacggagtagtccattagcgtgtgattaattaagtattagctattttttcaaaaatggatcaatatgattttttaaacaactttcgtatagaaactttttgcaaaaaacgcaccgtttagccgtttgaaaagcgtgcgcgtgaaaaacaagaggggagtgctgggaacttgctcttgcaaacacagcctaagagcaaggctaataatacagccagctgcttactgtatagatctttatagactatctctcagctcactcatatagtggttagctcttcattatataaatatatggtccacatgtctgtctcacatattttcttgattcttgtgcctaagccggctgtaaacttacagcccgcttctcatctctctcctctcctctctgatccacctcagcattcagccttcttatagccctctattatacttgttctacaggtgtgttctctgcagggtgttccctaccggaacagtgcgcacgaaaaacggaacgatctattagtgcgtgattaattaagtattagttgattttttttcaaaaatggatcaatatgattttgttaagcaactttcatatagaaacttttttcaaaaaacacaccattagcagtttgaaaagcgtgcgcatggaaaacgagagagatgggttgggaaacttggggtaagaacacacgagaatcctaattctcgcgcgcgcactcccggcccacacgccccacgcggcgcgcgcgcgattttttttcgctaacctaccgccattttcttttttttcgttttcttttttccgtgatttttttcgctttcctttttttttgcgtttttttcctgattactttttaatcttccagcagcaagtgttttcaatttttttgttgaaagtttttaaatctcgagttgaaaatatttaaatctcgagttgaaagttttcaatcccgagatgaaagttttcaaatccaagttgaaagttttcaaaatctcgagttgctctcaagttgaaagttttcaaatccaagttgaaagttttaaaatcccagttgaaacttttcaaaatcttgagttgaatgtttccaaatctcgagttgaaagttttcaaatcttgagttgaaagctttcaaacactagttgaaagtttttcaaatttgagatgagaagttgaaagtttttaaattttgacttcaaaaattcaaatttcgagtttgtcggtgatatgggaccgggagtatcgtgaccagaggcttgaggcagacacaatcgcccacgtggcctggcaccttcggggacgtcgggcccgagggtgaggtgtccgccctcctcctgatttccccgagggggggtcgggtgactcctgccccggccccgagggccgaggcgccccgaccccttgtggagttagcgccacatgaatgggttgggtgaacacggtaagcctcacctaaccacatttattgcggtctggtcgaacgtgtcacgctgcatgcagcgtagtgcagcacgttcctttatccggtctgtgaccagtcacagaccggtcagatcacgggttaggtggcgactggcggtctgacgcacgccttgccccatcccgtcaagacgaaagcctctaggcactcgtctcaagccggagctagcgtgtaatctcttagagatggcacgttagccctggttagatttataccaggcttcatcccaaccattacaggcaagatgctacatgaagaagggcaaacatacacgttgctaagctgacacgtggtggacaaggatgactgatttgtgaccggtctgacactggtcgcgtcatcaacagacagccataatcccacgtcgcacctgtttccggcggaaaggggggtagatatgggccgtcccgtcagaagggcacccggagagcaaccgtaccgatctccgtccatttatgaagagaagaacagtccagtttggagagggagaggggcatgtggtatccccttgagatataaaaggaggaccttgcccacttagataaagagaggacttttagacacaaggccttctccagatccgatcccagggcgattgggggctggttgacactttgttacttgttcatacacaaatccactaaaacacaggagtagggtattacgcttcccagcggcccgaacctgtatacatcgcccgtgtctcgtgtttcttcctagctggcgatctttccacataccgagagagcttgagatttcaccctaagcccccggccgaaccagcaaaggggggcctgtgcggtctcctggtgaggagccacgagctccgtcatctggcgcgccaggtagggggctcagcgtgtgttttctgagctctcgtactcctccgtgtgcgccaagtttttcttgttcagcctaatggccgagcaagcaaaggtgcacgacctctctccgagtgtgagcggcgacgacggggagccaaacccacgccgtcgagctcgtactcccccacctcctccacaccaaaatcctaagcagggggaggcgctcgagagggtcgaaaaatccatagcatcgccagtcgcgggtgatgcaggagaacggcgagatggggagcgtcgcctcctcgtctacggcgacggcagcacgcctcagggcgcgcttcaggctgttggcgcgctcctacgtcacccgcccatcgtccctgacccggagtctccagcccagcgatggctggacgacgtggccaacttggtcatgacggcacagcagcgcctgggtgctggtggacggtccgccaccaccaagacctccggcgccgccactaccagctccgtgtcgtcaagacggagggcgcggcgagcggcggctgttgcacgccattcggctgccactccctcgtcggcacctccgactcgggaggatcagcatggagagccggatgcccgcctcgacatcgagcgccggcgtaatagccggcgtactccccgcgcaacggagggcgcctcttcgtccagagtgtcacctcgacatggacgtgaggaccagccctccgtgcccccggctggtggtgtcggctgtagagcctttgtggcgagtcttcggaatgtccgttggcccccaaggttccggcccaccatcaccgagaagtatgatgggagtgtcaaccccaccgagtttctccaggtctatacgaccgggattgaggccgctgggggtgacgacagagtcatggcgaatttctttcccatggccctgaagggacaggcgcggggttggctaatgaacctgccacctgcgtcggtccactcttgggaggatttatgccaacagttcactatgaactttcaaggcacttatccgcgcccaggcgaagaagcggacttgcacgcggtacagcgaggggatgatgagtcacttcgctcgtacattcagcggttttgccaagtccgcaataccataccatgcatccctgcacacgcggtgatctatgcgttcagggggggtgtgcggcacaaccgcatgctcgaaaagatcgcttccaaagagccccagactaccgcggagctttttcagctcgcagaccgagtggctcgtaaggaggaagcatggacctggaacccctccggttccggagtggcagcttcggccgcccccggatccgccgctcagacagggcggcgtgacaggaggaggaagaagaggtcggtccattccggcgacgagggtcatgtcctcgccgtcgagggcgctccgcgggccacccgaaaggggaggcctgcgagcgacaaaaagaaagaggctggtactcccaccagggagcgcccagccggcaagtggtgctccgtccacaacacctccctccacgatctcgcggactgtcgcgcggtcaaaaacttggctgagcgaacgaggaagtgggaggaggacaggaggaaggaacgccgtgagggcaagtcgccggcagctccctccggtaaacggcgaagtgaggccaaacagaaggcccccgctgttgacatcgatgacggtgatgatgacctaggtttccaagaacctggggccaccattgccactgtcgatgggggagcgtgtgctcacgtctctcgccggagcctcaaggccatgaagcgagagcttctggccgcggcccctactcatgaggcgacgcgccgggcgcggtggtcggaggttgccctcactttcgaccagaccgaccacccaccgtgcgtcgcccggggagggcagattgcgatggtggtttcccccaccatctgcaacgtgaagttggggcgtgtcctcatagatgttggagcggccctcaacatcatttcccccgcggcttttgatgccatcaaggccccggggatggtgctccagccgtcccaaccgattatcggtgtgacgccggggcacacatggccgttgggtcacatcgacccaccggtcacctttggtggatcagccaacttccgcacggagcgggtgaacttcgatgtggcggacctcagtctgccctacaacgcggtcctggggaggcccgcgttggtgaagttcatggcggcggtccactacgcctacctccagatgaagatgccgggccccggtggccccatctctgtccatggcgacctgaaagtcgcgctcgcttgcatggagcagcgcgcggaccacctcgctgctgcgtccaagcccgagggtggtgacgagaggcgtggcacctccgcccccaccgccccgaggcagcggattgtcacatgcgccgaggtcccggtcaaggaggttgccctaggcgacggcccatccaagaccacacggatcggtggtcttctggatggcaaataggaagacgcgctcgtctctttcctgcgggcaaacgctgacgtcttcgcatggagaccggcggatatgcccggggtccccagggaggtgattgagcaccgtctcgccgtgcggccgggcgcaaggccggtccggcagaaagtgcggcggcaggccccggaacgtcaagccttcatccgcgaggaggtggcaagacttctggaggccggattcatccgtgaagtcatccatccggagtggctggcgaacccggtggtcgttccaaaggcgaacg

SEQ ID NO: 6529 - DNA, 28412 bp, Oryza sativa
cagtgtaattatactacgattgtactataattacatctgtcaaatttttagtagaaaatttgtcgacaaatgtataggtggtccctttaattaacgtacaaaaagtattaattaagggcactgttattatttactaatttgtgtgagaatgtccgtaaaaaaaaattgtgtgagaatggtcagtagtatggacggtctttctagtaaaccgaacaagtgaaacatatggtgctgctttttccattgggccagttcggtttttttctattgtcatggcacatcacatgccttgtcgtactagttaggaacatcccatctgcaaactcatatatttttataaatcaaatttcaagtattttccataattcatctaacaagtggtcaagtggagctgaaccaaggattcatatcttaccctgagtacttccgtggccttcttcatgccatagccgttgcatagttgatactctccttgaagtttctccccccggtttatggcaaatactgaaggatcatcatcaccccagcttgtaccctcaccatggtctgccgtcactgaaaccgtggtcttcgcctaacatttccgaaagaaatttcgaccttttatttagtgacaaaaccctatctttcacaaaaataaatactccatatgtttcaaaatatagctaacttatacttcatccgtttcatattataagactttctagcattctccacattcatatagatttattaacatctatattcaagaatatatgtaatgctagaaagtcttataatatgaaatggagggagtattaaattagtatgaatttagattgtccaaattcatgctattaagctgtttctaattcaatagtaagttgccatattttgggacggatgaagtagtagcttaaaatggatcgaataataactgataaatcagaatttccatatttagacacactacaataatcttcatctttgtaaatgttactgccggcctctgttaaaaatacttggcgtttgactttttaaatttatgaaaatttaaataataaaacattttaaatattaagttaaaatataaaaataacatgtgcagatttgtcttgaaaattatttccatgatatcataatttgttacatttataaacttattttcataaaagttatgtcaaagttgtagcttggatataaagaaaagtcaaatgcatgtcacgtagagggagtagcgcatataggaaataatatttctaacttagactgagctagctcgtacacacaaaccatggattatttggtctaccgtcctaacagcttattcgtatccatgctatatattttgctcgcaaagcttaatctaaacatttaaacctccattccatacggatatactataaaatagattgaatggaactaacttaaggtcgtagatattatataatattatcctataaacttgttaagaagtttgagttaagacaaactcaaaaataatagggagcaggtttttcgttcatgatctcataaatatttcctttttttttaccaaataaccattatatacctgcaggaatttcccatttgacgccctgatgcggatcctgctattgtcacggtcgctgcgcacgatcacgaacgtctctgacggccccggagtggccgccgtcgcgacgaccacgccattgccgtcgacgcccacgaagtgcacggcgctgtcgtcgatcgccttgaggttgaacgtgttctcgtcgaccctccacagcttgaaggtctcccatcccgatgcggccgtccggtcggcgacgacgatgtcgccgccgccatgttcggcgcagaggtacgtgttgtggaccaccgacttgaactggagctttgttccatcctgcaacacacataagagtttcaaatatcaggttcatagttaattaggttacaaatgttgattgcacggactcaagaaatattgacaaacactcgttccgttctaaaatgttccgttccaaagagcgctgccagcgaaaatagctcatcataccgccagtgaagataaacctattttcgctggcggcgctcagaaggtaccgccagcgaaaataaaaaaatcttcgcaggcagcccgtattactcggccgccaatgaaaatattttttcattggcggtcgttgcctcccacccctcgttaaaacattgctggcggttttcatattttaccgtcagagaaaatattagaccaacaccatgaaaaatcgtttttctccactagagaaagagaggggaggaagtacgaggaagtcgttgtttggaatgtcgtcgaagagggacggcaggatccagccctcggtcacgagccagccgccgaggttcaccgaccggatgggcggcaccggcggtgacgagctgctcggcgtggccatggtcggtgtactatcgatcgcagctggagacgagataaagagagaggtatggtggctatagctagctagtaggcctggaggagaagagaaggagaggcacttatatagataagctgacacccacagttagctagagggcgctgagttgccattccaattaattgtaggtttagctcgccactagacaattttccatcgtcaacttggcttaattaatcaaatatgagtgatcattctaattttgtcctttgaagataagagtgtcagaccaaattggcctgcttgctatgtacttttaacagtttactaatcctctactaggtaggcacatgcgtcgcgtttaatctatataatctaatttctccatgcatgcatgtcttgacttgacttgtaagtaagatcatgtacagaaaaaacatcattgagatgaggatatatatatatgtgaatgcatggtacatcagtacacaaatatacacatatgagatgttgctctccgagttagctacattactggcagatgcatctatctcactctgcatactcaactactagtacttagtttgtgatcgatgattatgaagcattgccgctgaattaaacgaaattccacacctccggccgccggtttctcccacagacacaccggtgacccgctggctgtgtgtggacgcacgcttttgacgacaagctcgcagatctgatctccgttcaaatgcctagttacctgtgctttagctctcacacggatgacaacgtgatctggtgtgattactaaagatacgtatacaatgctaaattcaaagtttgtctaatcatggatttttcattcgtcaagtatgaaacaactcatttgatttcctcgtaaaataacttgtctaatttttattataacattcttttattacaggtaagatgttcttgaagagtgtaagggatatgcaatctagtggttgtagtgacctaagtagcaccccaatgtcctaagttcaaatctccataggatcgagcggattttagattgggtcatttgagggctaagtttttgatttaagaaggctgcatatattccctaaggtcctgagttcaaatctccataggatcgagcggattttagattgggttatttgatagctaagttttttatttaagaaagctgcatatatcggttggatatagaggctgggtaaaaaaaatacccttcttaaaaaaaaaaggtaagatgttcctgtcgacggggaatacccgtagaccggatatagagggtattggggtccgttggtacgaggatctacgtagtacgacatcaagcaaacagaagacaaggattatactggttcaggccccttggtaggtaatagccctaatccagttggtatgggattatatgatagagaccacagattacaaagggaatagcagaactcgatgataccggcgagactgtagtcgagttggtccgactagatctcccggcgacttggctcctgtaggctccagctccgtagtctgtggtgggtgtgttggcagtcgtattcgatgccttaggtcatgcctagggggtcccttatataccgcgggtcagttgatctccaagtaggactcggagatatcggacccctcacgatatggtaatgacccagtcttgtccgagtaggactccttccgtccgtagattctgcttctatcacgtgatagatttccttaacgtatactgaaactattcgtatacgcgtgggtataccgtatcggtacccatcgtacatccaaggatagagggtataccttatccgatcgggaaattcttccggagtgcgcaagagtgaggacaaagtgcgcagaaaagacctgtgttgatctgtgagggcagtctatgacctatgagagctgctagatgtaagtgggcccggcctgggagaggcgggatgttacagtttggctgctagatgtaagcgggaccgatcgggaaattcttcccgagtgcgcatgagtgaggacaaagtgcttagaaaagacctggattgaaattcattgaaagagtatttgtttgtgcgtgatatttgtggatactaggatttaaatcttgatagggggagttacgtattcacaactctatcaataaatcacctttcctatattctttgatcttgatgcttccacaagaggagcaggataatatgtgcagtgatggtggtttagactggtgtggcaccaacgtgacacattaacatagtctttgtactacatggagtagctatgtagctatgtactacatgacattaaagttgacaaaataataaggaaaagtgagacccatgtgtcatcctctcccaccttgatccacccttaaccaatttcttcgtaaactctcccctttctcctctctcctctctcctcccttccctcttcctcagctctcaagtctcaccttctagcagtagtagagagctaggttgggaggatggcagtaaggcagagccaaagccagggaaggcattagcggctcctcccctcttctttccctcgatgggttgaggtgccaaggccatcagagacgggagggcacggaaggagaaaggcaatggcctgcagatctcggcgaggaggttggtccaaaaaggaaactagcagagcgtgtaatggcaacaaccctcaatctagcgccaccgatccgagagccttgcggtgacccatcgtgctcctcctctctttctcccacgctggtgttagggactgtggaggcaggtagctggcgatggagagatcacaggagtcaacggggaggtgtatcacctagagcatgggttggttagcgagagacaagagaatgagatggggaggcgtatccagcggaagccaacaagggtgtcatcgttcggtcgtcgggactcgtgatagatttggcacctttgagttgtattgctctcccgccttcccgcaccacggttgcttccgtgcccacaactactcccactccctcctcatctccgcatctagtgaccgcctaattagcctccttgtccttgttggacccctcccaacccgcatggctccagagagcaccacctgtcaaacactaagatcctctgtgaccccatccttttcttcaacacaaccatccctaggctccgcctggctactatcccccgggtcgggccacagctctcccactaacaaggtcgttgttgcctcggcctctggatccagctcctctttcgttagtcgtggcccctagaagctagaaaccactgggagaaaagagagagatagagagaaacagggaagagaagagaggaaagggtagaggaagagaggtcactgacatgtgggccccataatcgtaccgtattattttctcacactgtaatggcatatgtagatgccacattggatagagagagccaaaatgaatcagattcggtttctcacactacttgaggaggtaaaatgagccggttttaatagttgagagagagcctttatatttagttttacggttaagagatatgaatcagattcggcaaatagttgaaggaatcaaaatggacttcagccaaaatggaccatcgtcaggttgtgatctgaactagagcatttggcaatggaataagttaacctaacatcctccctcaattgtatgccaagtctgttgaggtccctaacaacaatattagaaatatgtaccctgaactatgtaaaaccgtctaaaaaaggtcctgagacagtataaatatctggtttcactgatgtggcatcctagttagtaaaaaataaaaaaataaaaatgtggggcccacatgtaagtgagaagaaaaatgtggggtccatgtgttagcatcatctttttccttttgctgaagtggcatcctagtaagcaaaaaaaaaattaaaacaagtacgtggagcccacatgtaagggacagcccacatgtaagtgacaagaaaaaaattgtagggtccacatctttttttcccttctcttttctcttttcttttattctcttcttttctcttctcttctcctctcctctcctctcttcagccgagcggaggtggcagttggcgacgggcggcgagcagcgtgcgagagtagcggtggcagtagccgcctctttccccctctccgccggcatgaccggcatcctcaccccactctcctactgacctcatgtccccctactccagccggcttcctctccccctttccaatcgatcgcttggtgaaggtggcatcatggagcggttgtgggccttctctgcagccgacgcggctaggcaggaatgtggagcaggaggggtagagctgcgtcaggtagcctctttcgagcttctctgtcgccgtgtcgccgtactctgcgagcttgttttgggcggcggtgtccatcgcaacgccaagtgtgcgatgccggcgcggtggtgctcggggtgtggcacgccctcgtcggcttcttcctcgcctagcacgcatgcgcgctcggtgcggtcatgcatgatctcttgtgccgtctctcgtgcatgctcctcggtcctcggatctccactgctccgcctgccaaccgttggtcgcccgtgctcgcccaccatcgcccccgctctgctccaccggccattccaccctagccctgctccgccaccacctccctgccacccagctgctgacaccgtctcctcacccgcctctagtcggtgccgcctcctcgtcagcccaagccgtcgaccgtcgtcggcttgtcgttgctgtgggccccagccgacacccccacgccacctcctcaccaccccggctgcaacagccgccgccaccatcacctcatcgagggaggagagaccacgagcatgggatagactagagagcaggggaagagataaggtggagactgaggatgacatgtggggcccactttcgtttttgccacatcagcgtctagccaacacgagtggaccgggtcaaatttgccacatatagacacttggttttgctgactaaattggatggttttatatagtttagaggtgaagatttctggtattgaggataagggatgtcaaataaactcgatgttaagttgaggcacggctggtgaacttattcctttggcaatatatggacaatgaacatttgggcttggcccacgtgaatagggaaagagagtgcaagcaacaacgggggtacagtaccatggatgtcgcgtgtactccaaagtttttgttgctttggtcgcgtatcttcagtttgtaagacgtaataagaaagctcaaacgggcagacgtgaagacatcatttggatgtactccctccgttttttaatagatgacgctgttgactttttcttatatgtttgaccattcatcttattcaaaaattttatacaaatatataagatataaatcacacttaaagtactatgagtgataaaacaactcataacaaaaataaattataattacgtaaattttttaaataagatgaatgatcaaacatgtgagaataagtcaacggcgtcatctattaaaaaaacggaggtagtataaactacgagatctacgggatttagatgcgtaaataaattatgagctatttatacatgtcggcacacattgcattactaatagacaaagaaattctactctagcccaaaatttttaaactcaaattcacactataaaaacttgataaattcaattcaattttataggaatgatctattatatagagagacaactttgtacaaatttttggctatttatatatgtggagtcattttgggttgaatcatgcattcagagctaggttctgatggtttggttcggtttgatccatttatgttttgtagcgttcctaaaaatttattggactaaatttatgcatcgatgtaaggaataagtagatcgaacctaaccattcctatggctatcctgaatggtccgtccgctatttatcacaaccatgtgcggtgtgacatgatcgatcaaaatgtgtagtaacatattggtatgcaataagctatatacatcatgagcatacattccttgtcaaaaatcaattatagcggaatagttatatgatgctggatgcattcaatttactggattagaaagccaactgaattggtggcaaagtcgcaaatctcagcgccattacggctgacgctgagttttgggttgagaaaaaaaaaatagcgctccctgccacgtcggcaggagatcggctcggccgccatgctggcagggcgttaccgccaaccaccttgatgcggagacggctaacctcagcgccaacggttctggcgttgagcccgcggtcttttttttttttaagcttcaaaataaggttttgaaaacggccaatttgttaagaaaaggagcaaactaaaatgatattacttaaccactttcacatttatgcatgggtcaccacggcaggagtactataacctacaaattacgaaacttaaatttacacgtggaccatatataaaccaacccgattgtgctagttataaatggccttggagcccatccagcttggaacttagcactatttctttccacaaaatttgtacgggtctacgggaaacctagaaagtaaaatccatgtccggctgggcccttcatgttacagataattaatatataattaattaagtatattaaccagtataaacttaataaatatatttatttaattttttaaaaccacttcgatatagaaagtttttttttaaaaaaatataccatttagtaggcgaggaaaatagctcactccatttatacaaatgaaagtagcgttaggctgcgtctggcagtagcacaaagattaaaactctcttgtttttgtgcgcgcgcttttagaaaaagttgcttgacaaaatcaaattaattttttttaagaaaattcgaaataatttacatatcttcttaatcttaatatctccctttcatttttttttaaaaaagttgagaatatacgtaaaacgaggtgatgcattaacgcataattatattaactattttaaatttcataaatagattactattttttattttttagagcgaaaagctcttctatcattcaccaccagtgaaaaggtgaggtggccacggaaaaagtgcaaaaccgcgtcgggttggggtcctcctccagcagtagcacggcgagcgaggtatggctgtgtaatcccaccgtccaaaaactcaattttaacgtttgaccgtacgttttatttaaaaaaattataaaaaaaattaaaaagataaatcatgcataaaatattattcatattttatcatctaataataattaaaataatttcatataagaagaggtggtcaaacattggacaaaaaactcaagaattaagggtgtgtttggataataggaaatgagaggtggaattgggattaggaaataaataaagggttaggattaaatggatgacgaagaatgaatggttagaatttaaagatgggttggaaatcattttccttagatatttgccaaacactgcctaagtcttttgagacggagggagtagctgtgtaggtaagcgaaccgccggtgcgcgcatacggggaatacgggaaacggcgcatgtgatcctccgcaccgacgctgccgccccagctgcactgcagcagtcgacggcccgtgaacggggctggatggatggaccggcaaacgtccaaagccgcacgaaatggcgatcgctcctactgtcatccttgcttttttgagaacattgctactccatccttgctcacattgaatttgaacggatgcgtgtcgctatcttcatcaaatccaatttgatttcagggagatatatgcttcgtcctggacggaaatcttcggcgagagcacgagacattctcatgttctaatgccttgtttagattttaaattttttcttcaaactttcaacttttccgttacatcgaactttactacacacacaaacttccaacttttatatcacatcgttccaatttcttcaaacttccatttttaacatgaaactaaacacagcctaaaggtcatacgtgaacttgtatctagaccttctccactagtagcgtaggttagcttgtgtacaatgtcaagtatttagaaataataactttttaagttatagttaaattaaaaaagaatagagggagtagtatatattatttagcatcacttgattcaaactaatacatgacttatggcattacaacatgtaagacaatagacgagaatatcattctttttatcaacttatacgtacagtatcttgaacttaacatgtgagctacaataatataaaagttgatggcttataccattttaaaccaaaacttgcctaccaaatatttggtaactttggtatatgcttcatgtttgaattgccaccaactttttaccaaactcgtgtttggcgcaaccccggttctcaaatccacaggagatttgaactttgtacagtttaaaattttagatttcattaaaattggaagaaaatattttatccaaatattatcaacgtaattgtgtgtcagggttacgaataagacataccttctatcctagaagtcataaagtatgcggatacattatatcttcaagtaaacggaaaggatccatttgaattaaggaaattgatgagtccttacgaaaataatatctacgaacaggggatatcagagtcctacttataggggataattaatgacgttgtcatatcgtgcggggtctgttgtctccaagttctacttggagaccaaggtgatctgcggtataaatagataccccctgagaggtatagggcatcgaatcttagtgcaagacacccgccaccacataagcaatccggaggacttgaagccaattcatcgatagatctcgtcgaggctctctcgacaagaatctcgtcggtaatcttggagttatgttgttctctgttgtactctgtggattcttctataatcccatataaactggattaagaatattaccttgtgaggtgcctgaaccagtataattcctatctttttatgtgctcgatgtcgtatcgtgtagatcctcgtaccaacataccccgatacccatagaatacggtccgtgggaatcccgtcgacattataaatttatagagttcaagaaaacttagatccagtgttgtgctaaaacaatcttaatatgacttatatttacaatatcttattaaacattgcttgtgttaaaacttagccaaagtttaacagtagacaaccaaaccgacactaagtatatctttaagagcgagtaagtaataactttggtatatggcgttattccacatttcctaagttcgaaaactattttgtaataatacacgtaagttcaaaaactatgtctacaacattcaacgttacaatgtcatataacctcacaaattattgctgctgtagcggttccaatcgaaaaacatcaaatttcgtcttggagcaactcgatagattatggagaaaatctcaaacccctaagtagaatcataaaaaaaagaatgcgagagaccagatcagataaagagtctatttgagagagtttatggtcctgtagtttcctatctggccttaggttataagtcctcagctatttgtcatcttgcttaaaactgtaatctttctcagactgtaatcttttatgaattaataaagctccttgtattcgtcgaaaaaaaaagctttctcaaaaaatttagattttcgttcaaattaaaaaatatatagtcaaataaaaataattgtacgatagaaaccgagaaacccaatttgttagattttcagaaaatgattagcaacgagctttgcctttgattctcctgggtcctggccatcaccgactcaccgtgcggtgctcgcacccccacaaaaccggtcacatgctgcgcataaatccatccaccccatcacgcgaccccacacgaccattattcctcctcctctctggagtctagtctcctctcctcactcctcactcgccccactccgccgcttcactcgcgagctcgtcgttggcgccggcggcaatggcgtccccccgcgcgctctccctcctcctcgtcctcctgggcatggccctcgcgtcgttcccctccgccgcctccgcctcccgcgacctccgcccccgccgcgcgggcttcgtcgtccgcggccgcgtctggtgcgacacctgcctcgccggcttcgagacccccgcctccacctacatcgccggtaactaaaccacacttactccactccctcccggtctgtgtacggactcggtcccccgtcggtgagccgggagctcagcagttgtagcctgcagtaggatctcgcttaatgctgaagttatcactctgccaccgtgtgttgtgtgttcttgcctgcaggatgccagcattggccttttttctgctggtggttagttattttcagatcggcttgcggaatgtggagtttgttcgagtagatctgcaaatctaagctaagtgacgtgcgtgtctagtataaatgctagaacctatggtttggtagaggtgctagatctttagattccaagaccggaactgccgaattcgagtctgcaatcttcggttggagaaactgttttgaacatttgttcaaataccatccagatggttacggaaatttctcaaaaaaattgtcagcattcatacaacatacatgtaccactccacagattcttgagcctggacttaactcgcacatagaggaatagaagacaaattcggaagtatatgaacagtacctatactattcgcaccagacttgagtcttttttgtgtagtgggtggtgggatctgcgcaagacggtactgatttagggtgtgtttggttctttgccaagctcaaaccataccaaaattctgggaatggcaaggttgtgcattgccaaaaaaagaagagatggcaaggttgctcatttggtttgttgccaaatcttttgaaatgtgcatgggaatgaacaaaacaagcccttagtttcaaggtggtgctgaagggtaaaataatataaacatcttaaggctcattaccttcaggttggatggtccctcagaagattaaggtggtgtttggatccagggacttaactttagtccatgtatttagacactaatttagagtattaaatatagactacttacaaaactaattacataaatgaaagctaatttacgagacaaattttttaagcctaattaatctataattagagaatgtttactgtagcatcacataggctaatcatggattaattaggctcaatagattcgtctcgtgaattagtccaagattatggatgggttttattaatagtctacgtttaatatttataattaatgtccaaacattcgatgtaatagggacttaaaagttttagtcccatctaaacagggtctaaacatgtgtgatcacaggctgtgtgctgatggatctgctactgaacaaactagacctgtcatgaatcagtttgtaaccatggtttccctccagatttccttcactgaatcatttataaccatagttctgaaatcaagcaacaatcagttgtctcatgggttagtgctcggtttcttctagccatactagatggaaatttttgggtactgaactatgccgactttcacaaaatgctgggctggatcaacattcctgactatgaaaagtttagagccatgcttgtaatacctgccaaaatgttgcatgtgtttcatatattccattctccaagcctgttctgcctaatgtattgcatgattcattgttgtatcaactatcaagggctagaaactctgcatatttgtaaaccgaagtgtgacatccatggctattttactcaacatttgcaatctagatgaccaaggttttgcattatgactaaagtaacaacttttaagataaaccaggtactgtggggtctggtgcacttttatgtgaaaatacatggttacgtgaacctgcaagacatcagttacaaatcttatctgcaaaaatgttgtcaatttgtggttgctgctatgtgctacattaggaaataaggaaaccacaactgggctgtagaataagggaaccatattaatttgagcagaatttttttattaaatcataagctaactcttgatgacataatagaaactaaatgcatgtttttgataacctctgcaacgcctgatggggtttaagtcagcttgcaatttttttagtatattatagtcacataggtgactaaaatcttatcagtaaccttctatggctaaatatttgtatgttgactttccttctatccatccatccacaggagcgaaggtaaaggttgagtgcagatcgaaatccactggcgccaagacatgcagcttcgagggccagactgaccacactggcacctacaacatccctgtcaacgatgagcatgagcacgagctctgcgagtctgtccttgtgagcagcccggacgcaaagtgtggcaagattgttgctggacgggagagggctcctgtcttcctcaccaacaacaatggtgtgacatctaatgttcggttggcgaacgctctgggcttccagaaggatgctcctcttgctgcgtgcgcacaaatcctcaagatgtacgaggaagtggacgaccgcgtttgaaggatgtgagttatgtatcaatattcgtacgttgttgaaatactctaagaagacttctatataccttttactgagagcaaaactatcagcatcagatgttgcgtgcttgataagttgtgatatagcttagcacttgagtatgttatatgtatgttcgtctgcagctgaactgcaaaactcatcagttactaaatcgacatgttgtgctttctatcaggcaattcttctgttatctagtatgtgtgcaattgtggttatgcattctgaaatggttttgacctaagctacctgatgttgcttcagagggctggagcgccaaagtttggttgattggttaagttttgccgtttcgtaatatggatgatgacccaacaaaataacaaactgcctttgatatatatatgttcctttcttgttgagattgccaagctgcctaaactttatgaaatactggtttaaacatgtaatcaacaagggtctgttagcttaattaggataggatagcttccttttacaagtacataaatcattgtattattggaggctacaggaagcagttggtcatgtgaataacagtttcttctctatctcaatgagctacagttagggcaacaacaatgtatatagcaaaagtagtccatatagatgggacccacatatatggactataactattgttatcttcacaatgtatatagatagcaactagtattaggaggagagaggaaatagagacaaataacatattttattctatatgggcaacctatatgctgatgggtagcttttgctattttcttactatggactagttccacaatgtggtgaggtagctgaatgaaatattttattgcttatggactagttctagactatattgtggatgccctcgttacatgttgtcttctatctgtatgtgaaggtaaacaaaactattttagctaatccaaactcaattcgcattaaaagaacacgaatgagatatactcttttttttctggaaataataggagaggaaagaatgaagaagataacaagaaagaaaaataaaggacactgcacgcctcagttggtcagtggtcaccactaaattgagaaaaggagcattctattagcgtataattaattaagtatgacctattttttttaaaaaatagattaatatgatttttaagcaactttcgtatataatttttttttaaaaaagacaccgtttagcagtttgaaaagcgtgcacagaggagtgagttagtaataactatgaataccgaattcagccgcccctaaacaacttattaacgctgacaacacctgaaaatctgcgtttgtgccgttgtgtacatatatgtcttccacgtgagttggaaaaaaaacaagacacctaagggatcaggaacgatttgcacaattagttacttagcaatttcctgcgcatgagttttgacagacaaaactagttatcataaagtgcagtctaaattaattaattggtttggtttgagcccaacataattaactataccgtataaacaaaaaacaaacaaaaaaaaaactgtaccgtataaacagattttaggatggttaaactagagacctttgaaaagtcagctttatctaaatagagctgattaactgaagaaaaacttacaaactatcaattgaaaagttgattgttttgtgatagtaattcacgagtataaaggaataaattaactattataaaattaaaaatggatttaaatagtattataaaaatttatatataaaaattgcaccgcttataagtccagaaaacataactgctaatcacacttattttaatgactagtaatatacccatacttttgtgatgggccagaccaatatgatttgggattggctgaatgggtggattgagaataaattactgaatcaacaattatgcacacacgaacaagcggacttcgtacggtggaaaaaggaagaaaagagtatcgtgcttttaaagtagtagagaacgtagagttagctctaccttacatggagaaaaccacaaaccactagtcatgcttctatttcttttctaggccatagtatatttgggtccctcaaactctcctccaagtctaattttcttccatgcatttgaaagaaaaaaaagggtatgatgcaatttaatccaatatttagagttattttttagcttaattaggacaagctttgattaaaaaattttaaaatcccaatcataaaataagtttataaagtctaataagttcatgttgtcataatagtgtttttaggcaaatctacgtatacaagtttttttttaaaaatatgcatttaaaaaattattgattataaatgttaaaacttaaagtcaatcctgcgataaaaatcaaataacttttaccagagtagtgcccgactacctgtatggctgtattacataggaggccttaacagtttaccttctctggtgaaaatctatgcttggattggctgacgcctgtctcccatttctgtcctctcccctaaactttcctccgtttcttaatccttatcctcccatctctttattgttatttaatcacacttttacgcttattaattaatctacccgctgaaaaagcgcagccacccgtggccatcaccaaatctgtcacgacatgacgcgagcctaattaaccacttcgtacactgcatgattagccgtcccctaatccgtcattagcctcttaatctttaatttattttttttggcctcccgaactagccgtggccactagtttgtgcaaattgttaacaaatccagctccgccctccgttgaagggtggccacaggattcgtttaaaaagtttatcgcctctccggtgtttaaattagtttttttttggcttaattttgacctgatcgagattaacaaggttatcaccacacatataatgcttgcaatgcttggttagattgatgagccgttgtgtggagatggaccaacctaaacggttttttgtagcgacaagtgcaacgcattctcattattttttttcatttttttggcttctgtcattttcttgtggattagttcattattacaagaatgtgaatggatttggttatggctgcattgtgcgcattatttatgaaggcatagacagatttgttaaatataagtgctctacagattatatgtattattattaatgcgcaaacttgtagttaattaacacatagcgttacttatcttttacatttaagtagtgtatgaatttctacgtttttaggtatgcaatcagcgggaatgttatatatgcaattttatgattagttttgttgtccattcagtaagaattaagtgatatttcaagatatatttattactcaatttacttattagtctgatagatcttgtccatatcttaacgaattttaagatactatatatctgattcaggagtggaaattagattgctttggaacttttggttatcgagaatcttggtccactcatgtttatcattagattacaaaatcgatcgtttcttatgatataagataacaggtattctaattaatctattcacactaggtataggtaacagaacaaaaaagtagttatttggctatctttattggtcaaagtattggaggttcctgttcctttctatttcatgaaaagttcatttaccactttattcttttttcctgctctacataaactgaaacgtttatatatcctggatatacattttttcctttattgtgtggctccttgtgcagattcttcgctctatgcgtatccattgtactctataaaatttcatagttacagccacctagtatctcttttgactaataattgaaccgcacacgtgtaaatttataccatacatcttttatatcaagaatacgtttcaaccgatgagttatcatgttgctccacacatttttttatagaaaaaaaaaccctatgggttggtatgctcaaaagaaaaaaaaatccaaaacttgcaactcttgcaaaattgcgacatttggttcgaagatgaccctagaattacaacatatagcatatttttccctttctacttgctaaaaggatcaaaaatcatcatggagatgcattattaaaataacacggagagaatataacaagtgaacaaaaagaggggggatttttaatttgcattgccttttggctttctgtacgcctggctgaggatgaaacgatgaactgttggcctacattccttatgctgacacattgatggatcacgccatgtccaatcaaattgcaaaccgtcgaccagaaaaggtctccctgcatcaaatcaaattgtaccggcggcttctacatcaccatcgcatcactatttgctcacacttatttttttctttcttggtatttgatttcattcttccacgatcatataccttggacttaaaccaacaattttggaactccatggaaagcaagagttttgtacacgtacctccgccctaaaatatactactccctttgtcccaaaatataagtattttttgccactgacatggtctctgagatgttactttgaccaacaatatttataaaattaagatgttttaaataaaaagagttgcattttatgatagtttgtttaatgataaatctagtaacatcaattttatatgtaatcttttttttattattattaatagtcaaagttaaaaatgtttgacttgtcactatactaaaaatgcttatattttgagattgagggagtagctattattaaaatatacttagctacctagtaactgtattttaagatggagggagtagaactttcacaaaaattagtagttcaattctgacccaataaacatccttcaaaatttattcatccatcgtcataattttaattatatgcacaaaaatgtttttttaagaaaaagtgataataattaaagtgataaaatatgcttttcatccggcccaagcttcattgacaaattgtcttgaatttgtacagtacagcatgtgccaatatcatctgaatgaacaacacattgtacttgtccatatcgaattcaatattgaaatcataggacaacaagtacatggaggaaatttgtgcaaatagaaaaaaaatcagcatgcaaaaatacaacttgccatgaaaaaaaaatcacatcattcgtcgtcaggttcttccgccattggagctccatttctcagccaatccccagctcacacgtgccaactcttccacatatgttggttaggacagtggacacgtggcaggagaggtgccacttggcactttcccattgggtgagatcactactccctctctgcctataaaaacaccatggagctagatagcaagctttgcttattcactcattcaacttccaaattaacacgattcttcttgctgcgtttgctgatcgatcgcaaggtagaagaagaagaagaagaagcagccatggatcgccaatggcgttgcctcgctgctgcggcttctactagtggtaatagtaagcttcctccgctgccgatggcgctgggcggcgccgtggagtacgggcagctcgtccatggcgcggcggcgcccgtggcgccgttcttcgtggacgccgagcagcagagcctgtcgccggcgacggccatggttcttggcgccgggtggtataactataaccttgtcacgccgtcgcaggcggcgcagctgcaccaccggctgcgacgggcggtgggcgcggcgccgtgctcgatgaagcggtgcggtggcatggcggcggcggcggcggggcggcttgcgctggtggggccggcgccggtgcatgcgaagctgtaccgcggcgtgcggcagcggcactgggggaaatgggtggcggagatccggctgccgcggaaccggacgcggctgtggctgggcacgtacgacaccgccgaggacgccgcgctcgcttacgacggtgccgcgttccggatgcgcggcgacgccgcccgcctcaacttccccgagctccggcgcggagggcggcaccacgcgccggcgctcagcgcgtccgtcgacgccaagatcctccaagccaccaccaccaccacggcggacaccgccgccgccgcagcaccggcgtcgacgaacaccacgccgccgccgtcgccgcgcgtcgtcaagaccgagccgggctgctgctccgtctccgaagcctccacgacgacgacggccgacgccgccgacgtctcgtccacagggtcttccccatccccgacctcatcgaatcaggccgccaccgccacgccgccggcgccgcggccgccgccgccgttgccggagacgattcagcagctggacttcacggaggcgccatgggacgaggccgacggcttcgcgctgcgccggtatccgtcgtgggagatcgactgggacgccatcctctcctgattaatttcctgacggcttcatgcatgacgtcagcatctgtgttgttgtattagtttttgttcccgagtgtattggcctttgcagctactagctttgatctatcatcagtgtctcctggcctctgctgagtttgttttttggtagatggcattgtccaggaggagatagactgaagattactcaggctgaattgatttgtgtgcatgtgtgtggtcagtttgtggctgttgctctcatgaacaaatgctatgtgcaatatgccaaagacatagatactgctgctactcttgtgtgatacatgttgttgtttgtggcatgtgtgtaattagaaatgcagtgattgatgcatctgcataccttgaattgacacattggatggaaaggaatggctgttggtttgtgtttgtgttcctggtcagagaaccctttaatttgatatcaaattttattgggaccagttttatctcaacatgcatgactaagggtgtatttagttcataaaaacaaaattttttggtgtcacatcagacatttgaccggatgtcggttggggttttcggacatgaatgaaaaaactaatttcataactcgcctagaaaccgcgagacgaatttattaagcctgattaatctgtcattagcacatgtggtttactgtagcacttatagttaattatggactaattaggctaaaaaaattcgtctcgcgatttccatgcaaattgtgcaattagtttttttatctatatttaatgttccatgcatgtgtccaaagattcgatgtgacgtttttgggaaaatttgttgggaactaaagaaagcctaaggctgtgtttagatctaggggtgtaaagttttggcgtgtcacattggatatccgacacacatttgaagtattaaacatagtccaataacaaaatattacataatccgcctgtaaaccgggagacgaatttattaagcctaattaatccgtcattagcaaatatttactgtagcaccacattgtcaaatcatggtgcaattaggcttaaaagattcgtctcgcaatttacgcacaatctgtgtaattagtttttttatttatatttaatactccatggatgtgtccaaacatttgatgtgatagggtgtaaaattttgctaggtgatctaaacagaccctaattaatttagaaccttatcagtcacaaaaagaaccataaaattggcattcaattaaaatgcaatgaaaaatatgtgcggtaatgtttcttgagcaaatgctccttccatattaaatttgaagttacatatctctactttatatagagacttttaaaaaacaacagaattttacttataaagtcagtaaaactcattagaacgggattggttatctctaacggacctaaagcctcatctctttcagacagagcctccgtcactaagcaaagattactgatgtgagaaaatatcttaattgggcatccggccatcacgaatgacaaacatctcaatcaggccaacactatagccccatcacggatgactctcatatctaacgggccaacactatagctcgtcacggataactctcatctctaacgggccaacattatagcccgtcatgaatgactctcatttctaacgcgcctaaactatagcccatcacggatgactgtcatctcaattgggtctaaattatagcatgtcaaggatgagtataatccaaaaaaaaatattttttggctagcctcaggcctttgggggccacgcccttgggccggtcttttctgcgcactttgtcctcacttgtgtgaacccggtcggtcaccatcccgaaattgctccacccgggaagaatttcctggtcggttctccaccctaatctcgcttaacctcagagttctttggagatcagcttccaaagaagaagttgtacattcattcacatacacaaccattaatatatttaacataaccacattcacataacatccatttttttgaaatgacacgtaacattcattttgatcacatatttcacatccattcacatatttcaccagcaaaaccaagttaattggatcaaatatgtaagtattaacatgatgaggaggcaaatcaaatttctaggaaaaaaaaattttgaattgaattttatgatactaaatgaactcatatgaaaaagttgtcaaagacaaagttgtagaactcattgagatctaccaattttattttggtcatttctccattcgggtttgattgaactatataaaatttaaattttaaaatataagaaatttaaataatttttcgggtagtaaatgatttcaaatagaaaaattgtcaacaacaaagttgtataactcatcaagatctataacttttattttggtcattttttcacgtaacattttttgaacagtttgaatttgaatttgaaaatatgacaacttcaaaatattttcaaatactaaatgatttcaaatggaaaagtcatgaacaacaaagtcacgtccatgtggcattgtcacatcagtgccacacaggatcctagaggggatgtgtcaatttgggacctagatgatacactttgacaagttctgggatctaaatatgcattttgagagtttagggactctacaagtttaaggaccgccagcactttactctatcaagatttacaacttttattttggtcatttttctatataacattttttaaatagtttgaatttaaatatgaaaatatgacaactttaaacaacaatttcaaatactaaatgattttaactgaaaaagttatcaacaaccaagttgtataactcatcaagatctataacttttattttagtcatttcgtcatccgacaaagtgataataacattgttcataaaattcacatatctcttatctggttttataaatgaatgaagggatacacggtttagcgtgctgccaagttgctcaaccgatcagctccttcgaactcgcccttcttttatgggaagcaaaaagggtacccaagaatgaagggatatacggtttagcgtgctgccaagttgctcagccgagcagctccttcgaatttgcccttcttttatggaaagcaacaaggtaccaagaatgaagggatagacggtttagcgtgctgccaagttgctcagctgagcagctcctttgaactcgcccatcttttatgggaagcaaaacaggtacccatgcatgaaggaatacacgtgcaagaatcacataaatggaactagggaagcctacatgaggagaagtttttctattaccagttatatgcccgaattcggagatatcaatatattccagtttcttttgtgctggttttttcacgatatataggttgggttttggggaggatttaggagcagttttttttttcagagaagggatcgtctttttttctttggggcggagggaggagaataactgtatttttcaagttgttagataacacacttgggttattaactaatgaatggaaagtttcatttacatctagtatatcagaaaattcctgttctcgtgttgcaagcctaattaatctggtttctcttattttggagtaacttgtaatatgaactatcttttcgttcaaacagctagctttaaactaaacacaattagttatattttgaaaatcccactacacaatttatagaatgcatgacaggtcagactatcatctcagcagagttggtgtatagctcgttttgagtcttgcacttttccttttctcaagggaaaaagtgcagagggctttctgcagacaacgaaatataaaactagagttgaaagcaacggagtattttgtgacaagaaaaaaagagtgaaagcatgtaagcaactaacctgacactgacatatgtgtattaacaattttctgtatatttacactccaatcagttactccacgcgcacactaaattatttagaacagtaaattaataacatgcactatactactatgaagactgaatagtatatacacatactgtgcaggggaagcagcatccaaattttactacttgttttcaatatatagataaagttatggatatttggacataatgtttgatcatttaataaacacttggaagtatcaatattttgttgacttgttgtttcatctttaaagttactttaaatatgacttatagtttttttgttagagtttgtatccaatatgtatacaaagtcggttatagattacgacttcgagttatcgtactaggtgtaggaatagagtaagagctggactcgatcctaagctctctcttaaatagagggacggaccggttgtaactacatgacgacttaacataggtgagaggtagctgccagtagtgtcagccgatggtcgttgtaactctgatatattgtaatacactggatccgggaggagcacccgtaatcattgctccggagatgtagactatgtcgtcatcaatattttggatctcctataaggtttcttccgtgtttagctactgatgacgatttcggggctgattttataacaactttattcaaatttgtactaaattttgaataagatgaatgttgaaatgtcatgtatgtcaaaaatcaacaatgttattcatttaaaaataaaggtgatatatattcaatttctctcaaagaactaggactctaccttttctacgctatatatatatatatatatatatatatatatatatatattacttgagataatactacagttaattggttatcataccttctcgcggtaaataaattacttaaaaataacgtattgatatcatcataagatttctcttagtaaataaattactattacaccaatctcaacataacatattgatattgccaaaaaaatctcttagtaaccaagttactatcactgatggttctcaatgtctcttagtaactaaattactattacatgcacgaatccaataaacaagacggcgctagtgccacatatcgatgttgagccgacaaaacactatagatccttaggtctcccatcggcagatatccatcacccacgaacatctagagaggcatcccacagccacctggatatagacaaaaacgattacataatttacactcataaatgactctaaatgagatatgattcgctgaagaagaaataaaatgcttcataaaaaattgagctaccagtttaggttccttcatgcgtacttttagccaacagatcattttttattcagacaagcatggaggtcacattatgtttccttaacagtaattcctgggcttgcctagtcccaatctataatcgatgacattgtgcaaaaaagaaaattaagaatgcagttggctgaaaaatgtagaatacgtaattgggatgcttcaggctaaaatatccagatatctctgattaataacatacaagttataagctacacaaaacctgccatcttttcagatgaaaaacgatttcaagaataaaaatggaccgaatgttcttaatgaaaagaataatcataaattcagaatgatctagcattcactacaaattgatctacaatggatcgatggaacatgcatgtatgttatacagcgcatcaacgaacacaagcaatcaccacatatctggcgccggcaaataagctgcaattaactgatcaaacatggcagctatgcttcctcaaagaaaaacaagcagctattgcctatagagattgattgagtagatagatcatggagagaaaataaaacaaataaaacatcctgactttcattggaacacatacgaattgaacatccatccatccatcgatcctgaccgccatccccatgcctgctttgcgtggccagggtctccagcgcctgctgccgaccggcgcgagtgcagactgcagaatgtgaaggaatcagaatacaggagcaaattagcagaactgcagcagcaaatcggtaaaacaacaaagatgcaaagtaaaaagttcaaaattgcatggactcagctgcttaccctcattatcatcgtgcatcacagatcatgacgccaccgctgtgggagggaggcagcgatgggaggcctgatccgtgccagatccttcgagggaggaatcagggtgtggtcaacgcagcaggaagctcctccccgcatcccgccgtcaaccgccccctcctcctcaagagatcctgtcgatgtcgacgctgattcatgggcggggtagggaagggagcaccagatcgagcgaggaaaatagtcagaaccacctcacctctccatggctcggcgcaaaggacgttggcgacccgcgaccatcgccgcctccgaccgatttcagccgtcgttgaccaatttcgcccatcgtccaccgcccgccgctggaggacacttccaccgccagccttctcccgtgccctctccctcgagctcttggtcgatccgggaaaaccggcatgggagtggatggactctagatccaaaaaaatagggtaggatggtccgttgcatcctaatatacatattgcataataggtgagtaaatagattaccggtagtttaggtttggtggggtagtaagaaaattactattacacatactacggatgggggtgggatgcactaggggaggggggtgggtggggggggggggtgcagcgggaggggggttgtgtgttaatattatatatatatatatatatattataacctagtttactgctgtgttgccacggagaaaagaaaataaaaagatcgaaacatcttatgaatatatctgttttttttataaaaccacttatggactgacaccacataacatgaagaccacatatatggtatatcaatctgcaagtgactatcatgaattaggtagttggttataccaataaccaacaactttcttcatgtccacgtttgtaataactactccctccgtttcacaatgta

SEQ ID NO: 6530 - DNA, 22162 bp, Oryza sativa
tatgagtgaaaatagaatatgaagaaaaaaacttggtgtcaatgaattaagaaaagcgtgagaaatacgactgtatatttaaaaataaatattttgaaatacagtacacttaataaactacgtataagacccgatcgcttacaggaaaataggttggattgttcgcatacgcaaatccatatatatatgggtgcatcgtataataatcagaatgtttttacattgtcaaaaaccataaatagagtcgttttttatatatcttttcatgatagaaaatgtagataaaggggaaattttatgatatgatctgagtggtagaaggttaatttgagaagatggggtcaccatgggtacaaggctcttaaaaggcgcatagatctcctccccgttgtagctcccaaccctgatggtggatgattgtgtcagggaaccaaagtagttggccttgtgcaccttctccttggtcgcccatgaaattcccctgaaatattttttgaaattagaacaattaattaaccatgtgggataaatgaggaattcagttgcacactatatcatttttaatttggcaatcaggatccatggagacgatttttttaaataaataaataaataaatgatgagttcatatagttatgcactaattgcaaactacatcagggtttaaattttcggtttggccgattcaatcagaggtcactgatataccgaaattttgaacaaatgttggtcaaattagaacaaaatattactgaattcacaaaaaaaagtgaaaaaaaaaataaaacttcagccaaaattttttcgtatctagagagtccaaaatgaccgaaattcattccggaattttgaaccctgcactacatatagtaggagtatcactgtttggcagtccaaagcaggcaggcaggcatgcatttttggataaatgaggaataattcatattctgccacactacatatcattcttggcattcaaaaaagacaggacgcattgcatgcattattttggataaaccataatccaatgcaactgcaccatatcatttcttgacaagtgaggaattcaataatgatgcaatgaactcatgcatttttgtggatgaactagaatccaattacaacatctggataaacgagcaattcaacataacgttataattaagattttatctaattaattaattaattactctctgttggcgatgacaccagccgtgagcgtggtgccgttgttgcctccccatccaaccagcatcaccctgcatttcatccattgcatacataaacaactccaaaagttaatcaaatcgaacacaattaagtaattaagtgaaaaacaaacaggtactactacccaatttcaaaattcctctccatcgatcgtctcatctcatcaacaagatgagaagaaagatgagcagctagcatttcgtgtttaattatacatgcgtagtacccgagcttggggacggtggtggtggtcttgaagtggtaggtgacggacttggggcggacgacccaccccttctccggcgacggcggcgccaccacctccgtcgtgtcatatcggtactccgactcgatctccccgtcgccgtaccgcacgcgcgggctctccaccctgaagccctccacgaacatcctcctcctcctcctccggctccgatcagatcacccgcgagttcagccagcggcggcggatgggtgtttggatgggtcgcggaggaggccgagggcgccggctttatatagcgtccccggacgtccacgtggcgcgtcgccggtggtggaagctggtgccatgcgatgcgagggagtagatgacgaatttgcggagattctaagggtggatatggaaaatggcagtgccgcagcgagagggatcaccgctctctatccatagaccaattcttgggcggtctacaccacgccgcgggcccgtcagttgcggggcgtcgcgggggtttctccgtacacccggcgtatgcaccccgtgaaatataggtgtgtttggttgcctgcatctgcatgaggcttggcccgtatctgtggatgcaattttcggttgtctggatggccttcccatgcaaaaagagctcctcagccaggctgagcagaaacgctcaaatcgagcttcacaactcggcctggccaggagcgtgcgagcaaaaacgagggtttggtgaggctcagccctggcctgcgccgccgccgccatcttcctcgcatgccactaccgccctccttcttcaactccgacgaactgcatatgcatggcggccatgaggtgcagcaaacaacagggcaacaggaagacgagaggcgatgagtgattgcctctctttcttccacggctgcaagaggcggcagtgagctcgctggccccagatccgccggccacgaggagcagataggggcagcgagcggcgggggtggaggaccagaccagcggcgagctttcttccccgaggaaccgattgaatgcatcgaggattttcttttttttttttcatttctttctccatcgacagtattaagcactgtgataagcaccacaagaggcgacgaatgcatcgaggaattattttattccttcctccattggttagacagtaataagcactatgatttttattgtgcatttgctccgtgataaatttctttaaaaattatcatacgaatttagtgcactggcggaattcggaatttcgcgaaatccggtgaaaaactggtaaattccgaacaaatttcataaaccaaaatttgaatacaaattccctaagtttgtcaacaagttctcgaaaaccggtcggttttggcgaaattccgatcgaaacagtaatttgttttcctttttttaattctttattcttttatttcctgatgtaagtttcagtaaatacacacaatacataatgtttttcgaaaatttatatcctaataagttctatgaatatcatagtatttataagattttattttatttttttatcaattcaaatttcaatttggatgaaacttctcgaaatctcagacggtttctacttttgagcctcgtcgaaacgtcgaaatttcgtgaaatccggttggatttcgtcggaatcgtaaaccctgctggaaatagtgagttcgtaggaatctcaccctcaaaaaaaaataattcatcattcatacaaccaaccaaacaaaatctcttttgaatcgtatctccaggacagtcaaccaaacaacatcttatactagcctggttaaaccaatgcaaactaggggtgaaaacgatacggaaacttttcggattccgggcctgttttcgaaaacggaatcagccggtcggaatttctcggaaacggaatcgaaaacgaaaatatttcctcagaaacagaatcaaatatgatattagcggtttccgttggaactcggaatcggtacgaaaaattccaaaatttttttcggaattccgaagttaaaaaggcacatagaatcaatagtccataagtcgtccccaagttcccaacccaacccaaatcgtggctagccctagagcgagacagatagatcgtggcacaacatcacgcaactgcgagccggcggcggagcaacgcatccaaatcgcggcatcacgcatccccgcgcggctgttgacggtcgttatcgaccaatttcgatcgtcaatattacccaatatatgaagactagctatgcttgcaatgcataattcccaaataaaatattctattccactatgtgcttggcgaactaacatgtacgcaggagaagcacgcatgagtggaggagaatcgacagaaaatagacaaacgatcaatcagatactgtgaggatcagacttatggatagatgggctgagaactcagaaaagacatgatcaattaagcccaaaattccatgttttggaatgcggagcaaacgaggagtcggcctgccagaaccctctagtttggccaaacccccatcacagccgtttaggctggggtttggcatggacgctctggatgaactcctgatggcagttgcggagcatttccgacaattctcatgctctacaaccgtcatacctgcctatttaaggaggtctcatcctcacttcacaacacacacaagcaaggattgaagctccatttctccaaagttagaattagtatagtgctagtggaataggaatagaatagttcagagtccgtggaagcttcggagagttcggtaaagttcttagcttttccttttctcttttctaagacttccttttcggtaatataatattcttctttttatacaagtttagtactttattccaattatagaatatgagtgctatgcttagtctatttatatttagtataatctcattggttaaaccttctgggatctgtattgatgctggtataatgtttgtttaccgggccatacgtcagcccaggctaagccgagggctatggttccggaacacaaatgctctgcaccgattgcaaggctgcagagtaataagtagtagcttaagcatggggtttaggctaagacttatcgttattttggagtatattcgccgggagagcagcgggccgctgatggtgacagctcagtatgggaatcttccccgcagtttatattcctacatacaatttcctggggttggatactcctccgtatacttcttcagttggatggttatgacaggttgtcgtaagaaactcggcaacccggggtaactttgcgatgcatcgggagggcacagttgagtctcggctcagctgtgctgcattgttaaaggggttataccgcaggagagtatactaattatgatagactaggtacttgtatactagaagtacaggaatagaatatttctatacttttccacttagccataattagaagatgtaggagttagctaaatccttagctgtgtgtcaacctaccatttgaactgaattaacccatgcatagactttgatgtgtataagtaatatatgaattgttagcatagttctctcttatcatatcttcccttggaataaaataaatacgataccttagaatactctcgggtgaaatgctacaatggtatatccgcgcgcttgcggattacatctgtgaccataatataccagggttatttctagtgctattgctgggaattaaatttccagtagtgtcgctaagaaataccaacagcggccgcgcccaccacccgcgccaccactggtccatcatcctcgccaccgctggtccgccgtcccaccgctcacgccatctcgcgccgccacccttcctctctcgtagagtcgcaatcgcaccatcctcgcccccaccatctcgcgccgccctcgctcttcgccgtctcacaccgccggctcggtcccgccatctcgcggcgccgtcccaccgtttcgccgccaccaccaccactgacgacgacgccacaggcccacagccacaccgacgaggcgactcttactcactgtcacgcccagaaattcccgaatagaattccaagcagaatgtgcattaaaacccctgtccaggactggccagggtacacaaacgacaaagttgacatacaggtccacgtcttacaaacacactaaaaatcgtacataaatgcagtggaaattaaaggataatctaaagctaggtcttgacttggatagcagcgggtgacaccattccacaggcatcctcgacagcacggatgaagcctactcctccgagtagccaccatctgacgcatactcaaactctgggggttgggagatagagcaagactgagtactacccactgtactctgcaagtcataccagaatggaaggtacgatgcaggatataaccaaagagatctagagaggttcatttgcataaaagctagcaattataaacggtagttgtaagcagtaaaacagttgtagtaattaaccaatcattgctcaacgctacaccacgatgagataggcccaaaccaccacctgaactaatcaattccatttagctaaactaggggtgagactaatcacgatgaatctggtcaaccgcccataactgagggcacggctattcgaggtgtacaactgtacccacaagacacagacccacgacatgtttccgtgagccgccatgcagccacgacataccggaaagaggccgtgacaggacccttcgcataaccccctctaaccaagcacaccacaccttaggtttcgcccctggtcctcaacaggcagcgggcagccccttctcgtgcctaggcgaatcagcaagccgcataggccgtcgcaggacccattcgaactccatcacgtccacccttgcctggatgtgtcagctagaggaaagctacactacaagcccagccgttgcccatgctggcttgtggtaagtacgataaattcttccaaggtttcccgtgaaccggtccttaatcgctatgggcacgaccagcaaaaccatgcacccacagcccaccatttagtgtattttaattaaccaacaccattgcggtggcactagtccaaagatatgctagaagccaatgtctatgcattaatgtaactagttggcaccctcgcgccttgccgcgggatttgctaattttatcatcgaataaaatcaatgttttaaatggttagatgcaactcttttttatatacaaaatagatgataatacggcttcatatatagcttctgttattataatacaattaatgttttattttttgaaacgccattgtgtattgttatgatatatgaaagttattttcatgcacaatctggatatcgtcacaattaggcagtgtagcacttctctgcttcacctcaagcatgtttccaaaatgagtttggattaatgatacctaattattgtatgttatccaattgtttataacaaaacaaagctcacatcttatataataattggagttgtatttagaaaaaaagattagtattatctttgaggatttgtatgtatgcgtagaatggataacaatgtcacgcatgattatgagctaaagggaggtgaatggataagtaatcaatgattaaattagatggatgagtagctagcttcttgatccaacggctgataactctatactaatgcgatccgatggcttaaaattgttgatgatgtggcttcttgcatgtcttgctttataggagtaaatgcttcttagtgggtaccaattatataggaagataggattcccctttgtttactagttgaactaagcatggtaagcaattcctagtccaacatctagtcatgttacatcccaagctaacaaagaaataaggtacacaaataatatggctgagaacagtaggtaaaacatcccatatcgtaacattataaaccatgcataaatttaaaggaaacatagagcatttgcaatatgggatcaatattttcaagtgacaagtataactttccttgttctgctgctggagggacattggcgactacttcgaagtacaccgaagcgtcgggagagccggattctaaccgacattcaaagtaaacaatgcaaacaggctataagactactgaaacaaagaacaaaaccattttaatggattctttacatttttcttgatttactgagacttgaatgggcttaaacagagtacggatgaattctctatgaattttagaagattcattgtgtttattactataacagaaaagtccttaattgattcattgtgcattaaataccccggatgacgtcggcggacagcggtggcggctcacggccgggcacgcatgggctcagctcaagccagcccggtgggccatggtgacacggcggcgcggcatggagcggcggcggcgcaggtcggccaccagtggcggagagcggtggcaatgcagcggcatggagcggcgctagcggcggtgctaagtggcgggcggcgcggcaccgagagggagagaaagggagaggagggcctcaccgatgatgatcaacgacagcgagcggcgagtcggcgacggcgacgggcggacgagctccggggtttcctaagggacacaacgagagaaattagagagggagagagagatcacagaggacggggacgccggccgaaggcggtagccatggaagtgctcaccggcgcacgaggggaagggggctccggcggcggaatcggtcggggaagcggcggacgggatggcgctcgggaaggcgaacccgacggcgtcgacggcacaactcggcgcggcggctagcggcggccagggcagcgggaggcagcggcggtgggtgcgcggcactagggcgatggagtgcacgggagagctcggtaagagaacggaaaagcgagaaggaggtgcgggcatcgtttatataggcacggagtggtcggacgtggccgggaacgggccgatttcgccggggatgtgggggaggtggacagagagagagagagagaggccggcttcgaatctcggccagctcgggcacgagcgcgggcggagaagtggggcggcggttgcaggggagtgcggggcgcgtgcagggtgtgggcgacgtgcacgggaggcgcgggagaggcgggaggcggcggttgtgggcgcgggcagcgctggccggaggagggagacgggcccgacaggtgggccccacctatcggcgacctggaggaaggagggggcgcgagaggtcacctgggcctcggcctcgggccagctcagctgaggacgcgcgggggagaggagggaataggccggcggcccaagaaggaaggaaaaagggagaaaaagaaaagaaaaggaaaaagaattttcagggttttttttaatgcttatgctcgattttaattagttgaaattccaataaaaatcttgttagcatattttgacatgtagaacccaagaaaaattccatatgccaattccgattattattttcattcattaatttaggatttctctcttgcctttaaacaaataatttcttgcaatgatttattaattgcatttaggattgggagaggacctttagggcgtgacactcagagctgacgccgcctcgcctcgcagcaaccagcagcccagctgatgtgtgtactgtattgatagactgatgtgtgttgctgttctgtgatgattgatgaactatgtactgaatactgatgatgtactgatggattgatggatcgatggagtgttttgctgtaatttttttagaatatttgttatgcaaaatatatgaagttatagaagaatatattttgctgttgggacataataattagacctgatataattatgttttatgatgaattgttggctgttgagacttgagaattggacttaacaaaagtttgaagctcagtttgaggggtttttgtattccgataaattttcgttgccatatccgcgccggttcgttttcgctctgtttttggtttcgataatatttgtttccgaggtttccgattccggttccgattccgaaaaaaaatgaaaatgaaaatgataaaggttgtttccgtaccgttttcacctttaatgcaaacaaccaaacacctgcatgtgtatcctctcagccaggctaaactcagcctggatggaaaagatgagctaggataaagggatgcgagcaaccaatcacacccataatgctgcgggtgttgcaatttgaaattttgctcaaacccaagatcgagttgggatgaaaatgaagcggatacggatgggacagataatgttcatatcatatttgtttttttctattttttataggtatgaataactcggttacaaaatcaaatacgaattatctatcgaatattatatgacacgaatatgaaaacaaatatttcttggaacaaaaaaaccacctataaacttttaatacgacaaataccatcacacataattagctcgtttggtaaaaaaagtttgatcatagactaaacattgctaattaaattcaacatgtacaacattgttcatattaatacaagtctaactaatattataacatataatttatattataatttataaaatattttaagatttaaataatattaatggtttggactagtgttgtgagaggcatgagaaatatggggtatgtttcatgcctttagcaaatatctaaatattttaaaaactaaataatattaaggttcacttgatatttgtatatgttggaaactccgatatcatatgtgtattcgtactggagaaaaaatatatcaattttcttatccatatctgaattatctgagaattatccactccgaatgacatccgtatttggttttcactagagcgggcagaaactatccactccattttcatcctaaattgagttcatcaaggtttattgcaagtggacctcttaagaccacgcctgtaaaaaatgattttttgtagacgggactagatttattgtatttttagctatttttgcaaacagtgattttataatctgcgtgaaaaataaaagagtgatgttgtttgcaaacaattaatgattttatagtctgcttgaaaacataaaaatcgtgatgttgggaaaaatttctagtagggcaaagtattgcactttgcatctcatgcataggattttccttggcaaaattcacaccccaaacacgtagtctgttaattaataaatataggataatgctataaattaaataagttacacttaattcaaaccgaccaaaacctctagatttgacacgagtgctcgtatttatggccaattattctttcagtggtagtcgatgtactcattaataatgagacgctcgtggtgactttatcaataaatatgttagcttagtcatttgaaggtacttatagagaaagggcgtgcgtgtgtacgtacatagggatgaatgtgcgcgcgttatgggcacatatttgtactttgtttttaaaagtaaaaacctccatcattagcttgcctagcttaaaaggagtatatatatatatatgcctattatatgtttcgaatatttgtgagtgacaatggtccacgccattgcctaatataaataatttgacttttttaatttttttagtttaaaataataattttaaccccaaataaacatactaatacaatatactatatatttgtttagtttcaatgagaataattttgtttagttttaataaataaactaatttggtgttgtagatgttgttaacttttttatattttttttataaatttacttaaagttaaaaatgtttaacttgatgaaaaaatcaaagtaacttataatataaaatggagggaacactaataatgattttattcttagctgagatgctaattagggtagtactgattctatgggctaactaaatttcccctaggaataagcaggtgattaagtggctggccttggagcatataataatattttgcaagatggtctccttaatctcgttgagatgctccatccatctatatatctatccaagtcgacctctctcttggaaaaaaaaaaagatgcgattcttcaaagaatagtgctcctcattttggtcttcatactctctgtttcgaatgacacctatcatgctaattgaaaaggttggcttggctgtgatgctgatagcccatgtatagtgtactttgtgccttttaattccaaatgctactttttacatgtttgtacgtgagaactgagaaccttccccggcgttctcgtcgcgttctcgtgcaagggaaatgatcgacacgaagctgcttaatttgcctatgaacttttttactttcactgtcattttttataatatctaaagtaacggaaatataattaattgtgcaactattttggtggaatggattccaccgttgggaaatatataatgctagccaaatacccgtgtgttgcagtggattaaaaaataaaaaaatgagtcaattttctgaaaaaaatatacttcatccgtttcacaatgtaagtcattctagcatttctcacatagaatgacttacattgtgaaacggagagagtaattgcttttatttggttgaaacaaaatgcttcatctttgcaaaagtgcctgtagcctagtggttacaagagcctcatagcattttaggtcctgagttcgacttttcgtgagagcgaatcttcaggatttaacgactttgtgctttcagtggtagacgacatatccgtcgataacgagacgcctatggtaactttaatctccaggatttatcggcccagtctttgaagatgttcatagggataggatttacgcgcatgcttgataggggtgagtgtgcgtgcgttgtgagtgtctgcgttgtactgtgtaattaaaaaaaatgcttcatctttaagaaacaaaaagaacagagacatgcttagggttgtagttttctaaagtgagacataaatccttaaatgcattttcacctgacaatagaacacgtattaattataagttgtgcagcgtgaccaattaaaaactacaaataaaactaagatgttcatgagtttttcacttgaatcaaggtgaaaaagaagaaaaccatcagagacaacacatatacagtgagagacaacacatatacagtgagtatagcactcgtgtatactggtctcatacaccaccagtcttttaaaagactacaaaacaaataaacgagaaacacatgaataagactacaagacactactaaaatacgatttttcatggcatcacagccttttatttttgctgatggactaacaaaacaaataaacgcttgtaaaaatatatggaggattctgggtcacgagctattagcgaaaaccgattttcgctgacagatacttaggaggtccatcataaaaaaaacaactctatttttttaggcagacctcttaagcgcccgctagcgaaaattgggttttcattggtggtagcaagcaccgctcgagaaacaaatccactctatttaaatactctcccataccactccctctccctctccttcaactctcaccgatgatgacggtgacgacggccacaacagcattggtgatgggaggcgggaggcggcagatccgacggcaggaaggaatgaggcggatccgccgccgctcacctcccgttactatcgatgtggctatggagccctgagtcccctctccgcccctcccctccctctccccgtcttctagatctggctcgagggagaggggaggaggccggcggtggcaacagcagaggggcacagtagtggctgcccctccactcacatatctagagtgctcgtttagaggtcccctagtatgcttgttccgttctccgtgcagatttgatttgaatttggggatgcttgggagctagggttgctagatgtgaatttttctgtgtgcatgatcttcccattctcttgcagatttatttgatgtagatgatttgcattttatattccataccagagatgatgctgatgctttgatttgtatgtcgtgtttgatccgtggaaatgagcatccatatgcatgtggtttttcttttttgccaaaatacatcatcactggcgatcgttttaaccggcaacatgtgaaaatcttcttttcgcagaaggctggcttaacctaaccgttagccaaaaccattttcgctggtggctggactaggtcgtctgccaatgaaaatccatctacgttggtagctggtaaccgtaagtgaaaatggtgtattttcattggtcattagtcgtggacggtagcgtcggctgccagagaaaacttaaaatgaccgtcaggaaaaatttgtttttagtaacgagagaatttcaagaaaaataatcgtaattgcttctggatgtgcagcagagacggatgctgtagcaagagataatacctttcgctacttttggcgagcgtgtgtgaaggaatatcagtcgggataaggcatggaggcggatacagaggctacctgagagttttttctcgaatggttactctgatcctcacttactataaaattataatacactaacttcaaaaaattaacatgcaaagatgccatatcatcatccactaataatcattaaatttaaacatcatacaaacatgctatataatctataattttataatttattaaattttatagcttttaaaatgtaagcatgttaaatcatcatcccacgtaattcacgtaatatttcaatatatatctttattatttttataatatgttatgtacctatatagttcattctcaatatcatttctcttttctctcgttatgctatatcactatatcacatcaattggtttttagtgcttaaatgaataatctatggtccaaattatctctctcattttcttctctcattaatctatatcacctcaattatatttagcatttagatgattaatctacggtccaaactatctcaatacttttcttcttttataaagtcatatgatcttccttttacatttgaatcatcattctatatactatttaaatttaaattatcataaaccatgttaacttacgtaatcttatattgtcaagcactctggctatcttacatattatttttacttatcgttattatactaaactcccgcagcaacgcgcggggtttggtttaaattgaagcccaacttcttagcgatcagctcttcatgtcaacttggctgcacattacaatactaggtttatggaaaagcaggagagaatgatttaattgatgatgatggtaaatgatgagcataggttatattattttcagggaatgccgaggctatattttactcatgcttgttatcacacgtaagacggtgaccaagtacgtaggggtggatccagaaaagttttagggcccctttaaatcgcaggattgagaaaacataggaataggaaaaacgtaggatttcgatatgaatataagtgtaaaacagaggattacaaaacaaaacacaggaatgaccgtttgattcaaccgcaggaaaaacgcaggaattggatgagagagatagactcaaaggaaagttaccaagaggttgaagctcttgctaaatttcctctaaaatctctataggaatgtccatttcataggaatttcaaaggattagatagaattcaatcctttgtttcaaagggcatcataggaaattttcctataggattgaaatcctctaaaatttctatgtttttcctccaattcaaaggggcccttagatcctaagcaaatctcattatatcaagtgtttgctatgaaaacttcatttctaattcataaaaaaacatttaaattctattccacatccacccgacgagtttgggtggttgtccagggctgccaggcggtagatccctgacaatatattggcaaaactaattttgattctagtttttgaatatgtatcaaatccatcttcttttgtaagttatccatggttacatatcaaaaggagaaatagaacagggttcatgctcaaccgttatgtctatcaaaagtggcaacctagtcgtgtctaaaaaaatattttctgtctggaaaccagtactagcaaccggtttttatagaaaaaacagagttcaaatgtttgtttggtataaacaattattacaagtctttttttttccaaattagtatttatagtgttggattgtatggaaattaatgcgcaacgtctgatggttctcccttgaaaaaacatttagaattagttcgaattagatattcagataggattttttgccacatgaaacaatataggacattaacgtccgattagttgagtattaaatattataaactttgataaatttatttaattaattttttaaaacttttttatatagaaaatttttttgtacaaaacgtattgcttaacaatccgatatatttctggcgaaaaaggtagcatttccgaatagctttagaacttagctactttcttcatcggcttcccatcattatttatatttgctaggtactaaaacctgtctctaactcacacaaaaacttgcttctttgtccatgatttttgaaaactaatatttctttaaaaaacatgtttcgtcatttataaaactcatattgaataaaaacgcatttggacaattcgatgaaatggccgtcgtcatataagtcaagatacggttttgaagtgacggcatgccattaatagagggaaatgcttgaagcaaaaggattttctgtgatggtggtggatggatgggttggacagggtacatcgtcgttgtctgccatcatccgaaacagaacacgggcaacacgacatacacacaccagtccaccacatcacgcgctcgtattaccacggctgcgctgcaacacaaaaaatgcccagaaaaaaaatatatactactcccagaacgaaagaggaaataaaatattaatgttatagccactcaacaagacttaaatcctgaattttataaacacgtgaatacgttttcaatatatatttagggggaatttaaaatagaaggctctcatcgtttgaccagatacgtattagcataataataatttatgggtaaaacttatatatatatatatatatatgtatatatctgtgtgtttattcttgatgacttaaatgctaacgctgaagaataatctttgataaaaaaattcttgacgacttaaataccaatgctaaaaataatttttgatgaaaaaactttaaaatcagctttaaatttaacttttaaaatttaaattttaacgtcggttgatgctgaattggagaaactacgggagccgagctttagtaagagaaagttgtcgctcataacatgagtcagaagaggaagcattagtgagtagcttagcatggagtgtgtgcattgcggcgtgcgcgtattagtttttcgttcaagggaaaagggaaataaaggacaaaacgaaaagtggaaataaataaataataaataaataaaagtaaataataaaaaagtgattttcctcggcggcgaactgtctggccgtcagttcattctcccttttgcttttctttttctttcaacaaaaaaaaagaaaaaaaaaacgtcttttttagaccatccatccatccgttccgtcaccgagcgaagcagccgcagtcgtcgtcttctccactccaccccccacgcctccttccttcccttcgcttttacctccccgattcccctttctcctcctccctcctcctgctgctctctccctctacctctgttgccggtggaggatctggccggcttcgaggacgcctgtttcttgggatggtatgtcatttcttctctttctcgcggttcttgctgttcttgattttggggggtgatttcgggttgtgcgattgatgtagcttctccggggttggtggtgataattagtatttagttcgtcttaattttgggtcatgaggggtgtgtggtgtattttgctgctgattgttggtttgttatgtaaatcgtttcttctaatcaatttgccatggattcttggctctgtgtgtatcttgactccaaaccctatggtgaaagtgagacccttgagttgggagattaaagaacgaggtaggtttagttgctttggccctagtcttagggtggtttatcatattagtatattttttatgttttaatgtagtaaaatatttatgtttggtttgctgttagatacacaggagttaagcaccaatgatttcattcctaggttctcctttttcatataggggttctgcttctgaccagaagtagtagtgacctgtgtgcctttttttctgatctccacatgtttgggagttttgatctctcaattgctagcgaaaagttgtcataatgccagcctaatgggatcaatgccctaccaatttcttcgcatcctgccggatccattggaacagaaattaattagttgacccagtagaactgaacttttgggacatttattgctgtgtttctagttaatcaacttcttggatagctttccattaattctgaacaaaactggttcttttggatagctttcttgtgtcacatggttccctttttcccctaatttggtaatagcatattgtggttcttttgtatagttacacgattttgtaattatgaaatataaaagataaacacgatagcgcaggtttcttatgatttgagcttactttgcttgaaccaaacgggcctgttaggtaacaaagattaagtttcttatatgggttatttattttgtttttgaagcaagaggtcacatgccattaataacttgtaatgtgaaaaaatgcttcttgtttgtaatggttcccaattgcatttataatgttggggacctatgtctggtctttggctgctttttatagctaatatgttgatggccatgcctgcgtatctattacaaagcgggtcccaagtcccaactatttcattgattagcaagatttcttgatttcagatgtaacttatgctgaaagctaatccattgaacaaatacccttgattctgtttgctttaatcgtactttccaaaatataattttagttgaacaccatatgctatggcatagtggaagtcgatatgaagcttaggtgttaaatgaaaaaacctttttaacaatgtgcttatgtatccgtctcttacatggatcaatcttgtttgtattgcagttgatggtatcaacatactgaacatgtttgtgaaaaggacggcaggatcaactccctgttgagtaccattccacaagatttcaccagtatgtcagctagggcttcaaaccatgcatatatatgttcagatgattctcaaatgccgtactataataactcagtgccttcagggggaaatggtaggttctatataacacaaaatcatcaggatgctcactacgcttcttctgatgatgggtcacagaagattggttcgagccctcaagcatttgaagcgccgtactgcactctagaatcatcctcagcaaatggtgctcatcctgcccatagctctgcatcttctcacagcatctctcctattagcgggagccccctgtctcatcatgatagccactcagaccacacgtacaattcccctccaagtgcatcctgtgtcacagagattacagatctccagattaaactgagggagctggagaatgcaattcttgggcctgagctagacatagcttatgacagccctgagagcgccttgcaaccaaacataatggcaacaccagaaaattggagacagcttctgggaattaatacaggagatttgaagcaagtaatcatagcatgtggcaaggctgttgccgagaatgatgttcggctgacagaactactgatatctgagttaggtcagatggtgtctgtctctggtgatccattgcaacgattgggggcttatatgttggaaggccttgttgccagactttcttcctctggcagtaagatatataaatccttgaagtgtaaggagcctacaagctctgagctcatgtcatacatgcatcttctttacgagatatgcccattcttcaaatttggttatatgtcagctaatggcgccatcgctgaagctattaagggagagaactttgttcacataattgacttccaaattgcacaagggagtcaatggatgacattaatacaggcccttgcagcgaggcctggaggaccaccatttctacgaatcactggtatagatgactcgaattctgcttacgccagaggtggtggactggatatagttggtatgagattgtataaagttgctcagtcttttggtctgccctttgagttcaatgctgttccagctgctagccatgaggtttatcttgagcatcttgatataagagttggtgaagttattgttgtgaattttgcctatcagctgcatcacactccagatgaaagtgtaagcacagaaaaccatcgggataggattttaagaatggtcaagagcctctcccctaggttggtgactcttgttgagcaggagtcaaatacaaacacacggccattcttcccaagatacttggagactcttgactactacacagccatgtttgagtcgatagatgtcgctctcccaagggatgataagagacggatgagcgcagagcaacactgtgtggcgcgggacattgtcaatttaatcgcatgtgagggtgctgagagggtagagaggcatgaggtctttggaaaatggaaggcaagattaacgatggcagggtttcggccatacccgctgagttcagtggtgaacagtaccatcaaaacgctgttgcatacttacaatagcttctacaggcttgaggagcgagatggtgttctttaccttggatggaagaacagagtattggttgtatcttctgcatggtgttgacatgtctttggaagaagaagctcatgtacgtgcattgtttgcatctcacaatttttcatcttccagtgatttgtacttaaattattttgcatgttcctacatctgaaatcatatgcttaatttgtacactgccatcgtttcgcaggtcccatcacatctccatctccagcttgcaggtgcaagatgtaacacgagctttgctttgcagtggtgtagaataatgcaaactataactgtggatatctctagtcctcaattctccccatgctcaccatccatctaattcaacgcttatctgatcatctgagatactcaacatcagctggtgcgacaatcgtagcatagaagtcgtaaccttgttctatccatgctaaatatgtataatataggaatctggtattgcatccaaggctggatgctcttgctcttaggtttgacatgttgtaatgttcagtgatcaagctagacaggcccaagttggctgctagttttctatgtcagttgtgtacctgtgtagttgcttgtaaatttgggtgaatgctatataacatcagtattattgtctgttaatgatgctattttctggcacgtgtatttgtgtacctgtgttgtatcatgcagttagtacatatatatatatttttattttgtgtgtgcgtgcgcctttggtatgcagcagcatggtgttctgcatgcttgaaaatagctcaggttgaagaatttttctgatgagagactgcctggagcatgatggccatcgcagtgctataatttttcctatacaactccgttgaataggattaatctttttttttaaggagaataggattgatcttgctgattgctatttctaatgacaaagtgtatacgcttgattatacttttatgcagttttctagctgcgcaaatgcgaaatatgcaacatgatcgtctaaactaaatccttctgtagttttgtttaatatactctcttggtcgtgatttccacaagatgcatttttctctaatctctatcatggtcgcgatgaaccacacagacacactccatctggtcgccaaaatttaaaacctaaaccttttttaaacatctaaagagatgtatggaaattttatatctagtttgtcctcaaaagtataacattttataggagtttttatatgctttttgtaatagaagttgactatcaaggctgtattttgaagatcgtgttaatagaaacctaccctgaatttttaccataggcagaattccaccaaacaaaaccatgaccaagggtgtgtctagttcacgctaaaattggaagttcggttgaaattagaacgatgtgacggaaaagttgaaagtttatgtgtgtatggaaattttgatgtgatggaaaagttggaagttttggaactaaaattggcccaagctaagatggggtccagatcccctagagttagctataactccaccaggtggatttgaccaaatccatgccatcaattgtttcctctggctaagatgaagccacgtattaacttatattaattaactccctcaatcacatatgctcactactagagaaacgatctttgctaggtcgacccaaaaccacgatagtcccggttccaaaaaaactgggactaaaaatcatctttagtcccggttaaaaaccctatagctattttatgatctttagtctttagtcccggttcattccatgtcagtaggatgtcaggtgaccgaggatctttagggactaaaaatcatctttatagtcccgggtgggaatactaaccgagactaaagatcaatatgatctttaatgcgt

SEQ ID NO: 6531 - DNA, 7593 bp, Oryza sativa
ggtcatctattaaaaaacggagggagatctatttctctcatggaatacctaggactggagaaaatgtgagtggactcaaaacctaaatcagaaaccagacgggtccttgtagaaaaattaagatggttttcatcaatttcgtccaaagtacttcctggaaacgtttattcatagcgcagccattattatttgactataccagttctcgccgtacctaattattcagagacagctgtctatataattttgtcaaagaataagaatggattgaatgcatcaactgaaaaccaaacttggaagccagctagtatgtatctagatgcatggatcgttttcaagagattaagagcttttcccatcaacagtcatttcccattggactatggaagccaatataaatatcactttctgggaattgaacagctgaaaagttggtatactaaagattaattcaagttggtcaattagtcttttttttatgttcaatcttactggtttgtggttaaccaagtcaaacatattttacttcgatcataaggatatttacattaatatttcctctatatttaaatatacaatactattaactttacacgttaattatgtttgattcttgtgatttattttatcactaaagatattttaagtataaattatttatatttacactaagttttttaataaaataaatagtcaaacgttatgtctaaaaatcagcaacaatataaatttaaaatcagacggagtataacaatagcacatatatgaaaacagagctatcctcatgtttcttctcttttgccatatatatactccctccattcttaaaaaaataaaactagtacggatgtgatatatcctagtaatactccaacttagggcttgtttggaggagcttctagcagctgcagcttcgagaagctccccccaaacagtctagctttttgtctagattctgagaatctgtagttgtagaatctggaaatgaactagaagccagaagctggattttccagcttctccagattctcaccagctagcttctcagcagctgcttctcagaatcttaagctcctccaaacaggcatttcgtactaggctaattttgtttgggaaatatgtgtcataaccaacttagtatattagaatatgatgcatttcgtactaggctaatttattttgggatatggaggaagtagtcaagtaattggttctgcaatttgcatattccttttactatatttcgagtgttcagatatttaccccattcaagactatatatctttaattgtacgttttgtatcatacgtccaagtaacaagtggagctgaaatgagtttgacatgtgtcttaccctgagcacttgtgtggcctttgctttaccatatccattgcatatttggtactccccttgtagaccgcctaccctagtgaccacaaacacagaggggtcatcgtcgccccaatttgtctccccatcataatctgctgtaactgagtcgcttgtcttcgcctagcatcatcacaagagaaaaaggattcagattttgcatcaaaccaaaagaaataatcttggtaaggattagaataaatttagcaaggcatactaaaaatttattttgacttgctgaatttaattagcaatatttcgtttctatttaaattcagctacaagagatatattgtattccacctatgctatgcatccaagcaaagaaaacgagtggctatggtttgtaagggattaagaaacctaaattaatcctcaaaactaggactcaagtggaacccttaacctaccactacaaaggcatatggcttttaatcttactagttaagaatatttgctgatacaaaagagagaaaatgagtggatagataaatattgttgctacatgatggttggaaaaagaacagaacagtaatagttttatattatattaatggtcagtctttattaattgttatgaccgttgtaagtacaatcatttaatgtgtattgtttaagagtttttatcgggttctacctttacacttgacataagttaaccagtaaagaagcaaattgactaactaaccttctactcttaaatataccttctcaggttagactaaatatgtaattagtcaacaaaaaccgaaaaatgtttcaagctaatatatatagtattggtcaagcttagcgggcaagaaaaaaacaattaattttagccgtataaaatttgactgccgaacactttgactctttgatttagtaagctcgagtttattttgtctacgttgaatccctttgacccatgtaaagatagtccaaaggaacattggctcacttctctttgctaaaaaaaaagcaggaagccgtcaccatcatgctaaagtagattaattcgccctatagctagctttattatcacttaatattactaactatgtttctcattttatcacttaggacatgtagaacagttattataataacactcttagctatactaattagtgctgaaaaaaaagaaagaaataggagataaaacatcgttgctacgattaacaacgactcttaatttttttaaagttaaaacttagctgcataaggatggaaagaaggaaataaagataaataaaattaatggttagaggttttgttgtctcaactgtcacatgggatgacagtcttgcatagtttaagggctcataacaggctttaactttaaacatgccatccctaactttatcacttattattactaagtactaattaactatcttttagcactacattatttgatcctccagctagcttgatctttattgatctgcatgaaatgcgctggccacatttgtcgttgtcaccaatattgttcaaagaacaatacaagccaacatgcatatggaccatgctcgcaagttggcagctatcatcagcacatgtatatatctatcccagcctaatccactactaacttagctatagctacttgttgccattggagtactattatgcaatgcaagaggtgactcttgtacagtgacatcaatcaatttttcggcgtcctaattacctgcaggaacatgccattgggtgccctgatgcgcgcgcgagtcttgtcgccgttgcgcacgatctggaacgcctccccgggccccggcgacgccaccgtcgccacgacggtgaccccgtcgccggcgacggtgacgaacaggttgtcgaacaccctgaggtcgaacgtgtcctcgtcgatcctccacagcttgaaggtctcccaccccgaggcgctcgtccggttcgccaccaggatggtgccgccgccctgctcggcgcacaggtacatgttctgcgtcaccgacttgaattgcagctgggttccatcctaaaatgcatagaaaagcgtgttctctgatcataaatgtttgatgtttagaataagatttgataagatttttgaagtttttaatcatccaaatgtacttaccaggaggtctttgtttggaatgtcgtcgaagagggagggaaggatccagccctccgtgacgagccaacctccaaggttcaccgcccgaatggggggcgacggggcgccccgtttcgcgggccgcaccgtcctcccatcggagactgagaagaggcacggcgagcagaggaggaggaagaggaggagctcaaaatggcgcatgatgaagacgaagatttttcagctcttgatgactatcttagctcagcttgccaatgtatatatatacacaacgtagtgcagcgatcgatgcatgtgcgtgtacgaactgcgtaattaatggatagacgtgcgtgcttagaataaaaatgtggacatccagagttgaatagcttgatgcctacgtgcgacgttgttggcgtcctgcacgcttaataatgaagctgctttgacgtttgaccgcagccgtccgatcgatggtgcggctggccggatgccatttggtttgacccgtcaaactccgccggtggccgtcggatgctcatcgaacggatatcgcatcgatcttcagataatcgtcagattggataacgtatacggattagttccgatccaggggtgtggattcagcggcgcgggcaaattctattggctgcgtgagcttcttaattttgtcaggtagacatatatatagtcagtccggcgctgatacgtagaaatgatgaatgaatttggataaaaatattgtgagaatgacatgagaaataacgatttaacatgttcatatactgagctttaaaatgtaataatatgtagatgatgtatgtagttatatttatgttttagtgtttggtgcgtttgacttccttgcatgcttcttactccgttttaggttataacatgttttgactttggttaaagccaaactgttctaagtttgactaagtttatagataaatataacaatttttataatactaagttagtttcatcatactaataattgaatatattttcataataaatttgtattgggttcaaaaagttactaatttttttataaacttgatcgaacttaaagcaatttgactttgaccaaagtcaaaacgtcttataacccgaaacagagggagtaattaataattgttatgcttgcatcttaagctttaggtttttagtgtgttacgtagatatgaaaggtatcgctttgtttaaaatataataaactttgagtctggatacacgatattaaatattaagagagtatgtgtaattaaatgaagcgagtttgtgattgaccaaggaaaaaaaagagaagacgaagaaattaaacatgaaaaaggttatgattggttaagaagcgtttgttggtggaaaagttgttatgttttagataaattttaaaatcttttaaattactatattttgcaacgagggagattttttttaaaaatcaatctctaagagaaaaactattcgcatgtgcagcgtactacaccctggcggaagaaacatgcatgcaaagcttctatcaaaaaatgcaaggaatctcagatactgacaggcttgaacatatatatgtgcgatcgcgacgatatgtcgatcgatcaggcgccatccgtgccgttcgattttgtgtgtcagaaaatctcggccctccattccgcgccagcggtatgctatgagcctatatggaatgatggatgctcccccggcccgtgaggccataagacgtgcacgtctccgccatgacccgtgagacgtgcacgatcccatgcatgcatccggagagtggagacaagccagacagagtggctgaaaatttgacgttttgtcgctctaactatttgcccctttgattacttatcgttacaatcagaggaaggatcactaccatcaaattgattttttgcacatggccaaaatcgattttcactgacggctggacagcctgcatgcaccaaaatatatgtgaaaatcggatttttcatgtggatagagcaaccgtttatgcaaatccgattttggcatgtgtatgtataagccgttcgactgtgaaaacgaagagtcgcaaaaaaaaaaacccaaaattcaatttcctgttgccctgaaaccccaacactagaattttagaagccgccgacactgtcgacgcttgaagccactgtcgctaccgtcatcatcgctcgaaaccaccggcaaatctgtgcgtgtgggtggtggagaggcagcgggatccatgcggaagggggagggggcatcggacccgtctttcccatcgctgccgtcggtggattcgcacacatgggaggtggagcggcgaccggatcagcaccagagggggagggggcgccggatttcgtcacagattaaatagattcttgtagtgccctcccgttgccaccgacggtgggatccctctcgcccaagcccgccaccctcgtccgccatcacctcgttggggaaggaggtccccgcgcctaatcgacaccaaccgaggtaccccatgattgatacaacgccgctaagcctcccgccgccaacaagctctccactgccgccaccctccccatcgttgtatccactgccaccgccggatccgttgcatccgccctccctattgcccggcgctcccacccatccgtcaccgaatccctccggcgtaggccactcccgtctgcccacttgctgccatcgtcattttcgtggctgtcaccaccgtcatcgcgaccacggtgaaggaaggagagggggagccacgatcgctttgaggagaggacaagagaagataagggaggagtgagaagagagttgaggagtggggagaggcgtgcgagtggagtggacgggaggaattaatgggacttagtgagagagaggaggggagaaaaaaaaagagcggggagagagatgtattttcacatgcgggtctcttagtaggggccttttaagaggcttgcctgcgaaaattgattttcacacgcggttcttgatctatgcttggaaaatcgatttttacatacatgagaattatggtccgtctacaattttaaggggtctcatttaaaaagtcgattctatgatagtggatatataggtgaatgatacgtggatcaaaatggcaaataattgagacccattctatgtaagcccctgcactccaccctaagctcttgattaagcttccgatgccacggcccttcgctctgcctctccacaactagcatcgccataccagccttgatggttcccgcgttcgtcgcctttagcaatgtagcctcgatctcgccactatcgctagctgacctcaaaccgtgatgttgccgtctctctatgccaccatagctggtctaagagcgagtgacttcaagcatatatgaagaagataagagagatcctgtcactgcattgacagagctatccttgagcagccgaactatctgactacctatatatatatagttggattgttcaacgtagttccggactatcctattaggcttaattccactccaagtttttaaaatttcaagaaacgcctattcacacctcctccctctagatgacatatccgattgacggagcgtggggctcctcaccgggagaccgcgcaggcccccctttgctggttcggccgggggcgctaagtgaggttcttcaccctcgatctgtggaaagttcgcgagagaacaaatgcgcaagacacgggcgacgtagacaggttcgggccgctgagaagcgtaataccctactcctgtgttctggtggatctgtgtgtgaaggagttacagagagctggagagcaagagtcgtctgagagtcccctcctcgtccccccttttttcggtgggcaaggtcctccttttatatctcaaggggataccacatgcaccacttctacctactcttcttttgggtggggacccaccctatcttcaccaaaacttggcttgcgccttcgcctggaagctaaatcacagcttgtccttgagtgaggctcagcgccgtcactcgcctgacacaggggataaccctgtcatttcctcattaatgggtggagatttgcaatggccgctgtccgaatgactctctgatgggatgggtcatacctacctccactccgccgaaagcagatgcaacg

SEQ ID NO: 6532 - DNA, 24055 bp, Oryza sativa
cgcacccccggacgtccccaggtgcacggcagaagctggcctttattaaatacaaatgaatttggatcacaactcaacagcatgcagggtgtgcatctggttgtatgcatctaagttatgtccttagtatttctcaacattgttttataattttgatgtaaatgattgacaaaaaacttccatgtttttttttaaaaaaaaatctgtaaatcgcctcgtatctgaatggaaggtatgcaaccaagagttcggtgctgaaacaaagctgaagggatgcaaatttcacaatttcacgcgaattaagatttatcaattaatctcattcttgtctggtacgaaaagtcgaaaagtgcgaaaagaaaaaagagcaaaaaatttgccgtacagacaaattaatccatgagcacaatgcagagcatgcatatgcatgtgagtgggcatttacaagtgcactttttgttcgttgtggaggagtgaaggaccggagagaggacctgatcttgcttggaaagttggataaagatgttggatctcagatcttggatattgctgtctcatatggcttcaaattcatgcgtcctgctcctccctacacatggcaattctcaaggaaaaaagtttccaactcctacacatggcggtcacatggagatatataaatttgcaaaattttgagaaattctgcatggtatataacttacaaggtcaaactaatggcaaattgcagacatggttttctgaaattttgccccattgtgcattccgaaatgttttttacagggtgcactgttcagtaacttttgtaacaaatccaactcgattttttttagagacgaatcaaactcgaatttgaatttgttcatggaaccaattatttctgcagctttgctttccagaaacaagtacacacagatagagtaagattaacttctgcagattgttaatttggtttgtctgtttctaataatcagtgttttgtttgattgtttccttcgacgcgagtggacgcatatgatgcaggcctaactatgttcaatgttccaataaattaagcactttttaatcaaagctggtcggccggggacggcagacaaaaatttgatgtttgaataggatccgaagtacaatcataattgctcatatgttcacaagattttgtaaccaaaaggttaacatcaaccaaattcaactccataaagtagcactaaggataacaccaagggtatataaattattagcacatatatagtatggatggcacatcaatttgtgcgttgaatatgctttgatgttgacaaaaggatgagttagaagataacctttttgtatcattgtatgcatgagtgggcatcttaattcatattggttggaatttttggctctagtggcacaaagcatgcttcatagtgacttcaattgttccattgggggcgtgagaaaagcccaatggataaaaaggttctctccccactcgcaataggtagtagaatatttgttttattagaagagaacccacaattttcatatggtgtaaaatataataataatatggccatgtggttgctaattctgcacttggaaaagcaatttcaaagatggtgaaatgcgaaaagaaatgttgactattgaaggcagcctatggctatgctatcatcttacctctcttatatatgatgaaatcagataacctcatatatatgctttcttgagaaaaaaaagaactccttcttttgtaaaaaaaaaaagtattgatctgtatgttcagacatctaagtgcacaaacattaacagcgaatgactattaatcattcaatctttgcttttctgaatatttgtttcataggataactcaaaattatatgcaagttttgatgcaaagcttcatctgagagagagtaaaacaacaagaacagatatatcaagctcttcagtgaaaatggaaacagaagaactacaataatcaaccctaatcatgacaattccattgataaaaagtaaaacatcgttcttttgcagaaacatccattctcaagttccctcttttatgatcttccccttgtgctatgtcggcaaacaagagaaacaaactaaattaaagtcttttgtttcctgtaacttttgggtagtttcagaataagatacatagctattcttctcttgagcttgaagatgaaagattccatgccagaactttcttgaccaactaattaatctggactttggtttcattccattccttattccatatgagtacagtagtacactagtactggtctcctttcctgaaaaaaaaagaggagattcagaagttcagaacaataggcaaacaaatctccaatctgtggttgacacgtcactccttcctcatggagtcaatgggggtgagcatcagcaagtcatgtgtgctgcatgttgtaggtagccttgaaggaaagcagttggattggatctcattttagtttagggcaggaatgcataagcccatttgttgtgtcatttattaagtttatactacatttcaacatatagttaatgcaaggttggagttgaaacaaactgtctccttgatcctaattcctgaaacatgtatgagattttgctcatggcatatgcccatcaggagtagtgcaccacatttacatacatagtacatgtggatgcaactcaatggaattttttttttttgatatttggattcatttgtgacccgaaaaattttacgcatattttcaatcatgttcaaattcttcagtaccatctgagtgtagattttacctgtaataattaatcagaaaaaaacctacaaaattttgcagtccttacatgtcttgattaaaaaaaacataaaacatttttgcgttggcatggatcgtatgtattgcccatttgagggttgagaccaagaaagtttcagcatcgatacactttaaattccatgttggattcttgaagcagtccattagcacaaacaggcttgtcattagtggaaacttatgtcacatgaactagtaaaactatagatccaatcatacttccatgcaaacaatgacccaatagaactcagcaaagtacagattatacaatcccaacatgaagcaactgcaactttcattcctcgaatcacagatggctgacacgactcagttatagtgcagagcacagtacaacttataatggtataacagtagagtaagatgtttcaagcaatttgtccatgcaaatcgtttattcatagtactcagttcatatagctctggtgacacccaattcagactgattgtcttagttctgtggcaccgaaattatatgtttttcgatcatatccttcatgctccagttagtgtaattattattattattataataatattattcttgtagctccagaaagcccaaccaaatgaggcctgaccatagacgtccatctgcacatcagcaaaattcgtgcggtcatcgtcgtttgcaccttgcaccccccattccgtagtccattcccctgcacatttggaaagacttcttcccactgtgtcgtcacaaaacagcctgtccagcttcaccaaggttggtcgctgttgctcattgctccaaatatatcttcttccaaataaatacatctcctttcttgctgcgaagtattcattaatcagcgattgtttctagcattgttcttgtctacagctgaggcaattaaattgaaatcccctgtaatcatccatttcccaggtcaagcttcccggattgttgtcatttcttccgggaaaagcagcttctcatcatctccttgcggcccatacactgaagataagtaccagttggactgtcacagaccaaatcccagcgtgcaccaagtccccatggaaaatatcacctttccaagcgattattaacaccccccccccccccccggcaaccccacccccaacgtgcatgcatcacggcgaaagagtctaaactagggccacaatgcttatagatcagcgaagcatctaacttaattagactcttaaaaacaaacaacagacgcaaactgaaattttgaaatacatctacttctgcagcatcttgttttatgtttctttcatttctggagaagttgtaacaagtgatgatgacatcctgtgtttcaggtgcgccactctgccctcttcagcatctactctaggtataatttgatgaggttctggatcgagtatcaatgaataaggcatttcttctttcaaaaaaaaaaaggcatttttgggcgatgaatgcttctctcggcaggatgaataggcttctcccacatgagtagatgcagctggaaggagcacaatgggtatcggctcaaggaaagcttttggctgatcgagagagtgtcaaagcagcggattgcccctgaactagagatcatccagggcaggaccttctcattggacacccttgagatgaccagcaatttcgatgcctctcttgcccggttgaacagattgtgcatccctgaccgtgttgacggtgtctcgctgtcattgtcatcttgcaacactgaagatatgtagataaaaccctgaaagaaacattgtgtcatggaatgtttgatgtataactcttttgttcttaattgatgaagcataatattgtcgatattctggaagtggcgacagaaagcttacctcctcagtacggctgattgcaaatcctagttttgtgtcacctactttaggagtgatctccagtggcatttctcctcctatggagctgtaccaaagtcgggctgccttcaccacctcagtgttatagccttggtaatcctccaaggttgcatttgacagatcaggcaacaaccctgaattgacagttgcagatgtggcgtctccaactctcgatatctgtacattatggagagtgaagattaaaaccatgtagaatcaaaccaagtcgaatcttgtgtgagattatgtgtccatgtgtaatgcatgaaattgaaatcttgtatctgcaccttggtgagaagatcatcactctgcacactcatcaacttgatggggacaccagaggcctgcgaggcatagagccatgtgttggcacgagccaaggtgacctcgaaggactcgtatagatgtgacttcatgtccaacgccatgggtaggacaagcattgagaggtagcagctagaatcaggcatgtgcaccgagtcttgcatattccccttcatggcatatgagatgtatgcatcttctgcctttcttggtgctgttgcaagtcttgtgcctccatggattgataaggcacctattttgcataggaaggtcataaaaatttctcaataaagtggattaaaatgttccaaattcatagtacatgaaatttcagtcaagaattgttcagaagagttgaatttgttaggaaaacatgcatgtgttcattttaagatgacagtaattgcaacatgacacatatcaccacatttgctcgcgaaacagccaacacattgtttaaataaccagaagcactgctaaagtaacaaccacacgagctaggtcaatcttttccagtggcatcattgacatcttggcttgacccccaaccagccagagtgctcgtgattgatgttaattgtcaatcatggtggtcgtaaatgtagctagatcaaagacccacaaatgttccaaggcagaccaaatcaccaaatcagacaacagaggcataacacatgcactagtgagtgactttgcaattcttactgggcgtttttttagtattaatctgtggtacctcctggtacctcaacactatggacataccaagaggtaccttctttttttttttcaccaaaagaggtactacctccatcccataaaaattgaatttctagggaattaaggatatattagcaggatagacaaatgactacagtaaccctatttaataaacacaatacatgcacacattccatatataaacttgattaaaaggaatgttgagacaatgggttagagatgggatggaaggaaagaagattacaaggaaatgtaatcagtttaatgggtcccacatcagtagaaatataacttttatgggacaaaggttcaaaggtaaaatttcaatttttatgggacggaggtagtactaaattttatactacagaatgtgtcaatgtggtacctctcggtagcaccttgaggctaaaaaggttctactttacacgagtacttccccaacgacaatatcaaaaaaagatatatggcatacatgttcaactcaagttggagcatggaaaagaaatgttagaataggtatcaaatataccagtcctattggagttgaaataggtggtagggggtagagttagagtcggactctgtaacccagcaactctcttaaatagggggaggcaccacaatgtaatcatggcgactacaatgtagcgtagacacgcagggagatgatcacggcgtggccatggactcgtagcggttaggagctatattggttagggaggagcgcctataatcagagcccggggatgtaggcttcggctgaacctcgttaacaaataccatgtgttcctgtgtcgtcatctggcatgtcttgggcgatcaatgactgaagcgatcgggaaggttagtcgtcgttccgctatattgactaacttttataacaagtagtatcagagcagaaggtttcagtattggatcaagaagacatgtggaggaggaaacacgaggtggggatcacgcatcagcaggagattgtcagctgtgacgatgagatcgatggcgacaacgaggacgtcgcggaggcgatgaccttgctcgcgatcagaccggcgatggcggaacgtgaccggaagacggggccgggcgtggccaaaggcgaccggagagatcggaggggtagcgtcatggacggcacgcctgacgcacgcggtggtcgtggatccgcagcggcaaggaggctagcggcgaaagggcaaaaccgacgagcgtggcgcagcgcggcagacgtgcagggccgatggcgacaaggtcgtggacagtgaacacgagggctgcgactgcggtgcgtgcggaggcatggacgaatagtacgaggtattgttctttgcgtacaacttggatggagtcgagcacatcgcatggaaatgccttcatgcgacacgatgtacacaaaatcatcatggctgcatgcactaataaagagtggcctgtgcaaggtgatcatgacatgttgtcaagcacatgcatatactacattgctgagattaaagcatgggaggctagatgaggacgttgaggcacatgggtgtatttttgcatgagcatgatgcggcagggtttttgctaggaggaagaggtacgtgagcaagggaaagcagaagagacccaagcagacacgactgttgagttggtttctgtttatgcggtcattagaaccaaaggtgtgtacttgaattgagttagactcggttgttggaacagaatccgacgggaacttgggctcggtaaagcagaacctaggaagattcgatgcagcagaactatcttaaatagagaggggagcaccacaacgtaaccatggcgactacaatgcagcgtagacacgcagggagatgatggcggcgtggccatggactcgtagcggttaggagctacttcctccgtttcacaatgtaagtcattctagcatttcccacattcatattaatgttaatgaatctagatagatatatgtctagattcattaacatcaatatcaatgtgggaaatgctagattgacttacattgtgaaacggagggagtatattggttggggaggagcgtccataatcaaagccccggggatgtaggcttcggctgaacctcgttaacaaatatcgtgtgttcctatgtcgtcatctggtatgtcttgggcgatcaatgactgaagcgatcgggaaggttagtcgtcgttccgctatatcgactaactttttttaacaagaaatgctttaactcaattgctggtttcatttcttctgtgaaaactaacttgcctaaattgtgcaaatacaagtgatttcaggcaatgtttgatgctctattcggagtgcaagagtttgcaataattttgtcaagctaacaggcaatgagtcaaaatcgatcatatcgtttcctatggaaaacatatgctgcagatcaatttgccctttaaaacgagttatggcaacatgaaggggaaagaaattgtgtgacttttacacacttattggatttgtacaatgaagaaataaaacaagatgcaaaaattagtttgaagggtggcattcctaccagaaaaaatgatcatgatcaattgtaaattggtgtggtgcaaattgagctagttttgttgataatttggcaagtggtcaaactaaattcccaagaaggtaattaaactaagaactattttggtttctaaacttccttattagtaaacacaatgactacatgcctaatggcagaggctggagatgtactccatttcagttatctaaaaaactttgttatcagtgccaagtttttgcaggaaagtttcttggacaaaagtgttaactattaaaaacaatatgagtaacaaatttatccatgcggtgacacaagatacactgctaatttccattaaaaattttgtacattcaatttctagttaaattagtgcgaaattgttgagatcttttctcccttggtaaagagaggaatttcactatgaggcagacgtaccattcaaatttgacacatccataccttttaaaaaagtcatttgattagaatagctacatctctcattttctgtaagaagctataattcattggtcgtcagctttttatcaaatgtttaggggggagtaaaataaatggtttcatagttggggaatgttttttttcttattccagaaagactctaggagtaaacgaagtcagtttcatgatcgtggttgtccatgatcagtagagacacagaaatgaattttgaatgtataattgagcaggccactctactagtttatgtacaaaatgctaatgtttctgcatatgaatacaacattgacagccagaatcagttagaagcaacggactaagaaatgcaagaagattacctagaaacttcagatgccacggatacattgatgatacagacctgacaacagcaaccatttcaccacagtaaagttagggttgaacacgtaggaatgcataggaagtcatgtagaagatcgaaggtgaagcaaaagtggattatatctttttatatggtttcctcaaaaaaaaaatcttttagatggaatgcacatacctgatatcagattgtttgtacttatctgggtcttttggtgcatactcatcatgttctaaaatcccatgttcttgctcccgtggcagaggcacaatacttccaacttgtttgttcgcatcacttgactctttatcttgagtttgatgatattcatcgaagttggcgctcatgatagcattttgttcttcctcagacccatgatctttctcttttgtcactctatcaccataaaaaatcttatccaccaactgtacgttgattctaggattgcttgggtgattgctaacagcagatgtcaatgcagactctgcgtcgacacttgcaccatgaatttttactgagatttctttgaggcctaacaagtgtccaatcctgataggtgcagtaccatatagatccccaagggcactgaaacctaacttgagcttcctgagattaggcattgcccctgcctcaaatttcagccaaggtacactacaattatacttgaagtacttgagaactgagaatcctaccttatcaaagaaaatgttttctacagatgctctgtgcacattcaaagatagagccatgagggcaggcaatcccctgagaatatcaacactgttctttacaagctcccttactgcaatctttaaaatgcataggttgccaagttctccaatccacttaggaactctgtaaaagatgcagctgtgcagcaaccactcaaatctctggagaagaggtggaggtgccaaattatcccacaaaatagttacttctgaggctcctgaagccgcaattttcttttgagaggaagaagaaactagagttagatttttcagattaccaagtcttccaagcaaagagcccaaaatttccatgtttctctctagatgtttggaaggcagtgcacagaaggtgagatgaatatcccgtacgttgttcagattgctaatgatgcccccactgggtgatgagttactactgcttgatcctagttcgctgggaggtgtcatgtggcccatcaaatcaatcagattcatatcaaaacgaagatggaggtgtaacaagcacgggagaaagataatatcccaaggaacagcagtgagtgttgtatccatctgcaacgtttctaaatattttagccctcgcatttggcttggtagttctgtgcgaatatcgcatgcaatcttcaaatatctcagttgaaatagttcagaaatcccactgaggtctaagagttcatcaccaacatgaccagataattgaaggtttagaacacgaagaagcttaaactctgtaagagaaggcatacacttacataatccaaaaaatgtaagtgatcgaacttctgatgttctgatgtttgttggtatttttgcatactttatgtcaccaaagtggacagaaagtcgacgaactttatcagaaagttccacatccttccggtaaaaatctaataccagaacaaagttctcctctacagacttgtatgcaataagatctcgtacctcatcatgaattgtacaagttgacacctcattgttgtagttgagtctgctaggttggaggaatcttctgtcaataagttcatcgaaatagctccctgcaactttctccaagtctcggccctctatttgatcaataaaaccttcagccacccatttttccacaacatcatccttgcatattttataaccctctggatacatattaagatatagcaagcatgtcttcaagtaatgaggaagattattgtagctgaggtttaatacttgccgcgttccttctatagaagaatttgtcctaaaagcagagcttaaagaattacgtatgtataaacatagatccattaagatgacaggctgacttgctaaaaggctagctaggctgattgttgctaaaggcaaaccaccacatatttgaacaattttgtttgaaacttctttgaattgttgagggcaatcacttacaaaaccaaaaaatctctgaagaaacaacgttgttgagtgctcatcatccatgggtttcatctcaaaaatatattcggtgtcataacagcaacatgttaatgcaagatcttcaacctgtgtaattattactatcctgctgctcagaattacctctggaaaagcttgattgataagatcccatacggaggcagcccataagtcatcaataataattaaatacctggcaatattttatgcatattagatacattttttcagctaatatagtaacattcatgagaaatatataaatcgaataagtaaataaatgaggaagcaagttttacaggaagagatgtaatggaaaagatgttcaaattttgacccttcctataaatgttgggttcactatagagtccaaactgttatgcaatagtgtctgtctacgtattgcttgacggtatatgcaatagaattcaaatgggccagctaaagtggccaaattggcttattatcaaaaaccacatccccattaacatagctgtaggtatggcccttgagaatatgtatccccaataatcaatggtcaacggtcattctattgagcagttttgcaagaatcattaaaaatagtaccatcattaaacagaataaataagagtggataactagtgtatgcacccctgtgagtaattgaatgaaaataaagaactcgatttcggaatgtacattagtttcagtttggataatctatatataagcataggattatatacttcaaacaaattagaatctcaagatggggaaatcattgcaattatcatagggaagtctagagacttagaccatatcctatttattctctagattattttgcttagtactccttccgtttcatattataagtcgtttgattttttttctagtcaaactttgttgagtttgaccaagtttataaaaaaattagcaatatctaaaatatcaaattagtttcattaaatctaacatgtaatatattttgataatatgcttgttttgtgttgataatcctaatatatttttctataaaattggtcaaacttaaagaagtttgactaggaaaaaagtcaaacgacttataatatgaaacggagggagtactatctatgtacagaattgatgcatggactattggcaaccaaaggatctgatgcattttgtgatggattggtttctttggcatgttccaagttctagcactgatataaaaatggacacaagaggcactacttagtaaagtataccttctatcttgaagatactccctgatgctgtcaataagcgcaagctccttataatcgtcaggtggctgcttccgctggagttgaaagaacatctcgcggaaaaccctcttcatatcaggcttccgggagatccggacgaaagctcgacagtcaaattgtcccccaattctgttgtacaacagtttggcaagtgtggtcttaccaatacctgaagatccaacaacagacaccaccttgagcttctgatcctcatcattggcgagccgctcgatgaactcgctcacccggccatcaatcactagctgggcatcttcttccccatacggcctagatggcaacatagggccaaatgacacatatctccgcctgtggtcgcagcaatccagaccatacctcccatgccgctcaatggcctcctcaacataaatcctgaactgcgacaccatcttccccatctgctggtgcctcttgagcctcttgggaagacgagcaaccttgacacggccgattctgcagacgaatctggccatggtgttcgcgcggcggccaggccgcggcgctgcgcagaactcgtcgatgtagtcctcgatgtcgtaggacagctcgcgcacctctctcatccagcgcttggccgtcgggggagggtcctccagctccgacagatcggcgaggtacgcggcgaccactccaaggtcgcctcccaggaggagcatccgatccttcacccccttgggtagcctgctgccatcgggagccacaagcagctcctccatcttcccaagaagggatcccatggctccctgtgaagcacaaatcggggcggcgaggggcggggcctccatccctgaggacggagatcgaatcaaccatggagtacagattgaagaactgggaaaatggggagaacgatgatggatatactcaccgagctgcttgtatcaagcaatatagagaaaagcaaattggatgagattcatcctggacggtatcgagaaaatcgcagcccaatgaagatacgaacccagctatcggaacttggaagttggaagagcactggtgaaggccgcagagaccaaagacggatcggcgcaagacacagcaagagcttttcgttcccgagggacatgatcatctaccttatcagcatgttttgacccagtacaatgggtcaacgtctattactttcaatataagacgctttgatatttttttaattaacttttttttcaaaatttgatcaagtgtatataaaattttaatgatatctatgacaagaaattagttcaattaaatataaactaatgtatatattgcttggtctttttttgacagagcgagtaggagagatagcaagataaccacagtcagatcgccagatcaatactacactcagcggatacaatacctaaacaagagtaggatattacctctcattgagagagtatgaacatgtctaaatccttatctccgcatccatacacttttaggtatcgagggctaccccttttattattgccgatttctagaatcaacagttggcgcaccaactaggggttgcgccgagtttcctgtcgacaagtgcgacggagccaatcatcgacgtcgttggattcaatttcgccctagggcgaaccttccactttgggagcttcgacttctttgccggcgacttaggcgagcttcccctctctaactcggattctgttactgcaaaatacgacagcccgggagatttgcttaactccagtgcaggtacaagacttgtctcaagtgtcaagagcgtgctagctgatttgatcctacaactagcaatgaaacaacaaatatagttagatgaacgatagccgatcgaccgataagccgatgtcgtatcgttagggtttagccgatgcagttaaaccaaattggctcaatctttatgatgaactgaacaaagcaaaccctaaatatgtcccatcggctataataccatctatcttgtttttatcaatcacgtttcagattgtatggtataagtcacctcttgttgagagatcgcaaccgatgccccgacttgaagcaagaactcgtcgaaaaacttaaaagaaaaaagggggcaatgcgccgaaagttgtattgattggatgttcgtccctttttacatgatcttgggtttatatttatacccaaattacaaaacctgtccattatagacacgactcaaactttcctaaagacaaaaggaaaaacaaaaagactcaaatttaggagataaaaggaaaaaaacaaaaaaaaagtccatatggcggactcttaccatatctctaattcaagccggtatcaatatcctaattaatagatataattgcgttaaatggactctatctctatacggcaatacatcagctatcttaatctaggcccaaaccgagcccaagtgaaaccgtatcggctgtcttcccatatcggctcatttgaatccgactctgcttccagccgatgcgctctctatctcaaatctgctttgattttcctcttcatctctgaatctgatgctaattttcgtggttaacaaattcaaactagtcaggaaggctcacgatcacttcaatcttgtttggtttcccgtatgtcatgaggacttgctccaagctcgttctctccaactcggattcaatccagttatggagatcaatcttggcgagttcgaatatttaatttccgatattcctgggtttttttcccttccactttatcattgttcattagattgatttctaatcaccgattaatcacatgtgatgttgcggcattattgctgtcgacaagtggcttcacctccatggttggtggactccgccgccatgggagtcttcgtcttaaccgccggccgccttcacctccgccaactagtgtttttgccttcatggctagcttataatgccaccgactagtgatcttgccttcacggctggcctattaagttgccgttgatgggcgtcttcgtcttcacagccgaccgccttcgcctccgccgactagtatcttcgcttttactactgccctattctgtcgccgactagtaatctcaccttcatggctggcctattacgttgccgttgatgggcatctttgtcttcaccgccagctaccttcgtcgctgcagactggtgtctttaccttcacgattggcctattatgcccccgctgatgggtgtcttcatcttcactgccgtccactgctgactggtgcctttgcctctgtggctgcatgatttcatcgttgctatgcgtcttcatcttcaccgcccgcctcctttgccgccaccgactagtgacctcgccttcacggctggcatattacgttgttgctgatgggcttcttcgtataaaccaccggccgcctttgcctccgctgactggagtcttcgctttcaggtcctctcgatcatctgccgttgatttgcatcctcgcctccacggttggtggactgcgccaccgccgttgatgggcaacctcgtcttcactgtcggtcgcctctaccaccatcaattggtcttctcgcctccatggttttgcgactttgccgtcattgcttgataactttatctttgccgccggccgccacaactgcttctacggttggtgtcttgaacctgtctaaattattgtcttcacatccatcaacttttagtctcatgtgctatccccttttattattatcgatttcctgaatcgagggtgcgtttggtgggaaaattataaagagggaatggaattttgagatgcggttgggggaattgaggagtgaccccttgctttttaatacctgctttggggtgggagttgggagactatctcagcccttgatcatcacaaaaaatctagacccatcgaatctctttagaaattctaggcattcctagcaaacaagggatcgagactagggtcctatttaatttgtaatcaaaacattcgaatttttgagaatttcaatccagcagagaaaaatatattatgaaggcatttgatacaaaatatttaaacttttatggattggataatcgtattgagattttgaaggatagttagtatgagctccaacctgcctaattaaataccatccctataagtttttcctgtgttctgtaaccttatattttttttaaaatcctatggtttttcatgtgttttataacattgtattttgcacttgtatttctcttaaaatcctatgtttttctattaattcgtttttttttccaatcccactttttaaaggagaataaaagaaaaaaaaatcttgcctacgaccaaggtgttgagacttgagcgttctgtctgttgcccgttgacgagcttaggaattaggattaaggtgtcaagagtcaactctagcaggcatggtttcctagagagaggtcttcgttgctgcctatcgttcttgtgtgtcctaaaaaattcgagtggagagggaagaaccagtagcgctagcgcaagcagattgtggttggcggccatggagaccgcggtgctgagcgccgtgctcagaacgctggggccgaagctctacgcgttcctccgtgacgggcacgacctgttgcggcgggacctggagcgcgacgtccactacatccggaacgagctcgccatgatcgccgccgcgatcgaggagcacgaccgccgcccgccgcccgccgcaggcgacgtgcggagcgcctggatccgcggcgtgcgcgacctggcctgcgacatggaggactgcgtcgaccgcttcgtgcaccgcgccaccggccacggcctggcctccatgggcgcccgcgccaagttcgccgccgtgatccaggagctcaggaggaaatccgaggagctgtcccgcctcagagccagttacgccgccgccgccggcgagcccagctgctgggtggctacaggatcatccgcgttgaccctgccggcgtcgtcgtctgaggcgcacacccttgcatctgacatcgtggggatggacgggccccgggacgagattcttgagctgataggggaaacccagggccagctcaaggtgatctccattgttgggtttggtgggttagggaagacgcttcttgccaggcaaatctacgagagcgacgccgtcgccgcgcaattccatccacggatttgggttcgtgccgcggggaagaacgcagaggatgtcctcatggacattctccagcagctggggatgccggtacatcactgccatgccagcaatctcgttgtaaatctcagaaattgccttgaatccaagaggtaagaaaccaaccactgacatgttcaactgttgttactgtttgttaccaaatcaatctctgttgtgtgtccttcatcctacaccttttgcggcctctgaaagcaattgcttccaagaactacgagggattgaggagcactagagttgtttttcttgatttgttttatactcaacttaaacgaagtatcagaaggtacaacgtattttagtactaatctacatttcagtcatacagagtaaggtgagtacaaaaagttagccctcaagtgcagaaagaatcacatgtatgcggtatccctcaagttcagtttcgccttaatccgtgtgatagaaagccagaataggagtaaacaaaagatgtatgaattgctgtgtgcatgcattaacagttctgatttccctgtatatgcatcacgcatgtagatctggtcaccttattgatgtagtttttcagaaaactgtcctttgactctgcaccaagtgacccattctgaatgcttattttcaggttctttgttgtaattgacgacatgcagagggaatattggaacagctctttcagaaatgcctttccttctgatacgggactgagcagcattgtgatcgtaacgacggccatccagtccatagcaaatgcctgcagctctcgcaacagccatgtgtacgtgatgagaaccctgaatgaggaacactcaagacagctattcttgaaagaagcatcatggaaagattacccaccaggttcagaagcaatcctgaagaaatgtgatggtctgccgcttgctctcgtcacaacagcccaattcttgcaaagcagatgtcagcagcagcctctgggatgcgcaaagctgtgcgacaacctgggtaagcatcttgtgacagaagacaccttagcaagaatgaagcgtgtgcttgttcaccattacagcagcctccctggccatgtcatcaaggcctgcttgctctacctgggaattttccccagtggtcatcctgtcaggagaaaaactctgataaggagatggtcagctgaaggattcgtgggagcagaccatcaccggagctctctagatgtcgccatcgacagcttcgaggagctcgttaaccggagcatcatccagcctgttgatgtgagcagcaacactgaggtgaagacctgccaaactcacggtatgatgcttgagttcatcctgcacaaatccatatgtgacaacttcatcacatttctgtacggtcaggctcgcctgcctgacaagatccgttgcgtttccatacaacagaacagtggtagtaagaccagagtggattcagacattgatctgtcccttgtccggtctctgacgatcttcggaaaagcgcacaagtctttcctgaatttctccaggtataaacttctccgggttttggatctcgaagagtgtgatgaattggaggacgagcatctgaagaagatatgcaagcggttgcttctcaagtacctaagcctcggccgtggaattacagtgcttccaaaggagatcgcaaagctgaaatttcttgagacgctcgatttacggcgaacggtgattaagtttcttcccatacaagtgctcgagctgccatgtctgattcatctgtttggagtgttcaagatccaagatgctgaccagcaaatgaggaagctcaaatccttcctgacggagaaaagcaagttggagacactggccggatttgtcaccgataggtgccaaacatttcctcagctcatgaaacatatgaccaacttggcaaaggtgaaaatatggtgcgagaacaccgcagatgccagcagcagcagcaactctgatgttcacctgtcagaggccattcaggagttcatccagagaggcacagatgtgaacgatgtccgatcactctctctcgatgtcggcgaatgctcccaagaatttctcaacttctctttaggagattcatgctacctaagctccctgaagctgaaaggaaacaagatatgcaggttgccaccgttcgtcacctcgctggccgttctcactgatctgtgcctctcatcctctgatcgcctcagctctgatgttcttgcggccctgagcaacgtccgcgcgctgcgttacctgaagctgatcgcgcgtcacctggacaggttcgtgatcgaacgcggcgatctgcagagcctgcgacgcctgcacatcgtggtggtgtccatgacgacgatgagcaagcagcagccagagatccaggagggagccctgccgaatctggagtcgttccatctcctctgcaaggatctggatggcccctgcggccatggaggcatcaggatcgactccctcgggctcgggtgcctcagggagattgttcttgacgacggagttcgtgagacggcgaaggagcagtggaaggacgcggcgaggcggcacccgaagcggcccaaggtggtgttcgtcggagcgggagacgtcgtcgatcggcggcgggtgggtgctgctgctgctgccgcgcctgcagcaggagagagcaattctgcgatggcaccggcggcggtggcttcggtggtggccgccggcgacgtcaagaggccggctagggaggaatccgatatctccgccgcgctggcgagccttccggcgaagatggcgaggctgctcggcgctgcgagcatccaccagagtagtgggactcagggcgagctgtcctgcggcgggaacggagcatcacagcgccatttcagctagacagagatacagagagcatagcgtggtaacgggtaactatctctgttacctctgttccatattacatgtcgtttttagttatattctaagttgaacttgtatagttttgatcgagttacatataaaagtaaatactactccactataagagcaggtacaatagcaaattataagctagctatacacatattttaagaagataaaataggggagagaaaagcagtcggctacatatttgtagccagctatagtatggactctgagacacattgtgtgtgtatgatagatgagaccagatttaatagggtagtatgtaactgttgtatgaattagctattaaattaactatagatgatttaaagctattagttggctatactattaaacttgctctaaaacatgttaattaaaatccactataaaacatgttgttctgatagtgtatttatttagtattggagatgttaattattttttactgtataaatttgctcttaaaaataaatttgaccgagtataatactagaacacctcccgttgtggaactaaacctccaattaatgtaagcatctaggaagaagaatctttatttctttaattcagcttcacaagagaaagttacactcaacctgagtacctgacgttttatctgcgcttccgcaacgtcttatttgctcacggattacatatgactgcaagtacatacacatttccaattattaggcaacagtaattactcactaattggccttggttaggcttatttacgtgttctaattggtgataactagagacatatttaattattagtcattatttctagcttttgagagagatgatcccattctggatattccactgcatgctccagtggttgttgacgttcttgtaagtccaataggcccatccgaaggtagctcgtccataaacatctagctgggcttgtgcaaacctctgataatcctggttagatgctccctgcacattccactcagccacccactctcctgcatatataattaagcaacatatatgtatcgatcacgttcaagaacttgtaatcttcatgtataaacagtactcactccctctctaggttggttgaaagtaattgtcattttggatatggccaatattaaatttcaagaatttcgactacaaatatcttctaaaatatttttttcttctgaatatgaagaccatatatataaattaatcttaaaatacactttaataaaataatatatttgttaatatttacatatattgtagtaaaaaatactgattagaattatttctttgagaccgtgtcctccaaaacgacatttactttcaacatgaagcgagtgctccatgttgaaagtaattaaattcgctagagaaacttgcaaatgaacttacccacgaacgtcagcggcccattcggccttgtgacggtgctgagttcgtcggagcggttggtcctgacgtagtcgatgttctggtcgacggtgaggccgttgaagctgctggtgaagaggttgtagtagtggacgtcgaggacggcgccggggaagccggcggcgaagccgaggagctccgtgttgctggcggagaggcggttggacatgaccacgtacgccgtcgaggtgtacttgcggacggcgttgtagccgtccttgtagtatctcatgagagccgggagagtcaccccgggtgccagtggctcgttcaggagctccacggccaggaggctggggctactcgcgtatctgtgtagagtaatttaattatttgagagtaaagttcagcaaactataataattatttgaatgaaactatcatttcgctacaactttagttttgtgctgtatttcacaacgggtttatcatacaactatgagcaattttacggtccttgaggaggtaagtaccattttttctattgtaaatttggtatctcatggtacctcatggtacctaggtacgatgatgtaccatgaaaattttggtacctcatgatatctccttaagaaccgtagaattgctctaaaactataactgtatcccctagtggttgaaccatctttcggattgtcatatactccctccgtttctaaatatttgacatcgttgattttttagcacatatttgaccgttcgtcttattcagaaacatatgtgaaatatgtaaaactagatgtatacatataagtatatttagcaatgaatcaaatgatagaaaaaaaattaataattacttaaaatttttaaataagacgaacggtcaaacgtatttaaaaaagttaacggcgtcaaatatttagaaacggagggagtatactattattatagacttacaatcacttgcagttatttggaatgacaagcaaaaattgcagcaaactaatagttttgaaaaaaaaacttatagcttactaaaatttactgtttattttacaataagtaaattaaattaggacaaaccattcatgattaatggaaattcctcgtattttacttccgaagagataatggataaactagacaagacaaattaaacctattttgtgtagtgaattgaaatatctatgtggaataattaaaattgtgacctgtgtgtgaggaaatcgatgacttggacagtttgggcgatgttggcatccgtggtgccccagtcctgtgaaccatctctggaggcactgtgctcaaacgggttctgcgacccaggtgcagcgtgcaggtccacaatgactcccaaattatacttcctgcaatgtacatacggaggacacatgcatagaaaatctctgtcatttgtaaagtacaaccatctatcaagggactgctcattgtcctgattccaaaccaatttattcttcccccaaaatcaaaattgttggagacagagaatttaatcatacttgacttatgctggaaattaaaaaaaatgagcatatgcttttaattttgactaaatatggaacaattatacacttactctgcccatttgaatgcattatccaaggcttggagggatcctccaacgaaaggagcaggaggattggggtcgctagcaatccaccatccaactggaattctcactgcgtttagcccacttgttgatatgaacttgaagtcgctctcaactatgtatgtgcgccagtgttcctgcaaaacacaaaaaaataggatatatacttataatttgtacatgtgcaataattaaaaagaggtggcaatctgcctgttataaaaaaaatttgcatcaatatcacgagatatgtaggtaattctcatcaaaatgcaaggatttctgtgtgcttatctatatatatatcctggctgtcatttgttgactagtactacctccgttttttaatagatgacgccgttgactttttctcacatgtttgacccttcgtcttattcaaaaaatttacgtaattataatttattttgttatgagttgttttatcattcatagtactttaagtgtgatttatttcttacacattggcataaaattttttaataagacgaatagtcaaacata

SEQ ID NO: 6533 - DNA, 1635 bp, Oryza sativa
tcatctattaaaaaacggagggagtatgatttatatataagaaaatagagcgagccccaacattaaaccatagtcagcctaacattggaaacactcgcataacatatattgtatatataaaaacatgctctaggtaaacataataaattatggatctggcaatattgtatgatctgaaaaataggtacggtaaattgtatataaaatattgcgtacctttgtagatacatgccggatgtatctacgaaattaatatattaatttaaaataattaaactagtaattacctttgtttgtgtactgattggtctgaatgcaagcgtcatgtgtgttgatgtgtcatggagtcgacctatctctgctcctgcatcatgcttgtgtagcccaattggtttcttcggcacagcatcccgtcgtatccgagaacaagtcaaaactcaatcatgagggccatcggacttggtcggcggtggtaagtgtgcatgtataaaccagggaacaataaaaaacacatgagcagtactaaaagaacgagaccgatataactatgattacaaccagaagtagaacggttaacctgctgacggtagattaattttaagatttcggcggcggacgtatgctcgggagtggttggaacggaccgagatctcgtggccgacaatgctaaaccgatgtcctccgtgatatctcccaaagccaaagtcgagagattgttgtcgggaaatccatttcttaaacccatctcgtcaaaaccttgaagcaccaaaaatccccctacctggcgcgccactgtcgacccctacctggcgcgctactgtcgacgtttcatatcgcgactacggtatttgcatagtatgggaatcgttggtaccagggtatatgcgatattgaagtaaaagagacggagacaaggatttttatataggttcgggccccttatctgataggtaatagccctacgtcctgttggccgaagccggtgttgctctttattcatcaggatcacacaagtacaatatttgggataacatatttagttgtcgtcgacttggcggctagataaccaacttgtagtcgatgacatgatagtcttcctcctcgaatccgcactcggcgtgatcagagatagtgctagatccctcttgccggcctccgtaggaaccggatggggtatgtctatgctaatctctgatgttgatatccggcggcatgtcttggcttgtattgatctatgttgatcttgtggcttcccccctctcctcctaggggggtttgtatttatacccatagatgcccccttgtccaagtaaaactagggagaccaatatggatacaatccgagtagtccttgtcgtttccatacagaactctacttgttcttccttatccagaactccttctatatacgagatatgattccgtataagacttggtatatggtgggtatgtggtatccataaccttgacagtagtccccgacttcaatgcaaatgaacgagttaagtttctcgatcgaagactttagaacaactattgttgtgctcacttgaccgttctcggtgtgatcagaaataacgcttgattcctcttatcgacctttgtaggcgctatattagggttgtctaggttaat

SEQ ID NO: 6534 - DNA, 16999 bp, Oryza sativa
  unsure (1)..(16999): unsure at all n locations
gggctccatcaatggcgccggcgggattaggggaggggttccaaacgaatccaagggagagagggagggaaaattggggggaaagggagagggaatcacggggagtatttccccccactttattgcacgcggggacggcgggatgtggcggatttggcggcggcggcggcgcttggcgcgggcggagcggcgggagcggcgggaggtcggggatgacgggtgggccccacccgtcagcgagggtggcgggcgggcccgcccgtcagcggcgcgcgcatggggagggaggccgactgggccgcgggggagaggagagagagagaggggggagagagatgggccgggccggcccaagggaggggagggggacttttagagtttttctttttataaaactttttcaactttgtttatttcttaacaattattatttgtgctctgaaaattccactaaaatttatttacacattttaggcttttagaaaatacacaaaaatcctctaagccttgtatgacttttactttgcacattttaatttttggaggctttcacacggattttaattattctagacataatttagaggatgtattttagagtcgttttgggacgtgacacatccttggctggcttcttctctccccccgtctttggcttgtcgttcttgcgtctcaatgcgtcgtccgcatgagcgcatcgatcggtgacctcgaacaatctttgagtagttgtgattcgccttgttgccaactcctgagtagtatagcgatctctgaccccggttttgaaaaagcgaatcacagaggcgtcggtgatttcggggattgtatttctgcactcattaaagcaccgaacatagtccctcaaagattcgcccggattttgtgttaacgcgtgtaggtcgtcttcgatcgcgtggcgcttgtaagttccttggaagttagcgacgaattgctgccacagatctgcccatgaagaaatcgagtagggcgggaggtgcatcagccatgaacgcgcagaacctttcaacaccatcggcaaatagtttgctaacgcgttgtcatctgctccggcagcgtatagtaccgtggagtagacctaaaggaattcttctgggtcggtactcccatcgtacttctctattgccctgggtcagaatctctcaggccatcggacatcacgtagggaacggttgaaagctccacacccgacgctgggggcggtgggttgtcggcgatcgtatgtcctccgtggatatctatcggatgacaagaatgaaaaggatgatgatgatgacgatgggtcactcggctccggtgtccgattccgaggacgacgttcgggttctcaagagttctgtcgtcgtccaccattgttgtcctggcgctgatccccattatcatcgtcgtcatgtcggcgtcctcgaccagtatcgtccggcgtccgctgttcgcgatcatcgcggtcgtgggggttgtgacgattatcatggtgtcggtcttcgttcgagcggcctcctcgttcttcgttctcgcgacgtcgtgaagagacacgatgtcgggagcgattctcgttgtctcgcgcgcgtcctgcttctcggcggccattcagatggtcgcggagatcgccggtgccgcgaggtggaggggtagctcgtctaggcgacgtccgttgctccggtggttcgccgtcggcaccgccagctatcggatgttctggttgtgctctggtagcggcctcctcgaacgcgttactgagattggctaccgattcctgtagtcgttatgtccatcatgcgagatcatcgttaagtacaggatcatagggggtttctgtcagtattgcgttgatggtgccgaggtgttgggccggtgtgaccgcttgattctccgcctctgcgttagcgtgtgcagacgtgctggtcccaccgatggcaaatacgtcgcgtggtgtactggaggatgatgagccatagtcttcgagcaagtgtaggactgacgactcgtggggatcgatgtcgattactccaatgaatcgatccgagatcaacgtcgctccttgttccttgtctgcatccttaagagagatttttgattgctggaccttaggaagcggcgtcttaatggcgcagagaaggaccttgtagcttgagaagtcgtgattcttcatcttgtgaataggacaatagacatcacgagttagagaagtacgctggattccatgctctttgcaggcatgaatttcagcttgtacgttgagaaaaacccagcaagcttgcaagttgtgtttcctggacttgtggataggacactagggctttgttatctcggaagttgtccttgtcggctcgtggttcttgtcggaaggacaaggtttggccgcactaggaaccttctcaggctcgtatgacgtcgacgtttcgttctccgctacggcgggaggatccttcgacatggagttgcccggggttatagccacggcgttctcatttccggtcattgatggaccagccgagataggtaccgtggtgtaaaccgggaagacgatttcgtcgacttgagtccacactagcattgttgaagtagggactccttggatggggccggtgttgacgctgttgtcgatgaagcttgatgtcatagtagtagaaccttgagcaccaaggccccctacctggcgcgccactgtcgacgggggttacccgtagaccggatatagagggtattgggatacgctggtatgaggatctacgtagtacgacatcaagaaaacaggagacaaatattatactggttcaggccccttgataggtaatagccctaatccagttggtatgggattatatagtggaaaccacaaattacaaagggaataacagaactcgatgataccgacgagatcgtggtcgagttagttcgactagatcacccggcgacttggctcctgcaggctccgacttcttaggctatggtggttgtcttggctatcagattcgatgccttaggtcctcccggggggtcccttttatatcgcaggtctctctaagtaggactcggagacatcagaccctgcacgatacagtgacgacctagtcctatacgggtaggaacctttccattggtggacttcgtgatgaatttccttagcgtatacagagaacgtccgtacacgcgcagatgtaccatattgccgtatagcgtacatccaatggtagagggtataccttatccgtaaccctaacactaacaatttgggaaacgttctaacgaaaaacgaggaaattgtgatttggagttgtagtttagaactcaacctaagatggtgtttggatctacctcattccatcttctactatctcattttgcagaagcatgtttttctaactgataaaaggtgtgccttttaaaaaaattatagaaagattattttacaaattttcataattttttttagctaagactttcttgggctctagcatgcagcacatgtgtacagcaatcgccgctttcagggcacaagctagagagccgagggtgtgttacaagcggcataaagttttggtgtatcacctcaggtattatatagatctaggaaggtagccggggatgtattgtacacagggttaaacttttcggtttagacgatttgatcggcatcaccgaaataccaaaatttcagtctgaaatttccaaaaatttgaacaaaatttagttgaatttaaacaaatattaccaaaattcatgaaaaattaaaaaaatgaaaaatttcggccgaaataatagcctaaaatattgggtccaccgacagtggcggatctaggatttagaatatgggtggtccgacctaattttttttttctaaacatactaaatctaacgatggtaatatataccatgcaagtatagataatagaatagaccaaaagtgtatcatgctatattaataaagcatcttaaaacatataaaattagtaattacctaaaattttgacttaaagaagcttacatggctataaaagttttaaaagaattgccatactaatttttcttcttattaggtctacgccttctgttggaattaatggatgggccttagcccactcgaagattaattctttggaaaatcacaaaagcccacctcatgggatggcatgcatgtggagtttagtaccaccttgcttattctaagagagggggacctccttaaaagggaggatgccctcctagccacttgaagcatgtgtggtggagagaagagggggaacacacgcgcgcgctcgctcgcctcgcctcgcagggcaggcggcgcgtgtgcacgacgtacgcgtcgaatggtccgccaaaaattggttcctcaccttgcgcagatgcagcctccttttgcagttttgttttgctgcaaattcggattcgtttttgttttcgaaacgttccgaaaaatccggtgcgtgaaaacggcgtggagtccggataagttacacgtgacttatccggtttggttacgcacagtagagatcgtgcgggcgccctgatcaagcgacccttctctatataaaccgaccagccgtcttcacgcaacacacaaaaaaatcaatctagggtttgcctccaactctgtgctgcgccatcgctcatagattactccatcccgctcgccggcgtgcaccggcgatcgggagagcaggtctccggaacctctgccttcgacgtcctgcaccgggagaaggcggcaataaggtttttgggaagcgctgagcgcgactgctccctgttcgtccgcgacggctcgtcttactcttcgctcgcgtgctgcgcgccttcatagacgcctgcaatcgcgaaaagttcctgccgagcagccggtctttctaccacctcggtgcgtgttcaatatgttgcgcatatttgatctgttcatgttttactgcttagtttacatgtgtagatctaatgatgcgttaatgctagtatacatctgcaatgccatgatttatttatggaatatattaaatcattatatgcctttaatctcaacaatccaaaaaccttattataggcactgtgattttactatggctggttttgccgatacattgaggccggataaattcaccggtgtgcactttaagagatggcagatcagggtcactctgtggctgacagctatgaaatgcttctaggtgagtactggcaaacctgaaggagttcttactgctgaacagcagaagcaattcgaggaagccactactctctttgtgggatgcattcttagcgttcttggcgatcgtctggtcgaggtgtatatgcatatgaccgacgctaaggagttgtgggatgcactgaatactaaattcggtgctactgatgctagcaatgatctgtatatcatggagcaatttcatgactacaagatggctgacaaccgttctgtagtcgaacaggctcatgagatacaaaccatagctaaggaactcgaactccttaagtgtgtcttacccgacaaatttgtggccgggtgcattattgcgaaatttcctccatcttggagaagtttcaatactgcactcaaacacaagagacaggaatactctgttgaagagttgatagcgtctcttgatgttgaggagaaagctcgggaaaaagatgctgcgtctaagggcgatgatgggcagtccagtgccaatgttgtgcacaaggcccagaacaagagcaaggggaaatacaaagctcagcagaccaccaacttcaagaagcagaagaacaacaacaacaatcctaatcaggatgagaggacttgctttgtgtgtggccaacctggtcatctggctaggaagtgtccacagcgtaaggggatgaaggcacctgcagggcagacttctaagtctgctaatgtgaccattggcaacactggagatggaaacgggtatagtaatttacctactgttttttcagttaatcagtctaataattggtgggttgatactggggccaatgtacatgtttgtgctgacatctcattgttttcttcttatcaggtcgcacggggttccaccgtcctaatggggaatgggtcgcatgcttctgttcatggtgttggcacggtagatctgaagtttacttcgcgaaagatcgtgcagctgaagaacgtgtagcatgtcccttctatcgacaggaatcttgttagtggctcccgtctgactagagacggatttaagttagtttttgagtctaataaagtagtcgtgtctaaacatggatattttattggtaaaggttatgagtgcggaggcctgttccgcttttccctttctgatttctgcaataagtctgtgaaccatatttgtggcagtgtggatgatgaggctaatgtctggcactcacgtttatgtcatattaattttggcttgatgtctcggctttccagcatgtgtttaattcctaagttttccattgtcaaaggttctaagtgccatagttgtgtgcaatcaaagcaacctcgcaagcctcacaaggctgctgaggagagaaacttggcacatctagaactcctacattcagatctttgtgaaatgaatggggtgttgacgaagggtggaaaacgatatttcatgacgttgattgatgatgctactagattttgctatgtgtacttgttgaaaacgaaagacgaggctctagactattttaaaatttataaggcagaagttgaaaatcaacttgacagaaacataaaaagacttaggtctgatcgtggtggagagtttttcttatacgagtttgacttattctgtgaggaatatggcattatacatgagaggacgcctccctattctcccgagtctaatgggattgccgaaaggaagaaccgcacactgactgacttggtgaatgccatgttggacaccgcgggactacctaaggcatggtggggggaggtattgttgacctcaaatcatgtgttaaacagaattcctaacagaaataaggacaaaacaccatatgagatatggattgggagaaaacatcactttcttacttgcgcacatgggggtgcttggcgaaagtcaatgtaccaataacgaagaagcgcaaacttggacctaagactgtggactgtgtctttctgggatatgctcaccacagcattgcctataaatttttaatagttaaatccgaggtacctgacatgcatgttggtacaattatggagtctcgtgatgttaccttctttgagagctttttcccaatgaaggatacacatagtaattctagtcaaccttctgaaataattcccagttcanttcaccacncnaacccnccnaaaggnnnaanaanccaanaannaanntnntngnnananntnantnanncnancnantngnnnananncnantngnntncnanncntnngnnnagnngnnaagnngnnnantngnnanttanngnnttgnannangnncnntncnntcnntttcgnanagngnaagnntaaananngacaatagganncgactaagtcttttggtgatgatttcactgtgtacctcgtggacgacactcctaagtcaatttcagaagcatatgcatctcctgatgcagactactggaaggaggctgtccgtagtgaaatggattccattatcgctaacggaacttgggaggtgacagagcgaccctatgggtgtaaacctgtggggtgcaagtgggtgttcaaaaagaagctgaggcctgacagtaccattgaaaagtacaaggctcggcttgttgctaagggctatactcaaaaagaaggtgaagatttctttgacacttactcacctgttgccagattgaccacaatttgtgtgctactttccctagcagcctcacatggtattctcgttcatcaaatggacgttaagacagcttttcttaatggagagctggatgaggagatctatatggatcaacctgatgggtttgtagttgaaggtcaagaagccaaggtgtgcaaattgttgaagtctttgtatagtctgaaacaagctcctaagcaatggcatgagaaatttgatagaacattgacatctgcatgcttcgcagtcaatgagacagataaatgtgtatactatcgccatggtgggggtgagggagttattttgtgcttgtatgttgatgacatactgatatttaggacaaatcttgaggtgataaatgaggttaaatcattcttgtctcaaaaatttgatatgaaggatttgggagtagctgatgttatcctaaacatcaagctaattagaggtaagaatgggattacactcttgcagtcccattatgtggagaagatcttgaatcactttggctacattgatagtaagccttctccaacgccttatgatcctaacttattgcttcgcaagaacaagagaattgctaggaatcaactggaatactcccaaatcattggctcgctgatgtacctggctagtgcaactaggcctgatatctcctttgctgtgagcaagttgagccggtttacctctaatccaggagatgatcactggcgtgcgcttgagcgagtaatgcgctatctgaaaggtactatggaattggggcttcactattctgggtaccctgcggtactggaaggatatagtgattctaactggatctctgatgtggacgagatcaaagccactagtgggtatgtcttcacactaggtggtagtgctgtttcgtggaggtcttgcaaacagaccattttgacaaggtcaaccatggaagcagagttaacggcactggatactgctactgttgaggcagaatggctgcgtgatctattaatggatctgcctattgttgaaaaaccggtgccggctatccttatgaactgtgacaatcaaacggtaattgtcaaagtgaatagttctaaggataatatgaaatcgtctagacatgtgaaaagacgattgaagtctgtcaggaagttgagaaactccggagttataacgttggattacatccaaacaactagaaacctggcagatcctttcacgaagggactatcacgaaatgtgatagacaatgcatcgaaggaaatgggtttgagacccatgtgagttatactatggtagtaacccagtctatgtgatcggagatcccgtgaattagatcctgggaagaacaaaccattagtaaactagaggagagtaccgatatataccctctctaagtaaagatgcatgtactcttgtgagctgcaaggcaggttgactataccttaatgagttctgttggctttaattagcgaagatgctgtcctacagagcattcttgatagaactcacctttggtgagcttgactgttggtcgcagtctatgaagattttgggtgattcttctataaagcttactaaagacctaggagtatgacttatacgctccactcgaggggtagtctacagacggtctagtaccagataagattttgagtgaaacttgcttgcacaagacttgtaattcaaggcgtagtccattgttcaagttgtgagtaagtgtagcttggagttctagatggatgttcaaccttaatcggtctccatcgaaccgctggtatataaacagtacattggaaaaggcaaatctcagtgggattttgagatttggtgggggattgttggaattaatggataggccttaacccactcgaagattaattctttggaaaatcacaaaagcccacctcatgggatggcatgcatgtggagtttagtaccaccttgcttattctaggagagggggacctccttaaaagggaggatgccctcctagccacttgaatcatgtgtggtggagagaagagggggaacacacgcgcgtgctcgctcgcctcgcctcgcagggcaggcggcgcgcgtgcacgacatacgcatcgaatggtccgccaaaaattggttcctcaccttgcgcagatgcagcctccttttgcagttttgttttgctgcaaattcggattcgtttttgttttggaaacgttccgaaaaatctggtgcgtgaaaacggcgtggagtccggataagttatgcgcgacttatccggtttggttacgcgcagtggagatcgtgcgggcgccctaatcaagcgacccttctctatataaaccgacccgccgtcttcacgcaacacacgaaaaaatcaatatagggtttgcctcctactctgtgctgcgccgtcgcttgtagattactccatcccgctcgccggcgtgcaccggcgatcgggagagcaggtctccggaacctctgccttcgacgtcctgcaccgggagaaggcggcaataaagtttttgggaagcgcttagcgcgactgctccctatttgtccgcgacggctcgtcttcctcttcgctcgcgtgctgcgtgccttcgtagacgcctgcaatcgcgaaaagttcctgccgagtagccggtctttctaccacctcggtacgtgttcaatatgttgcgcatatttgatctgttcatattttactgcttagtttacatgtgtagatctaatgatacgttaatgctagtatacatctgcaatgccatgatttatttatggaatatattaaatcattatatgcctataatctcaacacttctaatggccatgaaagtgttcgttatatcttcttcctccacttttaagaaaacatcccgcttaatgaatgtgactatacaatcatccaaaagctcatcacccatcttatttctcaaccatcattaataaatgcatcagttctactataataatttaataaatatcacaatgcacatgagtaaagagttcaaaatttcgaaactgaaaattgaaaaaaagtaaaaagtaaaaaacctttttttttggcctggtgcaggactgcggtcactgcgggcgggcgttggcggcacacgcggcaggtctgcagcagtgcgctagtgcggcactgcggctgcggcggcagccggccaaggcggcggactgctgcaggctacggcgccagtgcggcagtgggctgctgcggcgaccaagccggccaaggcgcgcacgcgtggcccggcggcgctcgctctcacgatctgatcagatcgctgctcgcgttggcgtcgcgactcgcgagggcgaggaggggagagacagagagtcctgcgatggcgcgacgcttcggtttctgaattccaattgattagatacaccgtacacgcgcgtgaggggtggggcctgtgggcggcgggcgctggctcgatgtgcctcgctataaaaatttaatctaataatttaaaatatcgggttcaccaatttaactgaaaatcgaaggttagatttgatatagccacgtggtggtctaggagcatttgtagaagtattagatttgatagagccacgtggtggtctaggagcgtttgtagaagtcccacgtgatggtttgagagcatttttagaaagtttaatggacttttagtaaataatagatttaaaatatcgggttcaccaatttaagtcaaaatcgaaggttagatttaatagagccacgtggtggtctaggagcgtttgtagaagtcccacgtggtgatttgagagcgttttgtaggaagtttaatgaacttttagtatataatagatagatagatttagtatataatattcaggcactagtaaaacaaattaattgcagaatccgtcactaaaccgtgagatgaatttattaagcataattaatccatcattaataaatgtttactgtagtaccacgttagcaccactttgtcaaatcatgaagtaattaggtttaaaagatccgtctcataaattagtcgtaatatgtacaattagttatttttttaagcatatatttaatatgtttaaacgttcgatgcgatgagaaatttcggttgggatctaccctcaggcaagcaacggcataaataaggcgacacatcccaagaagaccaccaggggaagcaaaggagggttcatggttgcgggtcagaaactcagaatagaagaagattgttccgtggaaaaaagaaaatagaagaagaaaggtatggaggatctagtactagtagtgaaatcaagaacgtcactccctatcgctttctcttctccccgaaggaaggaaagaaacaatccaatcatattatagctagtatccaatattcttgttgtctttcaccttttggtctaggttgtctagtgcttgctattcttctactagtagtattataactgggttgttcattatttgaagattttcttttcattggggggaccgggctagaacgatttttcaccatctttatctggtcggtttcatgataaaactgtgaaaagttgtgtcttcttccaaagctgtgtgggtatggaagggtttgtacgaggagagcgcatggagggtttgggggaaagaagaaaagattcacgccttcttttgccgcggcgatggggttttgggccgtgggcggatgcggccgagagagagagacctcccgcgcggcggccgagagcagccgaggcaggggggacggccggcggcggcgaccacgaagccgtcggtttgttttgttactactccatttctgttccccctccctgatcaagtaaactagtttgtaggatcgcatcaactcggatgaggaatttttgccgattagatttagttttcaagctggaaatatggtgattcacgggcctttttcttgtggtggttgtcgttgttgttcatgccatttttctgaagtgaaagatgaacaaaaatttccactgaaaagtaatattttgacactgcaggtttgttgaaaaacgatgggcacatcgtgcgaaagatgcagacggcgcgatgagcaggactacaggaatttggatgatcccaaaaacacttcttgctaactatgatgggtgattttcaacatgagatggtaagccaaatatttttttttatgaaatgcaatgctgcttcttttcttttcccttgccgtttgtattttttttttgtttctttgcttcttacaagttctgtttggtacaagcatgatcttccttgcaaatttcaataattcggtgactagattgtaccctcttaaaagaaacaagtattgatgcccggatttaagccaataatatgataccacattaggtttgttggttagcaccagatgtaatattttaaaaagcaagaaattaggcttttcaatttcgtcagtttgttctgtagtcacatacagaaatcagggcctaccctgagatttttgtggcccagagtggaactaaaaagagaggccccacattgaacataaacatgaaaacattaatataaatatatcaattgcaaagatcgaattatgtgcatgtactgaacgactgatatacatttaaactaacaccaaaattatgtgaacaaactgtagcaatgaaagaaatagcctgcaaacaacaaacgagttcataacactgaactgacatatatttaactacttgtcatttgggaaaaaaatcacagcggaattagcgctagtgactcatcaataacatgccgcaaaaaatcataattacttgttatcccatgcatttcaactttgatgttcatacatcacccagatctcatcagaactacacagctccacgctggtagcatcaaggtgaagcatgcgttatattgtagcattctggtttgggctatctattgccttcatagtgaggaggagaggaaaacatagtagagcagctagtatatcataaaactatattcaaactaacaccctcaaaaatatgtttctgcagatcattccaaaagaatttgtgcagcgtttaaagggtgacatccctggagaaatccaactggaaacacgtaacagaaacagtcacactgttagagttgacaagacccaagaaaaggttatctttacagagggatgggcacaattcgtcaaaacctttgatctgcagatgggtgactccatgatgttcagattcaatggaaattctcagtttgatgtcattatagttgatcaaattggccgcgagaaagcatgttctgctgttgtggatgattctcagaatcctaatgtgcaagaaaggcgtgtagatgctactgaaacattgaacagttcgcgcgctcattctcagcccatgccaatgcagtcaactactgaaactgtgaaccattcacatgctcgtccttgtcccatgcatactgctgttgattgcatgcccctttctcatgctcatcctcaacccatgccgatgcaattccctaccgaaactgtgaaccattgtcatgctcctactggtcccatggaaatgccacttgaaaacgttgccctttctcatgctcatgctaggcccttgcaaatgcagtcacaaccaacggatagattgacacaggtgcaaagaggtaactcaagtaaaggcaacatgaccacgatgagttcctcctccatgtcatctggttacaactcaattattatatgcatttcctgataaagcacatctgatgttttcttttctttgcacacaggatattctttgtcctctaaagatcaggattgcagagtaggtgttatacctgatcccatcatcgggcaaaagaccatactaagtcgagttcaggtgaatgtggtgaagcgcaagatccaaaatattggttctcaaattccaatctttgtatctgtcattggaaagaacaacgcctctggaagaatatcctctctagtgagtgccatatttctttgtcgaatgtgcatacttcttaattatgcactatttatactggtgtttgattaccgatgaaaaagtattcttcatgttgttaattataacctacttcctccgtcattctagcatttcccacattcatattgatgctaatgaatctagatagatatatatgtctagattaattagcatcaatatgaatttgggaaatgctagaatgacttacattgtgaaacggatggagtactaagctgtaagcactgaatttacatgtgatatgcttgctgcggttgcttaatatatatgatgcagtgcctaattgttttagttataatttatttgcgatgattccatcatctcatttttctttcatgtatgcaactagagtatcgccaaccgatatgttgataattaccttcaagacgagaaaactatccgtctttcgcgtcttggggacaagtggaacatcaggctttctgattcgagtggtaacagaaggatggttggtggatgccgaaagtttgcggaagacaatgatgttggagtgggtgatatctgcctgttcgagctgttgaagaatcataaatgcacaatgaaagttcatatcatcagggcaaaggatatctgttaatcgaaaagcctgttgaatctgctgatttctctgatgactgttgctggtgcttttgtgctgctgagaatggtagtctatccacagtttatgcaactactggtactaagttgttattgaactagtacattgcatgctgattagatggtgatttcccttgctaattctctttttttgggtgatacactaggggggttcccttgctaattaatgacccatgtaattactgatacttacttttggtgcaatgcttttgtagttagttatcaactgttcaggggctgtaagcaggctttccgctgtttttttctccttcggttctctcaattatatcacggttattgctctcaaatacaatccagttaaaaaaaaaggctcttgtattttgctcctctagaattctcaaaacttggaacatcagctccttatttacgcaaatatatcgacttctatattgtctggattgatcttctctggatgtatctaggtaaatttgaatgcattatttttgtcctcttttctacagggtttaatcgtatactcatgcgtattagtgttctatacttctatgcatcttgacgtttaatcttctacttcatcggtccataaatataagcattcaaagtgtacacaaatgtaagtattccaatgtactgtcctatgaatcatctattttttcaaatttctttctatctcaccagagagtccttacttacgtttgttaatggagggagtgaatattagagatgcaatgtacgagttggaggatttgttaatgattcattttacaatgctaaactttcttaaaagtctgaaaatatatcttaaaactacaaaattggacgtcattggaccgtaaactttagagcaatgtggctggcgtcgacatggccaaatttaaataatatataaaaaatggattcaggaattcgagaaaaaataaacatggttgctcatcggagtacttagaacctacaaatttgtgttcccgattcctatattttgcatttcttctaatttcttacactctgtctatccaaacaccaattttctctctgtttttctattatattgagttttcagttactatatttttcatttattctcatttcttattcctttttatgttcctcaacaccaagcatatgaattgcaagattcgactttcgagcagtgatgaaattgatcgacaaacaggatgcacaattttagtacaacaaatggttctgaaaaaatggcctacgagacgaatcaacttctctctatcccaaaaatataaaatataaagtattttaggtggatttgacctattttatcaacaaatggttatgtctagtttcattgcaccatgatatgtcaaatccactcaaaataggtcaacaaatagttatatccagattcagtgtatatgatatatcacatctactcaaaatctattatattatattttataacgtacggagtactagctaattaacatttagtattagttacagacttaattaattacaagctatagctacattaagaaattcgattagacaagtaatcatggtcatttcaatacatcctgaattcctgatgaattaaaactctacgttgaccctgtattcggcggacttgatagcgggcttcttcttgggcgagaggccgtcga

SEQ ID NO: 6535 - DNA, 20603 bp, Oryza sativa
gccggggcgggaaacggtccggggggacgacggcggcggaccggagctcggcggcgactgcggagagagagagcgacgtcgcgtgctcgaatccggcgaggaggaaggcgggcgagaggcggaaacggacggaggaggtgcggggagggtttaaataaggttggaagggggagagggtggccggggaggaaggaaaccggcgcggcgttttcgggctccatcaatggcgccggcgggattaggggaggggttccaaacgaatccaagggagagagggagggaaaattggggggaaagggagagggaatcacggggagtatttccccccactttattgcacgcggggacggcgggatgtggcggatttggcggcggcggcggcgcttggcgcgggcggagcggcgggagcggcgggaggtcggggatgacgggtgggccccacccgtcagcgagggtggcgggcgggcccgcccgtcagcggcgcgcgcatggggagggaggccgactgggccgcgggggagaggagagagagagaggggggagagagatgggccgggccggcccaagggaggggagggggacttttagagtttttctttttataaaactttttcaactttgtttatttcttaacaattattatttgtgctctgaaaattccactaaaatttatttacacattttaggcttttagaaaatacacaaaaatcctctaagccttgtatgacttttactttgcacattttaatttttggaggctttcacacggattttaattattctagacataatttagaggatgtattttagagtcgttttgggacgtgacacatccttggctggcttcttctctccccccgtctttggcttgtcgttcttgcgtctcaatgcgtcgtccgcatgagcgcatcgatcggtgacctcgaacaatctttgagtagttgtgattcgccttgttgccaactcctgagtagtatagcgatctctgaccccggttttgaaaaagcgaatcacagaggcgtcggtgatttcggggattgtatttctgcactcattaaagcaccgaacatagtccctcaaagattcgcccggattttgtgttaacgcgtgtaggtcgtcttcgatcgcgtggcgcttgtaagttccttggaagttagcgacgaattgctgccacagatctgcccatgaagaaatcgagtagggcgggaggtgcatcagccatgaacgcgcagaacctttcaacaccatcggcaaatagtttgctaacgcgttgtcatctgctccggcagcgtatagtaccgtggagtagacctaaaggaattcttctgggtcggtactcccatcgtacttctctattgccctgggtcagaatctctcaggccatcggacatcacgtagggaacggttgaaagctccacacccgacgctgggggcggtgggttgtcggcgatcgtatgtcctccgtggatatctatcggatgacaagaatgaaaaggatgatgatgatgacgatgggtcactcggctccggtgtccgattccgaggacgacgttcgggttctcaagagttctgtcgtcgtccaccattgttgtcctggcgctgatccccattatcatcgtcgtcatgtcggcgtcctcgaccagtatcgtccggcgtccgctgttcgcgatcatcgcggtcgtgggggttgtgacgattatcatggtgtcggtcttcgttcgagcggcctcctcgttcttcgttctcgcgacgtcgtgaagagacacgatgtcgggagcgattctcgttgtctcgcgcgcgtcctgcttctcggcggccattcagatggtcgcggagatcgccggtgccgcgaggtggaggggtagctcgtctaggcgacgtccgttgctccggtggttcgccgtcggcaccgccagctatcggatgttctggttgtgctctggtagcggcctcctcgaacgcgttactgagattggctaccgattcctgtagtcgttatgtccatcatgcgagatcatcgttaagtacaggatcatagggggtttctgtcagtattgcgttgatggtgccgaggtgttgggccggtgtgaccgcttgattctccgcctctgcgttagcgtgtgcagacgtgctggtcccaccgatggcaaatacgtcgcgtggtgtactggaggatgatgagccatagtcttcgagcaagtgtaggactgacgactcgtggggatcgatgtcgattactccaatgaatcgatccgagatcaacgtcgctccttgttccttgtctgcatccttaagagagatttttgattgctggaccttaggaagcggcgtcttaatggcgcagagaaggaccttgtagcttgagaagtcgtgattcttcatcttgtgaataggacaatagacatcacgagttagagaagtacgctggattccatgctctttgcaggcatgaatttcagcttgtacgttgagaaaaacccagcaagcttgcaagttgtgtttcctggacttgtggataggacactagggctttgttatctcggaagttgtccttgtcggctcgtggttcttgtcggaaggacaaggtttggccgcactaggaaccttctcaggctcgtatgacgtcgacgtttcgttctccgctacggcgggaggatccttcgacatggagttgcccggggttatagccacggcgttctcatttccggtcattgatggaccagccgagataggtaccgtggtgtaaaccgggaagacgatttcgtcgacttgagtccacactagcattgttgaagtagggactccttggatggggccggtgttgacgctgttgtcgatgaagcttgatgtcatagtagtagaaccttgagcaccaaggccccctacctggcgcgccactgtcgacgggggttacccgtagaccggatatagagggtattgggatacgctggtatgaggatctacgtagtacgacatcaagaaaacaggagacaaatattatactggttcaggccccttgataggtaatagccctaatccagttggtatgggattatatagtggaaaccacaaattacaaagggaataacagaactcgatgataccgacgagatcgtggtcgagttagttcgactagatcacccggcgacttggctcctgcaggctccgacttcttaggctatggtggttgtcttggctatcagattcgatgccttaggtcctcccggggggtcccttttatatcgcaggtctctctaagtaggactcggagacatcagaccctgcacgatacagtgacgacctagtcctatacgggtaggaacctttccattggtggacttcgtgatgaatttccttagcgtatacagagaacgtccgtacacgcgcagatgtaccatattgccgtatagcgtacatccaatggtagagggtataccttatccgtaaccctaacactaacaatttgggaaacgttctaacgaaaaacgaggaaattgtgatttggagttgtagtttagaactcaacctaagatggtgtttggatctacctcattccatcttctactatctcattttgcagaagcatgtttttctaactgataaaaggtgtgccttttaaaaaaattatagaaagattattttacaaattttcataattttttttagctaagactttcttgggctctagcatgcagcacatgtgtacagcaatcgccgctttcagggcacaagctagagagccgagggtgtgttacaagcggcataaagttttggtgtatcacctcaggtattatatagatctaggaaggtagccggggatgtattgtacacagggttaaacttttcggtttagacgatttgatcggcatcaccgaaataccaaaatttcagtctgaaatttccaaaaatttgaacaaaatttagttgaatttaaacaaatattaccaaaattcatgaaaaattaaaaaaatgaaaaatttcggccgaaataatagcctaaaatattgggtccaccgacagtggcggatctaggatttagaatatgggtggtccgacctaattttttttttctaaacatactaaatctaacgatggtaatatataccatgcaagtatagataatagaatagaccaaaagtgtatcatgctatattaataaagcatcttaaaacatataaaattagtaattacctaaaattttgacttaaagaagcttacatggctataaaagttttaaaagaattgccatactaatttttcttcttattaggtctacgccttctgttggaattaatggatgggccttagcccactcgaagattaattctttggaaaatcacaaaagcccacctcatgggatggcatgcatgtggagtttagtaccaccttgcttattctaagagagggggacctccttaaaagggaggatgccctcctagccacttgaagcatgtgtggtggagagaagagggggaacacacgcgcgcgctcgctcgcctcgcctcgcagggcaggcggcgcgtgtgcacgacgtacgcgtcgaatggtccgccaaaaattggttcctcaccttgcgcagatgcagcctccttttgcagttttgttttgctgcaaattcggattcgtttttgttttcgaaacgttccgaaaaatccggtgcgtgaaaacggcgtggagtccggataagttacacgtgacttatccggtttggttacgcacagtagagatcgtgcgggcgccctgatcaagcgacccttctctatataaaccgaccagccgtcttcacgcaacacacaaaaaaatcaatctagggtttgcctccaactctgtgctgcgccatcgctcatagattactccatcccgctcgccggcgtgcaccggcgatcgggagagcaggtctccggaacctctgccttcgacgtcctgcaccgggagaaggcggcaataaggtttttgggaagcgctgagcgcgactgctccctgttcgtccgcgacggctcgtcttactcttcgctcgcgtgctgcgcgccttcatagacgcctgcaatcgcgaaaagttcctgccgagcagccggtctttctaccacctcggtgcgtgttcaatatgttgcgcatatttgatctgttcatgttttactgcttagtatacatgtgtagttctaatcatgcgttaatgctgtatacatctgcaatgccatgatttaattatggatgatatgtcatcattatatgcctttaatctcaacaatccaaaaaccttattataggcactgtgatttaactatgcatggttttgccgatacattgaggccggataaattcaccggtgtgcactttaagagatggcagatcagggtcactctgtggctgacagctatgaaatgcttctaggtgagtactggcaaacctgaaggagttcttactgctgaccagcagaagcaattcgaggaagccactactctctttgtgggatgcattcttagcgttcttggcgatcgtctggtcgaggtgtatatgcatatgaccgacgctaaggagttgtgggatgcactgaatactaaattcggtgctactgatgctagcaatgatctgtatatcatggagcaatttcatgactacaagatggctgacaaccgttctgtagtcgaacaggctcatgagatacaaaccatagctaaggaactcgaactccttaagtgtgtcttacccgacaaatttgtggccgggtgcattattgcgaaacttcctccatcttggagaagtttcaatactgcactcaaacacaagagacaggaatactctgttgaagagttgatagcgtctcttgatgttgaggagaaagctcgggaaaaagatgctgcgtctaagggcgatgatgggcagtccagtgccaatgttgtgcacaaggcccagaacaagagcaaggggaaatacaaagctcagcagaccaccaacttcaagaagcagaagaacaacaacaacaatcctaatcaggatgagaggacttgctttgtgtgtggccaacctggtcatctggctaggaagtgtccacagcgtaaggggatgaaggcacctgcagggcagacttctaagtctgctaatgtgaccattggcaacactggagatggaaacgggtatagtaatttacctactgttttttcagttaatcagtctaataattggtgggttgatactggggccaatgtacatgtttgtgctgacatctcattgttttcttcttatcaggtcgcacggggttccaccgtcctaatgaggaatgggtcacatgcttctgttcatggtgttggcacggtagatctgaagtttacttcgcgaaagatcgtgcagctgaagaacgtgtagcatgtcccttctatcgacaggaatcttgttagtggctcccgtctgactagagacggatttaagttagtttttgagtctaataaagtagtcgtgtctaaacatggatattttattggtaaaggttatgagtgcggaggcctgttccgcttttccctttctgatttctgcaataagtctgtgaaccatatttgtggcagtgtggatgatgaggctaatgtctggcactcacgtttatgtcatattaattttggcttgatgtctcggctttccagcatgtgtttaattcctaagttttccattgtcaaaggttctaagtgccatagttgtgtgcaatcaaagcaacctcgcaagcctcacaaggctgctgaggagagaaacttggcacatctagaactcctacattcagatctttgtgaaatgaatggggtgttgacgaagggtggaaaacgatatttcatgacgttgattgatgatgctactagattttgctatgtgtacttgttgaaaacgaaagacgaggctctagactattttaaaatttataaggcagaagttgaaaatcaacttgacagaaacataaaaagacttaggtctgatcgtggtggagagtttttcttatacgagtttgacttattctgtgaggaatatggcattatacatgagaggacgcctccctattctcccgagtctaatgggattgccgaaaggaagaaccgcacactgactgacttggtgaatgccatgttggacaccgcgggactacctaaggcatggtggggggaggtattgttgacctcaaatcatgtgttaaacagaattcctaacagaaataaggacaaaacaccatatgagatatggattgggagaaaacatcactttcttacttgcgcacatgggggtgcttggcgaaagtcaatgtaccaataacgaagaagcgcaaacttggacctaagactgtggactgtgtctttctgggatatgctcaccacagcattgcctataaatttttaatagttaaatccgaggtacctgacatgcatgttggtacaattatggagtctcgtgatgttaccttctttgagagctttttcccaatgaaggatacacatagtaattctagtcaaccttctgaaataattcccagttcattcacaccaccagaacaaattgaatatacacatgaacatgtcactgaggaggatgatagtgaagctcctcgaaggagtaaaagacaaaggacgactaagtcttttggtgatgatttcactgtgtacctcgtggacgacactcctaagtcaatttcagaagcatatgcatctcctgatgcagactactggaaggaggctgtccgtagtgaaatggattccattatcgctaacggaacttgggaggtgacagagcgaccctatgggtgtaaacctgtggggtgcaagtgggtgttcaaaaagaagctgaggcctgacagtaccattgaaaagtacaaggctcggcttgttgctaagggctatactcaaaaagaaggtgaagatttctttgacacttactcacctgttgccagattgaccacaatttgtgtgctactttccctagcagcctcacatggtattctcgttcatcaaatggacgttaagacagcttttcttaatggagagctggatgaggagatctatatggatcaacctgatgggtttgtagttgaaggtcaagaagccaaggtgtgcaaattgttgaagtctttgtatagtctgaaacaagctcctaagcaatggcatgagaaatttgatagaacattgacatctgcatgcttcgcagtcaatgagacagataaatgtgtatactatcgccatggtgggggtgagggagttattttgtgcttgtatgttgatgacatactgatatttaggacaaatcttgaggtgataaatgaggttaaatcattcttgtctcaaaaatttgatatgaaggatttgggagtagctgatgttatcctaaacatcaagctaattagaggtaagaatgggattacactcttgcagtcccattatgtggagaagatcttgaatcactttggctacattgatagtaagccttctccaacgccttatgatcctaacttattgcttcgcaagaacaagagaattgctaggaatcaactggaatactcccaaatcattggctcgctgatgtacctggctagtgcaactaggcctgatatctcctttgctgtgagcaagttgagccggtttacctctaatccaggagatgatcactggcgtgcgcttgagcgagtaatgcgctatctgaaaggtactatggaattggggcttcactattctgggtaccctgcggtactggaaggatatagtgattctaactggatctctgatgtggacgagatcaaagccactagtgggtatgtcttcacactaggtggtagtgctgtttcgtggaggtcttgcaaacagaccattttgacaaggtcaaccatggaagcagagttaacggcactggatactgctactgttgaggcagaatggctgcgtgatctattaatggatctgcctattgttgaaaaaccggtgccggctatccttatgaactgtgacaatcaaacggtaattgtcaaagtgaatagttctaaggataatatgaaatcgtctagacatgtgaaaagacgattgaagtctgtcaggaagttgagaaactccggagttataacgttggattacatccaaacaactagaaacctggcagatcctttcacgaagggactatcacgaaatgtgatagacaatgcatcgaaggaaatgggtttgagacccatgtgagttatactatggtagtaacccagtctatgtgatcggagatcccgtgaattagatcctgggaagaacaaaccattagtaaactagaggagagtaccgatatataccctctctaagtaaagatgcatgtactcttgtgagctgcaaggcaggttgactataccttaatgagttctgttggctttaattagcgaagatgctgtcctacagagcattcttgaaagaactcacctttgtgagcttgactgttggtcgcagtctatgaagattttgggtgaatcttctaggaagcttactaaagacctaggagtatgacttatacgctccactcgaggggtagtctacagacggtctagtaccagataagattttgagtgaaacttgcttgcacaagacttgtaattcaaggcgtagtccattgttcaagttgtgagtaagtgtagcttggagttctagatggatgttcaaccttaatcggtctccatcgaaccgctggtatataaacagtacattggaaaaggcaaatctcagtgggattttgagatttggtgggggattgttggaattaatggataggccttaacccactcgaagattaattctttggaaaatcacaaaagcccacctcatgggatggcatgcatgtggagtttagtaccaccttgcttattctaggagagggggacctccttaaaagggaggatgccctcctagccacttgaatcatgtgtggtggagagaagagggggaacacacgcgcgtgctcgctcgcctcgcctcgcagggcaggcggcgcgcgtgcacgacatacgcatcgaatggtccgcaaaaaattggttcctcaccttgcgcagatgcagcctccttttgcagttttgttttgctgcaaattcggattcgtttttgttttggaaacgttccgaaaaatctggtgcgtgaaaacggcgtggagtccggataagttatgcgcgacttatccggtttggttacgcgcagtggagatcgtgcgggcgccctaatcaagcgacccttctctatataaaccgacccgccgtcttcacgcaacacacgaaaaaatcaatatagggtttgcctcctactctgtgctgcgccgtcgcttgtagattactccatcccgctcgccggcgtgcaccggcgatcgggagagcaggtctccggaacctctgccttcgacgtcctgcaccgggagaaggcggcaataaagtttttgggaagcgcttagcgcgactgctccctatttgtccgcgacggctcgtcttcctcttcgctcgcgtgctgcgtgccttcgtagacgcctgcaatcgcgaaaagttcctgccgagtagccggtctttctaccacctcggtacgtgttcaatatgttgcgcatatttgatctgttcatattttactgcttagtttacatgtgtagatctaatgatacgttaatgctagtatacatctgcaatgccatgatttatttatggaatatattaaatcattatatgcctataatctcaacaccttctaatggccatgaaagtgttcgttatatcttcttcctccacttttaagaaaacatcccgcttaatgaatgtgactatacaatcatccaaaagctcatcacccatcttatttctcaaccatcattaataaatgcatcagttctactataataatttaataaatatcacaatgcacatgagtaaagagttcaaaatttcgaaactgaaaattgaaaaaaagtaaaaagtaaaaaacctttttttttggcctggtgcaggactgcggtcactgcgggcgggcgttggcggcacacgcggcaggtctgcagcagtgcgctagtgcggcactgcggctgcggcggcagccggccaaggcggcggactgctgcaggctacggcgccagtgcggcagtgggctgctgcggcgaccaagccggccaaggcgcgcacgcgtggcccggcggcgctcgctctcacgatctgatcagatcgctgctcgcgttggcgtcgcgactcgcgagggcgaggaggggagagacagagagtcctgcgatggcgcgacgcttcggtttctgaattccaattgattagatacaccgtacacgcgcgtgaggggtggggcctgtgggcggcgggcgctggctcgatgtgcctcgctataaaaatttaatctaataatttaaaatatcgggttcaccaatttaactgaaaatcgaaggttagatttgatatagccacgtggtggtctaggagcatttgtagaagtattagatttgatagagccacgtggtggtctaggagcgtttgtagaagtcccacgtgatggtttgagagcatttttagaaagtttaatggacttttagtaaataatagatttaaaatatcgggttcaccaatttaagtcaaaatcgaaggttagatttaatagagccacgtggtggtctaggagcgtttgtagaagtcccacgtggtgatttgagagcgttttgtaggaagtttaatgaacttttagtatataatagatagatagatttagtatataatattcaggcactagtaaaacaaattaattgcagaatccgtcactaaaccgtgagatgaatttattaagcataattaatccatcattaataaatgtttactgtagtaccacgttagcaccactttgtcaaatcatgaagtaattaggtttaaaagatccgtctcataaattagtcgtaatatgtacaattagttatttttttaagcatatatttaatatgtttaaacgttcgatgcgatgagaaatttcggttgggatctaccctcaggcaagcaacggcataaataaggcgacacatcccaagaagaccaccaggggaagcaaaggagggttcatggttgcgggtcagaaactcagaatagaagaagattgttccgtggaaaaaagaaaatagaagaagaaaggtatggaggatctagtactagtagtgaaatcaagaacgtcactccctatcgctttctcttctccccgaaggaaggaaagaaacaatccaatcatattatagctagtatccaatattcttgttgtctttcaccttttggtctaggttgtctagtgcttgctattcttctactagtagtattataactgggttgttcattatttgaagattttcttttcattggggggaccgggctagaacgatttttcaccatctttatctggtcggtttcatgataaaactgtgaaaagttgtgtcttcttccaaagctgtgtgggtatggaagggtttgtacgaggagagcgcatggagggtttgggggaaagaagaaaagattcacgccttcttttgccgcggcgatggggttttgggccgtgggcggatgcggccgagagagagagacctcccgcgcggcggccgagagcagccgaggcaggggggacggccggcggcggcgaccacgaagccgtcggtttgttttgttactactccatttctgttccccctccctgatcaagtaaactagtttgtaggatcgcatcaactcggatgaggaatttttgccgattagatttagttttcaagctggaaatatggtgattcacgggcctttttcttgtggtggttgtcgttgttgttcatgccatttttctgaagtgaaagatgaacaaaaatttccactgaaaagtaatattttgacactgcaggtttgttgaaaaacgatgggcacatcgtgcgaaagatgcagacggcgcgatgagcaggactacaggaatttggatgattcccaaaaacacttcttgctaactatgatgggtgattttcaacatgagatggtaagccaaatatttttttttatgaaatgcaatgctgcttcttttcttttcccttgccgtttgtattttttttttgtttctttgcttcttacaagttctgtttggtacaagcatgatcttccttgcaaatttcaataattcggtgactagattgtaccctcttaaaagaaacaagtattgatgcccggatttaagccaataatatgataccacattaggtttgttggttagcaccagatgtaatattttaaaaagcaagaaattaggcttttcaatttcgtcagtttgttctgtagtcacatacagaaatcagggcctaccctgagatttttgtggcccagagtggaactaaaaagagaggccccacattgaacataaacatgaaaacattaatataaatatatcaattgcaaagatcgaattatgtgcatgtactgaacgactgatatacatttaaactaacaccaaaattatgtgaacaaactgtagcaatgaaagaaatagcctgcaaacaacaaacgagttcataacactgaactgacatatatttaactacttgtcatttgggaaaaaaatcacagcggaattagcgctagtgactcatcaataacatgccgcaaaaaatcataattacttgttatcccatgcatttcaactttgatgttcatacatcacccagatctcatcagaactacacagctccacgctggtagcatcaaggtgaagcatgcgttatattgtagcattctggtttgggctatctattgccttcatagtgaggaggagaggaaaacatagtagagcagctagtatatcataaaactatattcaaactaacaccctcaaaaatatgtttctgcagatcattccaaaagaatttgtgcagcgtttaaagggtgacatccctggagaaatccaactggaaacacgtaacagaaacagtcacactgttagagttgacaagacccaagaaaaggttatctttacagagggatgggcacaattcgtcaaaacctttgatctgcagatgggtgactccatgatgttcagattcaatggaaattctcagtttgatgtcattatagttgatcaaattggccgcgagaaagcatgttctgctgttgtggatgattctcagaatcctaatgtgcaagaaaggcgtgtagatgctactgaaacattgaacagttcgcgcgctcattctcagcccatgccaatgcagtcaactactgaaactgtgaaccattcacatgctcgtccttgtcccatgcatactgctgttgattgcatgcccctttctcatgctcatcctcaacccatgccgatgcaattccctaccgaaactgtgaaccattgtcatgctcctactggtcccatggaaatgccacttgaaaacgttgccctttctcatgctcatgctaggcccttgcaaatgcagtcacaaccaacggatagattgacacaggtgcaaagaggtaactcaagtaaaggcaacatgaccacgatgagttcctcctccatgtcatctggttacaactcaattattatatgcatttcctgataaagcacatctgatgttttcttttctttgcacacaggatattctttgtcctctaaagatcaggattgcagagtaggtgttatacctgatcccatcatcgggcaaaagaccatactaagtcgagttcaggtgaatgtggtgaagcgcaagatccaaaatattggttctcaaattccaatctttgtatctgtcattggaaagaacaacgcctctggaagaatatcctctctagtgagtgccatatttctttgtcgaatgtgcatacttcttaattatgcactatttatactggtgtttgattaccgatgaaaaagtattcttcatgttgttaattataacctacttcctccgtcattctagcatttcccacattcatattgatgctaatgaatctagatagatatatatgtctagattaattagcatcaatatgaatttgggaaatgctagaatgacttacattgtgaaacggatggagtactaagctgtaagcactgaatttacatgtgatatgcttgctgcggttgcttaatatatatgatgcagtgcctaattgttttagttataatttatttgcgatgattccatcatctcatttttctttcatgtatgcaactagagtatcgccaaccgatatgttgataattaccttcaagacgagaaaactatccgtctttcgcgtcttggggacaagtggaacatcaggctttctgattcgagtggtaacagaaggatggttggtggatgccgaaagtttgcggaagacaatgatgttggagtgggtgatatctgcctgttcgagctgttgaagaatcataaatgcacaatgaaagttcatatcatcagggcaaaggatatctgttaatcgaaaagcctgttgaatctgctgatttctctgatgactgttgctggtgcttttgtgctgctgagaatggtagtctatccacagtttatgcaactactggtactaagttgttattgaactagtacattgcatgctgattagatggtgatttcccttgctaattctctttttttgggtgatacactaggggggttcccttgctaattaatgacccatgtaattactgatacttacttttggtgcaatgcttttgtagttagttatcaactgttcaggggctgtaagcaggctttccgctgtttttttctccttcggttctctcaattatatcacggttattgctctcaaatacaatccagttaaaaaaaaaggctcttgtattttgctcctctagaattctcaaaacttggaacatcagctccttatttacgcaaatatatcgacttctatattgtctggattgatcttctctggatgtatctaggtaaatttgaatgcattatttttgtcctcttttctacagggtttaatcgtatactcatgcgtattagtgttctatacttctatgcatcttgacgtttaatcttctacttcatcggtccataaatataagcattcaaagtgtacacaaatgtaagtattccaatgtactgtcctatgaatcatctattttttcaaatttctttctatctcaccagagagtccttacttacgtttgttaatggagggagtgaatattagagatgcaatgtacgagttggaggatttgttaatgattcattttacaatgctaaactttcttaaaagtctgaaaatatatcttaaaactacaaaattggacgtcattggaccgtaaactttagagcaatgtggctggcgtcgacatggccaaatttaaataatatataaaaaatggattcaggaattcgagaaaaaataaacatggttgctcatcggagtacttagaacctacaaatttgtgttcccgattcctatattttgcatttcttctaatttcttacactctgtctatccaaacaccaattttctctctgtttttctattatattgagttttcagttactatatttttcatttattctcatttcttattcctttttatgttcctcaacaccaagcatatgaattgcaagattcgactttcgagcagtgatgaaattgatcgacaaacaggatgcacaattttagtacaacaaatggttctgaaaaaatggcctacgagacgaatcaacttctctctatcccaaaaatataaaatataaagtattttaggtggatttgacctattttatcaacaaatggttatgtctagtttcattgcaccatgatatgtcaaatccactcaaaataggtcaacaaatagttatatccagattcagtgtatatgatatatcacatctactcaaaatctattatattatattttataacgtacggagtactagctaattaacatttagtattagttacagacttaattaattacaagctatagctacattaagaaattcgattagacaagtaatcatggtcatttcaatacatcctgaattcctgatgaattaaaactctacgttgaccctgtattcggcggacttgatagcgggcttcttcttgggcgagaggccgtcgacgacgagcgcgcagtgcacgttgaccgtcacctcccggaggtcgacgtcgcccagccggagcgtcaccggcgcgctgacgtacacgtcgagcggcacgttgccggcctcctcgctctcctccagcgcgccctgcagccccggcccgaagccgtgccgcccctccatggccaccctcaccaccgtcgtgttccggtggccctggtagaacgccggcagccgccccgagcacagcgtcgtgccgcggtacgacaccgccgcccgcgacccggcgccgtagccgatcccgaccatgtcgttggggttctccgcgcggacggacgccaccagcttggcgtacacggtgaggtcggaggagctcacgtcgaaccgcgccacggacatgtcggacacggagtaggacggggccttgggcctgcacgcgtacaggaggtacgccgacgtcgccgccaccgccacgacgaggaggaggaggaagcagcagcaccagcagaggcagccgcgcaggctgccaccgtccgtgatgcggtgccggggcatgttgcggctggcgccaggcgggaccgtggccagcgagctggagccgtactcctccgtgagcatcacgtaccgcggcggcggcggaggcttggacggccccgagcccccgtcgtacgccatgggagagagagggcctagctcgagctagctagctagagagagaaaggttgggatggaaggggactaggggagcaaaggcgccgtacgtacgtggtcgcgttcatggcgagcggctgagcgctcgctgtggacaatgtgtccaagcttgctaagcaacgctcatgtcttaatggggatggctatctttagaccgcgcgcagcgcgcttgttaggtattcatgcattatcttttctctcacacacggtttctcgttcgcttgcgctataatgttttgtgttttttctttgaaggacatgcaaatcaaaatcgactgttacgatccaactcaaatatcacagatcaacaataaacatggcaggaaactccaattccatcacaagataaagtgttcggtgacataaatttagagatggaagtataggatgggataagcaatactgcaatagattgggaaaagtaggggacaagaagtaggggaaggaaggacacaaggcatatgcatgcgggggatcctaatgggcgatcgatcgtctggagatgggggtagcaatcaatccccctccctccctccacctagtttcctttcttggcaccgcattacttttctattttaataaatttatgcacctaaagtttacacatctaaaatttagagacccaaagtttataagttaaaagtttatatatccgattcaaatttaatttgaattcaaatattttttttatatataatatttctatacatctaaagtttatacacctaacccaaagtttataagtcaaaagtttacatacctgtttcaatttaaattttaattatatctgatttgaatttgaattcaaatattttttatatataatatttctatacatctaaagtttatacacctaaagtttatagacctaaagtttataagtcaaaagtttatatacccgtttcaaatttgaatttgaattatatccgatttaaatttaaatttgaattcaaatattttctatatatattatttctatacatctaaagtttatacacctaaagtttatagatccaaagtttataagccaaaattttacataaccgattcaaattttttatataaatagtatttctatacataaatttttctaactttttgtgtttttttaaaaaaattgtagtgtactgtagtagaagagaagaaggggaggaggaagggggagaggagggaggagtgtatctgagtataggtgagaggcaggggggtgatcactggacggatgggggagcgatcacccacccattagcatttccgtatgcatgcctgttcatcgatgatcccctcagctgcagtgtatcttgtttttatactctttgctactcggttgggtctaaagctggcccactacacatctatgacattcttctcttcttggaaaaaggcttgtcctcaagcccatgtagtgcttctgcttgatccttgaggactccttcaatcctattgaaaaaattcctataaatgcctttgaatcaaatgattaaatcctatccaatcttttaaaattcctatggaatgagcaatcctatagaaattttagaggaaacttagcgagagcttaaagctcttggaaaatttcctttgagtctatctctcttatccgattcttgtgtttttttttctatggtccaaacaaacgattattcatgtgtttttcctctgttttacactatcattcatagtataatcttatttttccttttttttttcattcctacgattcaaaagacacctgttgccccaagcaaaagtctcgtgggatgacaccacacttctgccacaatttgaggagacagaattcctggatcatttgcacacatccaaagagcctgcaccaccatcgatccagccgtccataattccatattctgtctgtgttttcgtgtgccaaatttttttaagtatacgaacacatatttgaagtatgaaatgtagactaataaccaaacaaattacaaattccgcctgtaaactgcgagacgaatttattaagcctaattaatcagtcattagcaaatgtttactgtagcatcacattgttaaatcatggtgtaattaggctcaaaagattcgtctcgcaatttacagtcggactgtgcaattgttttttttgtccatatttgatgctccgtacatgtgtccaaacatttgatgcgacggaaaagttgaaaatttgaagaaaaaaaaaagttaaaatctaaacacggatctatctcatctttgtataaaccatatgtgaacatgtatgatgaaatgaaacgaaaggccaatatttgtaaattgaaatcatccagaatcctcccatttagatttcttaacaacagattgacatgtgccaaaattggtacttgcatagaattcattgggagcatagttgcatacatttaatcaatcattttagcccagcactccttgagaatccaactttgattggtttggcacattgcatagcactagtttatttgaatcatttctggcacatgactatgctattatctgcaaatggtctcttacaaattatgcatattattaatgcagccctaaaactgaatgctttgctcccatggatagcaacagtggcaccacatagaaattttaattttctctgtattagcaggcaccaacactgtttgcctatcataaaactgatgaatgtaagtattcgaagttaaacttggacccaccatggactgcattaccacttacctgcccaactgaattctaccaaatatccagtccacgtgcatatattgcttggtgaagctctgtccatggagaaggtggtggctatggtgatttctccacataaggcatgc

SEQ ID NO: 6536 - DNA, 8879 bp, Oryza sativa
ggagtatgatttatatataagaaaatagagcgagccccaacattaaaccatagtcagcctaacattggaaacactcgcataacatatattgtatatataaaaacatgctctaggtaaacataataaattatggatctggcaatattgtatgatctgaaaaataggtacggtaaattgtatataaaatattgcgtacctttgtagatacatgccggatgtatctacgaaattaatatattaatttaaaataattaaactagtaattacctttgtttgtgtactgattggtctgaatgcaagcgtcatgtgtgttgatgtgtcatggagtcgacctatctctgctcctgcatcatgcttgtgtagcccaattggtttcttcggcacagcatcccgtcgtatccgagaacaagtcaaaactcaatcatgagggccatcggacttggtcggcggtggtaagtgtgcatgtataaaccagggaacaataaaaaacacatgagcagtactaaaagaacgagaccgatataactatgattacaaccagaagtagaacggttaacctgctgacggtagattaattttaagatttcggcggcggacgtatgctcgggagtggttggaacggaccgagatctcgtggccgacaatgctaaaccgatgtcctccgtgatatctcccaaagccaaagtcgagagattgttgtcgggaaatccatttcttaaacccatctcgtcaaaaccttgaagcaccaaaaatccccctacctggcgcgccactgtcgacccctacctggcgcgctactgtcgacgtttcatatcgcgactacggtatttgcatagtatgggaatcgttggtaccagggtatatgcgatattgaagtaaaagagacggagacaaggatttttatataggttcgggccccttatctgataggtaatagccctacgtcctgttggccgaagccggtgttgctctttattcatcaggatcacacaagtacaatatttgggataacatatttagttgtcgtcgacttggcggctagataaccaacttgtagtcgatgacatgatagtcttcctcctcgaatccgcactcggcgtgatcagagatagtgctagatccctcttgccggcctccgtaggaaccggatggggtatgtttaggctaatctctgatattgatatctgacggcatgtcttggcttgtattgatctatgttgattttgtggcttccccctctcctcctaggggggcttgtgtttatacccatagatgcccccttgtctaagtaaaactagggagaccaatatagatataatctgagtaatccttgtcgtttccatatagaactctacttgttcttccttatctggaactcctatatacgaggtatgattccgtataagacttggtatgtagtgggctccgctgagcttagtcgattactattgggtatgtggtatcaataaccatgacagagccatcttgagtccgtttactcaatcaacccttcgtcttcctatgcgcacatctctctaggtctttttcgccatcaagaaaccctaactctccttttcctctgccatcccctaattcgatttgatggatttggaaaaaccaccatcgacaccgtcgaggtgaagaaactgcacgtggagggatctcttcccgagtgtaacaacgtggagcgctcagaaggtggtactgaacctaaacccgctctaggacaaattgtagttttagagatttcgttcagtgtggttttctacctccttcttctgagttccttctacttcttctgaatttttacggccttcatcttctccacctgaacccaaattccatcgctttcatgagcatcttcgctcaccattgtgaggcttaccttggggtagtaccatttcttgatctgttttgctatttttatgagcttcaatggatggaatcttgcaaaatctctagatgctgcggtttccgtctccaagattggatgaaggcggaatacatccccttcaactaccattcatctcggagctcatggagatcgaagtgcttctatctccatgtagaagaactctcttatgtccttgttgtcctagacgagcaaccagaacactccacctcctggacctctaaaccttccttgaccccctccctccaagccttcgtagacaaattccatagcctctgagaacaagggtctctgagaacaagggttgttgaggtataaggtcaccgctgacttcatacgtcgtcgaatccaacctctccaagctcgtgctcaccccacgttcgattacataggagctaacgacgagacacggatattagatcggggtattcgttctcggaacccacttgctcttgattcgtgtaatgactttattattgacttatgatatatgcataaccccactgtagttctcgatgacaaaaccttgggtacgagagtgggtcatgttgtcatcagtcctccatcggactccgacaaattaccgacttccatctgtgacctctcttctgttgataaggacgccaccatcaattaagcagttccctattactccgcctttccttcatgtatttttgaatctgaagacggagtaatctaaaatcatgtaggctcttcctctgacggatgaaattggcccccttgtcgatcatcaagcctcctccaccctgaaagacaaggttgcctctgagcaaactgatgccgtgatcatgccaagcggcagtggcgccaaggtgcctaagaggaaatgggcgggtgtgtccaaacactcccctggcgtcggtacacttgttcagacaagcaactctgaggtgagttccgactacatctcttgtgaacaggctctatcaaagacgacatcgttctcactcgctttcttctccaagccgccatcggagctcccccagcaccgcggaggaaactcctgaagcggcacaaaccaaagtaagtgaagtctcaaacatcgttgtcttgtcttgcatttttttgtttctgtttctattatttctaacttgtgcttctgatagcatttctcccgcgacttccgctcaaagcgtaggtcgtgtggacaccagtttgtccccaccggccgttgtcgtgaccacgcgaactctgcccgctccttctcctccttcactgcctgccatctcgtctgtgcccggagccgacaagttggccgaggcatgctgcctactcgaaatgggcacccgcgagatgctcgccaggatcgagcgacttgggaaagtcgcttcgtcctcggatgggtgcgtcgtgcaattggagagccagctcgcggaggcacgcgaggaccttcagaagatgaaggaccttgtcgcaggccacgagcaacaacggcagggactggagacacggatggtggagacgaagggccacttggcaccaatccgtgaggggatgcagcaaatttacggtcggatggacacgctagcgcgtagtttggggatccacgatagggttcctccttactccgacgagaccacgatagtatcctcgctagccgaccttatcgagaaacttgaagaagttcccagtaaccacgctgtgggggtggccgaggacacatgtgctggtcttcgtaccgacgcatgccacgtcctcacgtgtgtatggctcacgcaccctgagatcgaccttaaggaggtcctcaaaaagggtggagccgaaccatcgtgcgaggatgtgatgtcagaggttgagtagctcgagaaaatcatgatccccttttttggttgggaccttctatacaacggtttgtcaagttaagggactccctatatctggtattgcggtttgaagacaaatttgaactcggccacaagttgaggaacctatagtgaacttgttccgctcagattaacaaatgagaatataaaaatatctcttatgttgtacatagtctcttcctcaattcttaaaactcccaattctgaatcgtctggtgtgctgcaagtagggatggcaatggagacctgataattgattcctcgtagtgaactcacatattagagaatggggatggttggtatgacataaatatcattgatatctatcctccatgaggaggaatcaaatggtcccaaacttactagcatcggcgataacggggtggagacggcgcgcggtgacccgcattcactgtagctagaccaattctagactttccagacgttttgacccttgaagcccaattaacaagtatatattaccacctaacactaatcaaccagtcaaccaccacatcttccagatccagacgcagaccgctccgccacaccggccaccaggcgcgcgcgccgccgcctcctctcgcgcgggcgctgtaccgccccagccgtcgacacgggcgcggcgctccggagcctgcagccgtcgtcgcgccgccaggcgcctccaaccgtccgccggccggcgctagcgccctccgtcgccagcacgccgtccgccgccaccgattcccctgccggctgccgactacagaccatggcttcgttctcctccccggtaagctccgacagcgacgacgcaaggtgagcacatgctacaatccctagtcccttctctgctggtgtgcgtcgcggcggtgtggatctggatcacgctggccgtggagggggttctctctttgcaggaggtggcgctaaaccctatatctcactgtgcgttgtagttgctagagtgagggatggagaacggggagatcgagggggcagcggacgacggggtgccggtgcccgcgccgcccaacggcaggaggtatcgccccgtcggctccagcgatcgcgccgtcatccagatgacctccatggagcccggctcctcctcctctaccgctgtggcagccgtcagtggcatcacgccccagccaccaaggtatatggaagcttcgcttcaaattttggagatcgaattttagcaatattctcttctagggggagtagactaaaacacttgtactgcttgaattagtataccattgcttgtgcaaatccgatcgtgcattgtcttgctcgtgcgttattaagcaaaaaaaaaaaaggatgtagtgtttcaccaatcaaccctatggtagttttggtgttaggaacccatgtgaagcactgtggggcacatctccaacatatgttggctatggaactatcattttagccgttgggcttatggccttctgtttttgctcctcatttccagatttagttatcaggacaaggctggaaagtcaaacgtgctttatttactttgtagcatacctccaactgtattgttactgcttctcaaattttgcactgatatactgaaatttgattctacttggtttcaattaaattttaatggaagagcctgttgctggttgctgttgagatactcaggaccaatcataagttcataacactggttgttgttgcttagtacaatgcttaaattgatgctgatgttttcagttgtagctaatattgcctcattggattagatgatattgccatgtgaaatgatacatcaggctcttatgtaatccctccatcctaaaatacatcgtactaggatgtgtcgcatcccgtcctaggtttgtttatttttggacagagggaatatgtaaccacattgctgtgatttttgattctgtatttatattgctatgctcaaataagttaatagaagtgctatactactaaaaagttcttactaacaaatatctcaaccatttgatttagttagttggaagttttaaaaagtcaaagatttaaccatagcatgacaatcagcgtttgtaacaagtttgtaaaaaaaatttagcacgtgcatctttttccataagttaaatacacgtcacaatagttacttcttgaagaaagatgtgttctgttttgtcatatcaattttaatttgtgagtttcatagcgcgggaagtggtttctatatggatatgggagtaccctgcacatgtcatgtgcatcaatgaaatatatgttacttgatatatattatcttatttgcctcatgaatatgttcatattttttattgcacattaagagagatttttaggcataacttctgcataatttcctttcatgtgcacctttttaattcacatcaacaattgagaggagaatttggaggaaaatgctggccgtcctgcttcaacatgtacaagctaactcaatttttatacatgtcataggaatctaacggtggatccaagcatgcaagaagatcacactgtttcacaaggggattcaaagcttgagctttttggttttgactctcttgtaaatattttgggcctcaagaggtatgatccatgctctgcctctgtttgttaagcacctaaggctgtgtttgagcggcacgcaaaactatatatgcgttaacgcataattaattaagtattagctattttttaaaaaaatagattaatatgatttttaaagcaatttttgtatatacttttttttttgtaaaaaacacaccgtttagtagtttgaaatgcgtgcgcacagaaaatgagagaggtgggttgggaaagtgacaaaagaactcaacctaaatgttttgactaatatgaagcatgcgctctacaaagaaattgttagaactattgatttttctttatgatatcagcatctgattgaaactgaacagcatgacaggagaacagattcaggccccttccagtcctagggacggtgaggatgttgcaattacgattggacgcccaaaggttattctccattttaccattttggatgaagcccagctgttaacttaagtcataggtttccattttgatagtgaatagctacatattttttgtttttaacttgtgcaacaaaccagtaacaataattcaatacatatgatttacatttttgcatctagatatggcttcagaatttaaaccaatgcacttctactggtagcgtcatctgttgtattcagagtttcattatatgtctaattacattttcttaaaagcataaacaagttgttgatttgcataattcagcttttttgaaatatcgataggcccattcccggtctttaaaatttgttcagtgttgattctgttcattgccatcatttttgttctttttattttgtatttgttcatggcatttgagtttatgacgtttgattccattacttttgttggtctggcaggaaactggacccaagtttggtaccatgatgggtgtctttgtcccatgcttgcagaatatattgggaatcatttattatatccgttttacatggtaaaatattctggatactttattttaacttcccatatttgttttgttccaaagcccttattattttttatgatttttttgttcctgtgcttgtcaatgttgtgttcccattgttcttttgacagaagcttacctgtagcatttctttcttgtactgtatggccttttcccattatagaaccaagtccaaaattagtaaagcaaaattgttaaatgtaaatattgctatccagttttgacatgttaacttattaatgtattgatcccttgattacctaccctgttattcatataggtagaagtggtatttgtgcattgttaaccctgtatcttttttatgcccttatgctgttcaatttttcaacaactgactaatattttttttcttcctgtaggattgtaggtatggcaggtgtatggcagtcgcttgttttagtctcgttctgtggtgcatgcacatttttaactggatatcattaagtgccattgcaacgaatggagcaatgaaggtacgctgaatgtaagaactacatgtggaatagttaatagaataaggtttgctatgccccatgttttgcttcttagcgctgtctttgcatttctatttcactggtcgaacctgataccgggtatgcctaaaatccattagggagggataaattaaatttcgattcaatgttggtaatacttttagagcttgctttgattttgttcattgctgcctataaaaacttgaccgcgattgttttgatgttcattttttatgatccatagggtggtgggccatactatctcattgggcgtgcgcatggtcctgaagttggagttagcattggactatgcttcttccttggaaatgcagttgctggatccatgtaagtgtttaagcactcagatttcttttccaaacatctttagtttgttaaagaaaatgcatagcgggagatggataagtaatagttgcgtgatgcaactgctgtttcttatactgattgaaatttcaaattataaatttttcatctttcatttatccgtaattttgcatgcattcgcacatgggtctgtgacgtctgtccccttttctctctgtgtctaacttattctgtcattttcaggtatgtgctaggagctgtagaaacctttttggatgcagttccttctgctggtttttttaaaggtaggaacaacttacaagtaatactatagtcagtaagtttactttatgtttgtgaggatggtagaaaaaatggaacagtatacttcaagccttttgttaggacatgaagggtgtctatatttactttattatgcatttctgttagccaaacttagtcaaatttctcttggaggaaaggaataccaaggtgcaaaagcattgactatgtttgggagaaagtacttttaggttggctttagtgttatctttgagtatgagtaatgctcttcagaggtgcatagttggacattctcttttagttagttcagcctcctatgagtatatgaccatcattattctgtcattcacttatttctgttcttcctttttatcatgaggaatcaagctagcacggttaattgcctacataccaatgcagga

SEQ ID NO: 6537 - DNA, 3845 bp, Oryza sativa
tccgtaaaatctcaatgatttccttaacgaacatggatccttttcgtatacttgaggatataccgtattcgtatatctcataactcataggatagaggatataccttatccataaccctgacattagcccccgacttcaaatcaaataagtactcgttctcgcacccagacttctcaatcaacgacgtcgtattatcttggtcattctcaaaaaaaaatttgagaagacatgaaacattcaatgttaatgacagaagagcaatggtcctttaacaaatttgaatttaagtctaaacaactgccataaacaatcctaagaaaatcacggcggcattctctctccattccttggaattcgaactgtcagatagtgagcttatgaattctggttccaagaacctgtcgatgtttgatatcgcgactacggtatttgcatagtatggggatcgctggtatcagggtatatgcgagattgaagtaaaagagatggagacaaggatttttatacaggttcgggccccttatttgacaggtaatagccctacgtcatgttggccgaagccggtgttgctctttattcatcaggatcacacaagtacactatttgggataacatatttagctatcgtcgacttggcggctagataaccaactcgtagtcgacgacaggatagtcttcctcctcgaatccgcacttggcgagatcagagatagtgctagatccctcttgctggcctccgtaggaaccggatggggtatgtctatgctaatctctgatgttgatatccggcggcatgtcttggcttgtattgatctatgttgatcttgtggcttcccccctctcctcctaggggggtttgtatttatacccatagatgcccccttgtccaagtaaaactagggagaccaatatggatacaatccgagtagtccttgtcgtttccatacagaactctacttgttcttccttatccagaactccttctatatacgagatatgattccgtataagacttggtatatggtgggtatgtggtatccataaccttgacagtagtccccgacttcaatgcaaatgaacgagttaagtttctcgatcgaagactttagaacaactattgttgtgctcacttgaccgttctcggtgtgatcagaaataacgcttgattcctcttatcgacctttgtaggcgctatattaggtttgtctaggttaatctctgatgttgaccgagaagatacggagcatgcgactaagtcttccgtcttgctgtaatcgagaatttgaattgaagtcaagaaattccatctctgcggatacaccatcgcttcattccatatccttgtcaagccccatcaaccgttctcgagtaatcgagtaggcgtatagtctgcgacaaagccttgaaatctaacttgattgttgtgatgtctgatttcctgaaatcaatactcagaacatttgccgtactcgcttagtcgatcccggtgtagaaccgtagagacacggagtcttcgacaatgttgaatagaactttcctgaaatcaatactcaaaatagaatattaaatagaaatagcccccgaatgaacgctcaagggtaacatgatataatatgtatggaaaaattgaaaataattgaatctgcgtgtgacaataaaagagtactctcgctagagttgacctcagcaaacggagtttggtactcttcctagccccaaactatttttatggaaaagccattttccacaaagacagcttgaatcttataacaaaccatgctgaagctgacaaatcctagcccccagccgtgaagttggaaaaatcaatttctgattacacggcttggttaatacgcgtctattgagcactcttacatgaccaggttttacatgattgtttggctcttagaatctaacaaagccttatctgttctgggcgtccctaaccgaaatccccttaggtttctcggaggctttgtcagaacaacgtaaagggacaataggaccgccttcaagacgaggcgatataagaagaggggatcaacggataaatattgcacatataaatacttacagaaattgacatagatgctgagacggccaccacattaggcaaaggccaggtgtatagttgtactcaacaaatcgaagaattagcgggagaatcgctacaccgctggtcgaagaccagttgtagtcataactcgaccacttgaaatggaggtataagagatcactacaacctactggttcgagaaccaggagtaggagtctctcaaccgtttgaaattgaggtgcgaagaccgctatgctactggtcgaggaccagtcgtagtcataactcgacctttggaagtcgttgtacgaggactgctacgctgctggtagaagacctgtcggagtcgtacctcgaccattagaagtcgtggtgcgaggatcgctacattgctggtcgaagaccagtcgtagtcgtacctcgaccattagaagtcgtggcgtaaggatcgctacgttgctagtggagaaccagtcatagtagtacctcgaccacttgaagggagtccagagtaatagatgtatgacattctcgcgacctgcgagaactgcctcttgatgacgacgaaggagtgaggaattatcgtagtctgaggttccgctcctggacctactacctcatcctcgggccctctataagtctggggatcttgagttttttcgtcgtcgtgtgatgttgtgatgtcgttaaccttgtccgttgtcatcctaatgtcgttagtcctggacgttgtcgtcttggcgacaacggcgatctagtcggtcttggttgtcgctatcacgacaatgttgattgtcgcgttaggtgtcgtgagattgctgtaaccgactggtcgaagatcaggagtaggcgtatctcgatcacctgaagatgaatttttaggtagtgagagatcgctatgatctactggtcgaggaccaggtgtaggtgtatctcgaccacctataggcaactgataggcatacggaaacaaaccgtattcacgaaagcatctcttgttatccacgactccccttatcaatatctgccgtactcacttggtcgatcccggtgtaagaccgtagagacatggagctttcgacagtgatagatggagttcaacggtccacaagtgaatttaaattgataggcggcgggatgtcgctacaactatctggtcaataactaggagtaggcatctcttaatcacctataggggcgctagagttggttattacatgtgcatctcatgtggccagcatgactcatatacccaacttatagcatatctggatgtatgttcgcaatcatgtcgggtgatcaagccgacaacgtttgcgaggaattatccattaacaacctattcccaaatagttcagccgtagccgtcgctatttatgtgataggtcgtcggtcttcgttggtaggttgcgtgtgacaactaagcatttgtcgagagcgttctcgatgatggggtgcactcgaccataacctacttgagtgctcagttgttcctgaaaaatattttctagaaggcaagatatatagcagagaatatcgagtatgtacttaaaaaactgcatgaactttctagtattatcaggatatagcgagcagattaaatatcagacattatgtaaaccataagcaagtactaccaccgttttttaatagatgacgccgttgactttttctcacatatttgaccattcgtcttattcaaaaaatttacgtaattataatttattttgttatgagttgttttattactcatagtactttaagtgttatttatatcttatacatttg

SEQ ID NO: 6538 - DNA, 9549 bp, Oryza sativa
tggatccaccagtgtccggcgatcggtgagctggtcgtggagttgcatttgcagtggacaaattaagcaacggaatccagagtaaccaatcctaatttagcacaaattaaagcttcaaagcatagataaatagagacaggtaaagcattgtgcattatgctaattctgcttcaatgcgatgctgagttgaacctatcagtcgcactacgaaaatataatatatgccaccagtccacattaatatatgccatcagtccaagatgatgcaataatctgaatttttgataaacaagatgatgcaataatctgaattttcaaaaagcatttaaaaaaactgtagcgcttgattatatcatgtttacagcatagcagcagcagaaaagcatgagcatatgaataggaacatgagcacaccattctcatcatcaagtaatatatatatgtactgaaataatctggaaacactgaaaaccaataaatatgttgcacatccccactgttaatgaaccataattctgaaaaaaatgacaggttaagctaagcaatgcctcatgcatgtagatatcagaggctgagtgaaatcaacatctaatacgtgcatagataagtcacgatcattggttggtcatccaagaagtcacgattattggatagcagaccatattcttagggcattatgacttcgcttactccacatcaaagattcaattttttttcataaaattacttgcatagacagaatggataaaaccacctacgattgcacatatcaaaaattcaaaatcgatcctacagtgaaaaaaaaaaccctaaacgaatccaactttagccgcagcaggacagacgagaaaacacccaacaaattgaaaaactcccatccaatcctacaacagcccaaaaatccaggcaacgaacaaaacctaaattgcccccaatgcgaaaatgacgaccgatccgagcagtcgggtaagaggaggaggagacgaaccagtgtgtgtgtgagagagagaggcgcccctctcctcggccagtccccccatgattcaggccatggaactcgctccgatccggttgtgagtgctcggaatccgattcgccgaggcgaggttgagagaatcgaatggattttgggggaagccggaggtggaggagtgattcaggccatggaactcactccgatccggttgtgagtgctcggaatccgattcgccgaggcgaggcgaggcgagggtgagaggatcgaatggactttgggggaagccggaggtggaggagaggcggaggcgcagttgccattgcggaggaaggaagcggagtaaggggatacgattgattgcgcgatcgatctcccaccgcatgacccccaccgcgtgacctcgcgtcgcgtgagccccactgtcgttggatgtgaaacattgaatgattttcatccgttggatttgatgaatgaagtatgaaggatgtaaacatcagttggtgcattatagggtagattaataacaaaatgtattaattgttgctaatcaattactaatgatcaagagtagcaaaggtggatttcctcatctgaccaatttggccagatacactcatccaacatcttcatggactattcagtctccaggtcgtcctatccaccattgcccaccaactaaatatactcaaaaaactatatcaccatgcaccatctcctatccaatgatatatctccaaccaaagacaacctaaatttgcaaaccggtcatgcttcctttctggagcatcagggtgttttgactaaaataatttgaaaaactgcacacagataactagtgagtgttcttcaaagaaataaatatagaccaatgattataaaatgtctgctaggttgatatggatgataaaatcccagtgcatgatgataaaatgcaaggtactcgtgataaaatccaattaccatagtttgaaagctatatatcacaatatggtttgcaattatagttagaataaaggctagttcaagaagcaaataagatggttattcataaattaatcattaccaatatgattgtgattgtgcaatatgttgatcctttagttcatgccttaagcatgcttgcgtgctcgtctcgctgctccagctccattgatgtagcaacggggattcttgatctttcgatgagaggatgatagcttcgatttgagagaggggggagtcgacattggcggtccgactacaactaccataggagtgttgcgccttagtaagtacatgaacttcagattgttgttgttcttcctgtgccaagaacaatcttgaacctgatggtgagactatataaatctaaaagtgaatggagtaatttatagtttagggtatggtgaggctggacaaatctaaaagtttatgacaagatcttacgaacaagtactcaattgcccaaaaggagctcgtatgcaaatttggtagccatttgaattcaatgcaatctcaggtggccgaattggattctagagtgtggggttgatctccatccctgatgtgtacatcttccatgtgcatcccaataatgtatgtcactcctaaactaacagataaaataggggcttgtgatgaaatgaatttacatgatattttatgtgagcaatcgttttataaatagtagtcatggtcatatcatccacaactgcttgaccgtcttggcttgcggcaataggtactagctagcttgtggtagtattaactcttggctcattagacatgacatcacgtccaactactagagtaactcacatctagcagaatatttactatgcaatttggacataagtggacttgtaaagttagggtcatgggtagaaacatgcgatattttagtaggtcaatttacgcctcaaatagtgagcaaatcgtcctatctcgcggaagctggattattacaagccatatttggtcttgaggcttctctcaaactaccaataggtgaaagatgccgtggtgcttctagcttgagaataagctccacatatttttgcaatttccttcttactttaatgtggttttcatttcatgactgtccttttgcagttactacaagacgtattttgttgagcgctacaattacatccttccaatagtattctaacttcctatcattgccagatccactgagttttctaaccaagaactaaggagtatagtatgtttccatctttagtcgagttgagttgtgtccctctccctgcctcttcgttgttgtcactagacgacttatttcggttcacaggatttacaaatcataggaataggggaaatttaggaatagcgtaggaaatgcatatgcaaaacaaagtatatattggaacgcatgatagcagttgggagcagagactttcagttctacaaaggggtaaacaaaatgatcagctattcttcaatcttcattcaccatgatatactacagatcagcactaaaacattaaactggcacaatgggtgtatctgaatactggatgtaggaggggcggaacctggcagcctcccctacaatgacgatggtgatggtggacgtgggctgaccaagctctcggcgtatgcggcagcggtggagttgttgagctgctccgggcgaggagcatggtgggcgccaacgcgtctctgctgctggagctggagtccatggtggcgcgacgtttggaccaggccacactaggcgtcgtgatgataccgtgcacggcgctgctcgacgtgccgctggtgatgtgcctggtgcgcggcttcctcaaggacgccacaaggatggcgaggctggtcgacgcgtacctcgttgagtcggcgctcgaggccaggctgcggcccgctgagttcgaggagagctcacccgcgccgtgttcgtctgaacaaccataacttgctgccttggatctaggctgcaacatcacctctacagggtatatatgctgctcgttaagtaactaattttatatttttcagtgtttgataaaactgaacctacctgctgtttgggctacccagttgtataacccataattacccatacatgtgaacattttacaactatagaatatggaagttgtaggggatggaatgatgacttattgatggcagtttattggttttagtccgttagttcctttatagaaaagaaaagtgaaagaaaagtgatctttaaaaatagcgttgtagatattgttgagatcatcaaaaattgaaaaattgccatcgtggtcctgctttctttttgtcactgtcttttcaatctgttaacataatttagggtaagaattaactaaattggttcgtgtttaggtgtattaaggtagactaattgggtgattgtaatggtaaggttgagttgctaacttgatagtaccaataattgctgggtgttcattgagtgtttgtacatggacctgattggctagctcttgtgcattgttcattttctagataatatggcatgctttctgattaatggcattcctgaattctcactgtaaacatcaattcatctgaatttagttttttccgagtggtttgattgatttcaaaatgcttgggcacagctgatggcctgaaatgctatgatcttgttgaagggaagggtccaactgctgtaaagggctcaattgtgcaggtaaattaaatttggcaatttctcccacctgcacacaattttcattcttcgaatcacagtaattccttcagcggttccaggacaacctattcttggagtgaacctatttaattggtttatattaatactattatctcatataacagagggcttgtccatatttcacatatatcaagtccttgtttctagtttaattcttacggctagctgtaattagtttatcgggctgcttcaaagtgagttcatttggagtctgcttgcacatacttgactatgaatcagcaccttaaaactgattagaactgaacctgctaactaaaatagacaacatgggtgaattatgggcaagtaaaaaaaatatttcgctttggtttgcatttttaatagttgcattagtatgttgcacagtcaaatgagtcgacctgcaatttgagtagttagactgtgtgactatcttttttaaaatatcctacagttttaaattttgcaaacttgatgctgtcatcctaggatgcctcgattgggtttgctcagtacgtccaagtctgaacattttgggggttaattaatagttcatcaggaacaacaactaccacacttatttaattcgtgaacattttggaggttatacatctatacatcagatgaatttcactgccggttttccttgtttgaattaggatcatgatatttatttattagtatactgatcattttagaaattatagaagtgcagtaaataaaaatataatgaagtaatagtggtattatttgggttaatagtttggtgataaagtttcattttactaatagaagatgtatggtttttttcttcggaaattactaataaaagatggttgccacttaattaaggtatgagatccaatcaatctggtgtttaatattcaaggaagttatttgggttaattgatcattttaggaagttatttttgtgtattaggattccagtgaatagctaagttgtcttcttgttgtgttgtagtaataaggatcctgattgctatatgccaataatgtgtacatcattaagggctaaagaaataccttttgtcatcctaaatgaagtaatcgcaggttaaatatcacatcaaacaggtaattgctatttttttaaaaaaaaaaaggatctggtgcatacatgagtcttatttgtttgtgttttcagttttttttatataggttgagaagtttgtatcctattcggtcatgtaattcctttcgttggattttgtatgtaatttctttctttggattctgtatgtaattcctgtactgtaattctttataatcatgtaattgtatttgaatccacttaaaaggctaaaactatgattgagaattgaagacggaaaaaaacagcgtgcgctaaagaaaacggcgccaaaaaatcggaagtgcccacatgcgcgatggaaaaaaaaaaaccatacgcacgaaaaaaatacaggaagcattgcgtattttttaattagatagagcgacaaatagcagttactggcaattttcctggcaccatcggcagagctaaccgaccgcaccagtgcacagtgcaccaccagctcgggagatggatccgctgcttcccttttccattgctgccggcgagaacttcagactcgttgagaagggccgcacttgaaggttgcatacccgatgcacccatgacagatgatcccaaacggttgatattatattttctgatggcattttctttattaccacacttttttccacatcatagtgtatatcttttatttatgttaatcatataataggaactgtttttgctcgtttaaacttgtgagacgatcttgaaattaacagacagatctcgcaaaaaaaaaaacaaaaatctgtgagcacaccctgaagattctttccgactgattgtatttgtagagcataagaatttaacatgaaatttttatttgtaatttgcacaaaatacaatccatttcaattttactaatgaataaaaaataactgagaaaagtacaccaaaaatccaacagaacaaatctaatgaggccatggaataaaactatgttgatgtatgtactgtaaccacatcaatgccctgacaacaattcctatccctcagaaaatctagtttcctcccacctaaaatgttcgtgctacttctttgcatccgtcatagttaacacactgtggttttgcatctaaaattttggaaaaggaaaaaaaaaatctatcaaaccattgaccaggaaggcgtctatctgacgttggatcaccacaggaaagaattaacaacagagccatatcaaattctgtacttcttgatctgggaataacaataaagcatatcgcacaaccaaatcatctctttggtagagattcacttcgctctctttgcacggctcatccacttcttgataggaaatacagagagttttgggctgcctgcttctttcggaggcgattctgatgtctcttccttccgctcatcagtttccttttcatcagaatatggtagcaattcaaatgccccacgagcaaaacctctagcgatctgcattaattatgtttttaacaagtttcaaaagcaaacgacaacacggttaaagagtcatgatgacatgcaaatgaaaaagtacaaatagcataccttcaacaaaatccacactttaagagagctgctgaggagccctagttttgttttcttgcctgatgtcaagtacgtgcacatctcatggtcaaccctaagaacaaatctgggccatgattttggtttctcagggtctgatttatgtccagaggcagcctgatccattagacaaggttaagaggaacattttgtttttaataacaaataagttaaacactgattatactatttatagcatggagttctagcttctggttgtctacatggagatatagtaacatttggaataaaagacttcataccaatatcaacaaagtcatattcggaaccaatatcagcatgaaagaatacaagcaagctgtttcagtttaacagattgttactgctgcttgaattttgtctagattatcagctgcatactggtcagtgcattcctttaaacagtactacatccctcctctatgttgttattgacaattagtgttcgagtgttaaattaatatatactaccaaagattttatatgatgaaagtattgaaccaaaatctagaactatacggtcaaatctcagaaagttcaatagcaaggatttgaggatgtcaactaaaaaataattgagagattggtaagtggtaagtttgtaggacttacaaggcgtcgacagatttcacgctctatcttcgaaaaagaagtatcaagagcttccacacggccaataccatggcaacaaggacacggctcactgatcatgaacgtaacacttggtcgaacctacaaatttcagtcaagattatagacagttaaaatatcaattaattgatgggtatctatattctcgtaaagttgaattctccatagtggacaactacacacatctgaagaagtgcccacataccctttttctagttatctccatcaaacccagctttgacaattctgaaacaccaactgttgatcggtccttttctactgctttcttcatttcttcaaaaactagttttttgtttgctggagcaaaatgctacattagaccaagaatgaaaagaagggagagagagggggaaaaggaaaacaacaatgtggaatacaaatacaacgccacaaggaaaacatcatgatcagacatagctcagtcagaatctaaaatcacaatgaaacaacaaacaatcattagtatcatctaggagtataacagagtatgaaggacgcacaactggtggaaatgccactgtggtagtggtacctgtcgcagtatgaattaataacagtaggaaattaaaaactcaagaaattttcaatcaaatccaagaagactcaatatataagcttaatttgatggcacataaattcaaaacaaaatattcccaaatcatggaaagaatatccagataagaaacaaaatattcctattgtgaagatattataattgtatcttaagttgtgatatgctggctgaatcttacaaaggtatgatgtatgtttgagtacagaatgtagagtccagtacaagggttacataataaagtgagatttcaggtcaataaacatcaccacatgttaggtgcatgacaatatgccaaggcacaagttaaaaagttgtattcaaatgacaaattttagcaaatacttaattaaacaccaggcagcagaaaagatacccatgtacgatataaattcctatgagaataaaaaatcaacaagttttttagaaaaacaaacaagctagctgcaagcataatggagcatacggcatgatgaaatgcaggtatgaggaaaaccatttcacactataattaattctacaagttgatatcttactatcatcggtcatatcaataaaatccacaacaataatgccgccgatatccctcaagcgcaattcacgagcaatctgcattcaagaaattttgcatcatattcaagtttgaaattctaataaatgcatttccccactcgaattcgatgtcatctatgaatgagtcactgttagcctatggctctatcaaaatcctgttatttcatcctgcttgtttgtgagtcatggatggggtaagggtctgaagactttccctaagatactgctagagtaccacgtgtaacagtacaacgcccaaaaaattgaagaaagtaatgactgacaccaacattgatctatcattccacaaaaaattgattataatcttgttccgtagacggagaagcatccttttttttcgttatgcaaaacaaatttttgtttgaattttgtttcagggctgcagg

SEQ ID NO: 6539 - DNA, 20487 bp, Oryza sativa
attcctgcagcccttccttctccggccgaatcaatagaggggaaacaatctccgggatctcctctaccttttctcctttggaatctttggctaaatcgctttggaaagagttggattcgagttcgtctcggatttgttcttcccgagctttccttcgccgttgccgtcgcgtgggccttcgccgccgcctccgagcccctttaaaaggacccccggtgtctcctctacccgtcgccaccttcgccttcgcctctcgtcgtcggaatcgctctagcgccgtgtgccctagcttcgccgtcgccgccgccgctccagccgtgctccgccgctgttccagacgtcgccgtcgctcgggaagaccgtcgtcgtggtcgccaagtcgtcgccgtcctcgtccgccccttcgccgtcgccggagatcgtcggagcttcgtcgccgtcgacaacccgaaggtttccgccgtttcctcctcgtcgccgtcgtcgttcgttgtttttccgccgccgttttggtcaccggtgtgttcgccgcgtcgtcctctacgtgctggtgccctccgtttgcgtcctagtgccgccgttcaccggcgagcgtgcgccacccgagccgtccgctccgccgagccgccgccgctgtcggtgacgtcattgccgacgtcatcggggtcgtccgccgtgagccggtcgtggatcgttcgatctcggccgtccgttttggattggatcgatctcggccgtccgttcgcgtgaaccgccgcccgtgcgcccggtccaccaaaaccctagccgctgacgcaataaaccctcttttccttttcaaaaataattcattattgcgtcataattcaattttaaccgatttaagtgttttaatccgattaaatctttaaaaattcataactaattcatcttagctccgttttagttggttcaagtctctaaatttttctaaaattgagatctacacattaaaaatatccacatgtactgttcatgcttgtttatgtgctgtttttgtgattttgctcttttctgcttagattccgtcgtttccggagagtccgttttcgccggagaagagtttgaagagttccaaggccagcaaggcaagtcacacagatcccaaacaaccctttgagcatgttgatcctatttaaagctattgtttcttttcaactattgcatttattttcgaatgtcattgggtggaattaacctattgattattatagcccttttgttcttgattactttattccttgataccttgggttataataatttgactagttgagctttatttatattggttcaactagatattagatataattgcttagccctgcttagaaaccttagcacatttatgggataactaatgattcactattatttcatgatggcttattgatagttcacgatggacaatcgtgattggttaattaattaatgtgccaactaaaacctgataatggtgggttgtgagcacatggttttgatggtcgtgctcatgacaattaaggaccggttcacgagtttcggttgtgaaacatttatcgtgccaaccacaagccagcatgggcaacggctttatcttttgtatagcatggttcattgcggggcaccagactgagaagtggcggagataagcccacgggggtcgctggggagtccatgccttgtttataagggggtgattatgatccaggaaggtgcgctgcagtggattgtgttatgtgaggggtattgtcacaactcctttccgaggtaccgtggtggtattgaggcacatggtgacatgatgtggggttgtgtcttgtgggtacagtggtacacctctgatcagagtaaaactattcgaatagccgtgcccgtggttatgggcgggtctaacaatgtctttcgtgattagtctcacccttctcaccatagtaaatgatgctataattggtaataatttgattagctcctggtatggaatagtaaaactattcgaatttctttcactgacagtgggccccacaccctctgggacccacatgacagcctcccactctcccctcactgcatccaccgtccccccatgcccaatggatgctcaaggaacacaatgaaagcaccagccacctctctctctcactcccccactccactcttccttatatcccaagccaaagcaccagaagcaacggcacactccccacatcgcgttccaagtccaagaaaacacaccccacacacagaatgcccagagctcggccgtcttacccggctccggcgaattagccgtcgtcgccgtgcatccccggtgagtccctctctcttccctcctatggaacgtgacctacgcatcacgccgagctcacccataccccttttgccctaggaccaatctgtcgagcacgtggtgggtgtcaccatcctcgccgccggccacccgaaccgccgacgccgctccggccgccgttcctcaccaccgaagcaacaccaagctccggtgagttttcgccggattcctcgtgcatgcaccctctgtggctcatctctaacacccccgtactctcgaagttgcagttcgcgccttgagtcgacccggcgacgtcgacgccggagttttgccgccgttggccaacaaccaccacctccgccgctccctggacctcgctgcctccgtttctctacttggtgagcaccctggtaccatatgagagcacatgcactaaccctttccactaaccaagcctctgcatgcacatgcatgggcataccgagacacaccgccgctgtagctcatgttccatgggctacagaccaccgtttccctcaccaccaccactcacggatgcgcaagaacgtcctctacattttctcttttgggctcgaaccgattcgatccaccgatcgccgccggtgagccatagaccgagctcagccatggctgctcccgatgtgagctagctggggacttcatttcttgaatttgatcgactctagggtccaatctgaaaactgccatgactcatattactatagcagcaccttgatggaaataaacaaaagaatagagactcttaataaagtttgctgtccaggtggcagaaggagtgcgggttgattcccccaacttccgagggcctctctgcaaatctactttcactgacctgtggacccggctggaatccaatttcgaaaattgatttctattttggtttaaaacagagaatgagcagaacttctaaaatttgtagaaaattcatcttaacttcaaaaattgtgaaaccagtttggttagattcataaagctgtgaactattttacaaaaatataaaactgggtactttctgtacaaacttttcctttattttgttttgccataatgttgcctagaacttgttaaatccataacaaattgaatatagctataaaaattgtgaaaccacttctgttaactttataaaatcatgctctgtaagtttgtaaaaggaatttgttcacttctgtacaaaaatgttgcttaataaaacttagccctttttaaaccctttttaattgtaaaatgcatatctctgtaaataaaaaagtgacaaaataaaaattccttcaccagagaccacctaagaccagcacacactcactgcataagtttcatgcattttcatgcattttggtttttatgcatttttgtatttatcgtatacgcgtattttgtatagaggaagaatacgtcgaagaagaagagggtgagtttgttgacgaccaggttcaggagtttgcagacgaaggcaaatttgcccctcctttgatcacattgatcctatgttttattgggctaaatgattctattgcaaacatgcatacgttacctagtattacttttggttaaaaaatatataaatgtgggaatggtagatatgacctaattgctgcataatccaccttgaaatattgaatccttgctggttgtaaccatagagtgcttttgaatacaattattgtgttctttgggattatactatgcttatattgccgctatatgcttatattcggttaccgccttgcaaattactcgttttgataaatgttatatgtgaaaatggttattttgatgttgctggacagaaatttaaatgtgtgagtattgtgaactgaaaatggagataacttgtttttagacttgggcggcgagtagtgtacatatggtggtagttgtacaccgatagggggagcgttcgcccgggtcgattaaggaccccactctatgtcaccaactaatgaaaacagtacaaaccacatgtgctaagtatgggctggcctcaacctattaagttgtttagagtttagccttgcatcttggtaggccgaagggtatgggttaccgggacttggtaacttatcggaacttcctatggtttgtgatatgatgaaattgattaatgatatgtggtatgtgatgattttagtgggtagtctatccaatacaacggtgtcgtgcctcgtgagggattccgggcctgggttccttactgcgctaggttaaagcgtgggcccgctacctagtggcgctaccttgctagtagcgtgggtaaaacacacatcgtgctagtgcaaggctagacaataaacaatgtaacggttccgttatgacctctagatcacactcaatgtgtagagtgtggtgataccgacgggtatcggaaaaactagagcgatccatatcatgtgggcttaaaagttgtacaaactctgcagagtctaaaactaatcgattagccgtgctcacggtcatgagcggcatggtgaagtgtcatgagtataatttgtgattttgataaactcttgtgaacttggaaaatggttggaatgttttgtttgtgaacttgggtaaagttcggtgaatggtgatgagatgatggaaagtggtgatgatctaccttgaggggtagatgtgtgttatttatccatttacattacaagttttacttactctatactattgttataaaattccgttgcgaaacatgttgtgaactaaaattggcatttatgtaaattaacctatacacagcttatccttgaatatggccaacatgtagaatgctaggattgcttccgacttgccagtacattaatttgattaatgtactgatttcttgctttcttttacttgtttatgctcagaccccgctgcaggtaatgactgtttggatgaggagtttgatgcagcttgtgatgttgcagatttccaggatggttctaactagggatttaccctagtcggtttgcctatgggcttttgggtagcacgcttaccgcatgaaccaatatttatggcttgtcgccaagtactacttagaaccttattaagattatttatgcttattgcttagaaccacttattatttggatatcatgcttgagatgatttatgtgaggctatgttgcattcctggacaactagtcccacatgaggatgggtttgaaatggttgagataaccggggaatatgcctttgttgagatcgagtctctggggtatgcttttagtctccaccatcgagtggttgacgggcgtatgacgtagatgactggtgtggctattccaacggttgtcttctatttcatatccgatggcttagagcctatgtagtgcacccttcaagacatgtcggggtctgcgatgaggttggatggttactgtatttatttgggctttatttgagaccccatccatccagatatttcgcgctgacatgccttggagcgttgcaccacctaggctttgggacgtccttacagctttggtatcagagccgtgaccgactgtaggaaatccctggaaggaatagtcgtagaatggtattctcaaaactatcttggaaaaaaaattatttgtgaaaccctatttctagaattccaactccttctaggtgatactttattttgaaaaacggttttctctcctcttgatcctataggctacggaaatctcatatatatatgctgccatctgcaaatatagctctcattcaatataatcaacttaaaatgagtgccaactaaattagaaactgaaaagaaaagcttatgcaaaaccttcccatgagagacgtttgtttttgccaaaaatgcttaggttaactagttaagcataggtttttgaatgacttgagcaaataaaattttgctagaacttctaggatgagatgctgggtaggtcgtctcaggttcagcaatgaaccctcactaaaaattctaaatgccggaataaaaaaaaaaacgtcttggcctagcatgggtaggatggggcaggatgggtatctaggattttgtttgctttctgtagctttcaacagtactcacccctgaaccagattagcttagtatcaacttagcttcatgtagaaaaattttgataatttttggcaactaaaacatggcttagtaaattatttagcaactaacggttatctgtcagggactgcagtcggcagtcttaatctttttgtacaggatagaccgtaggtggaaaaattatgaagcttggccagttgttagaagacccctgtaggatgttgcttgaatttttgtgtgattttatcttcagttttgcatggtctaaaaattcgagccacccactgaaccctggaaaaacagaactgcaccctttagctttaaaatttcttgtaggtcttaaaacttgcttaaaaattcctaaaattttgaggggggtagataacctatacagaaacttagttgtgcaaaaatttcctttttagcagccacctaaataggctttttacccctgttgttgctgtggtttgctcctgtccagaacctgaaaactaagtcttcttgttcttccttgatcctccctttcacttaaggtttctaatctaggtaatcttgtcctaatcttgtagatggctcccttggaaccctcttactattccggaggcttcgtggctggcaccatgcagcaaacactctgggaaatgatgcagcacgccggctatactcggcaaccccagtacactgtcttcacgcgaaactatagcgcctctcaaaggagctatcaggttgagctggtccttccatcgaggggcaacgacagacaccacgatattgtgtacggcactgggtggactgccgtgggagctatgaatgatgctgcctacagcgctaccggctttctccgtgacacgagcccgaagtgcgctgtggattaccgctttgttccctctaggccgggtgctagtcgctttgccacctaccctggtctggaatctgctcaaggggaaccgccctcccctcacctccgtttgggctacttcgttaggtcccaggagaggatcatcgaggatctgatgcatgagctccatcgagcgaggcggcgcatcgctattctcgaccgtgaggtggaaccccgagctgggatttgggccatcccacccgaggtcgtgtacggcgaagacgccatgctaccagcggaggaggagctgccccctccatcaggttactacaagctgattacaccatctcctactgtcaaagggcatggtggtagtcaccgggttgttgctgatattccacccccttctggcctccttgttgaggggccaaaccacatccgatattaccgcgggagctgttaccgtttggtgatgcaggcacctccgcctcttgatgatgatgcggagatgacttctagctcttcgggttctcccggaccttctgacagcacctaggcttgttctagctaggtgacttagatagtttctttagcatgagatgtaggatgacctctgatgtactccccttagccacattttggatgtgtgcgcgttttgtaaacgtgttttggtggctatttatgtaagctcttttgtatggaacctttaatggaatgaatggcgcatgataagcgtgtttatgaaccattttcgagtatccatgcttgctgtccagaaattctaactgtgatgatttgttgttatcaaagttaaattactgcttaaatacatgcttttaagtgtctatacctttccgtacttttggattgagttaacttattgcaattcctttaagcactacttctatatttctgtccttcctttcaacttgaatcatgccatgtctatcaatctcaagaaccttttccacttccgtgttttgtgtacagaatgcccgttacccgctctaggagcaataaaacggcagactcagcaagaaaccaaaacaacaaccaccacaactcgcagcttccaccacctcccactcggaattcgggagcgagtggtagccgtccaaccggcgcgatggatcccactttggctcagattctcgcggcgcagagtcagctcttcgaccgcttggtcgcgactcaggaggccttgggcaatgctctcctccagaacaaccgtcagccacagtctaagctggcggaagtgcagcgtacacagccacctgtgttctctgctgctgctgatcctctcgacgcggatgactggctccgcgatatcgagaacaagcttaacttcgtccgttgtgacgatgaggagaaggcgacctacgccgcctactaccttcagggcgctgcagctgcctggtgggagacttacaagtctacactcccccagggcaccgccatcacctggaacgtgttcaagcagggcttccgcactgctcacgtcccagaagggcttatgaaggccaagaggaaggagttcctcaatctcacccagggggacttgcctttcatggagttccttagtcgcttcaactaccttgcacggtatgcgactgatgagctaggcactactgaggcgaggaaggtgcaactttgccttgatcgccttagccctgagttgaagcacggtctctctacccatgagatcgacagtatgaagacccttgttgacaaggccctccgctgggaggcaagtgagaaggaagtagctgtggaccgcaagcgcaagttcttggcgcgcagggctactgtcagccgttcgagtcgcccacgcacttggcagcctgctccagctgcacgtcctgcttctgctccaccgcagaggctccagtacgccgctccacgtctgcctgccgctatgccaccgcaggccaaccgtggtgcaccgcagcccggaggctacaaccgtgctgcaaatgttaactgcttcaactgcgggaagttgggacactactccaacaactgtccttacccgcgtcgcaccggtgctcctccgccgcgccccgcagcaccgcagccccgtcctccacagggccgtggcgcccctgctgctgctccacgtgggggccgagccgctcccaagccggctcagaactttgggcgcggtcgtctcaaccacgcgaccgcagaggaggctgttgacgcacccgatgtggtgctaggtacctttcttgttcactcagttcctgtttggtgttatttgattctggtgcatctcattcctttatatccaccaaagtagcaaaacaaaacaacatagccaccacccttttagacacccccatgataatccaatctcctgggtcaaccttcaaaaccagaacaatatgcaaggatgtgcctattctcattgataaggtagagttcaaagccgacctaatccaagtgagttccttaagtttagatgtcatcctaggcatggattggctttccaaacacaaggggaatatcaactgtgcttctaaaaccatctcttttgtcaacaccaatgggaaaacagccaccttcacttccaataaagccaccacctcaaaacagccatgtatcaagtctctcatcaaacctgagcttgaatcaatacccgtggtgtgtgaatatcctgatgtcttccctgatgagctaccaggaatgccacccgatcgtgacattgagttcgtgattgatcttgttcctggtgcgacgcctgtcgctaagcaaccctaccgtatgaccagtgatgaattggttgagctcaagaagcaaattgatgagcaactggagaagggtttcattcgacacagcagctctccttggggctgtcccgttctttttgctccaaaaagtgatggtacgcttcggctgtgtgttgactaccgtccactaaatgaggtgacaatcaagaacaagtatccactcccccgcatcgatgatctctttgaccaaatgaccggtgcgcaagtattctccaagattgatttgaggtctggatattttcaactcaagatcagaccggaggatattccgaaaacagctttcagaacccgctatggtttgtttgaatacaccgtagtttctttcggcttaaccaatgctcctgccacttttatgaacttgatgaacaaggttttcatggagtacttggacaaatttgtggtggtgttcattgatgacatcctcgttttctcgaagaatgaggaagaacacgcacaacatctaaggctagtgcttgacaaacttcgtgagcatcaactctatgcaaaattcaacaaatgcgagttttggatgaatgaagtggcctttctcggtcatgtgatatccgggggtggtatcgcagttgatccaagcaaagtggaaagtgtgcttaactgggaacagcccaagaccgtgacagaggttcgagcttttcttggcttagccggttattaccgccggttcattgggaatttctctaagattgctagaccgctgacccaacttctcaagaaggagaacaagtttgtatggtcagaggtatgcgaggcaagtttccaagagttaaagaaaaggctcacaacggccccagtgcttataatgcccgatatccacaagaatttcgatgtctattgtgacgcatctcaaaatggcctcgggtgtgtattgatgcaagaaagaaaggttgtggcctatgcttcacgtcagctgcgccctcatgaactcaattatccgacccatgacttggaattggcagccgtggttcatgccttgaagatctggcgccactaccttatcggtaaaagatgcgaaatctataccgaccacaaaagtttgaagtatttcttcacccaaccagatctgaacctaaggcaaagaagatggttggaactcatcaaagactacgatctcggcatccattaccatcccggtaaagccaatgttgtagccgatgcactcagctggaaacttaaccacatttctgcttctgaacttgtcacacaaccagagttgttactggaatttcagaagctcaatcttggtgtggttgaagaaggttttgttactgccctagcacttcaaccgaccctcctttctcagataaaagaggctcaactcactaaccaggaggtagctgaaattaaaaaggaaatggcaagtggcaagccaactatcttttccttggatgatgatggtgttgttgttcatgggaagcaattgtttgtccccgacactcaacatcttcgggagcttattcttacagaggcacacgagtctcccatgtccatccatccaggttgcactaagatgtaccaagatatccgctctctttattggtggcctaccatgagacgtgatattgctgcatatgttgctatttgtgatgtgtgtcagcgtgtcaaggctgagcaccagcgtcctgcaggtttgcttcaacccttgcaaattcctgagtggaagttcaatgaagttggaatggatttcataacaggtcttcccaagacttctaatggacatgattccatatgggtcatcgttgaccgcttgaccaaggttgcccatttcattccggtgaatgtctcctacaatggtgcaaagctggcaaagctctatttgactcacatcgttcgcttgcatggggtaccgaaggccattgtatcagaccgtggtccccagttcacttcccggttttgggagaatcttcatgagctccttggtactcaattgttctttagcacagcttttcacccacagactggaggtcagactgagcgcaccaatcagatcttggaagatatgctcagatcttgtgtcctcagttacaacaccaattgggagaaatgtctgtcctttgccgaattctcatacaacaacagttaccaagctagcctccaaatgtcaccctttgaggctttgtatggaagaaagtgtagaaccccactcttctggtcagaggtgggagaaagacaactctttggtcctgccgttatcaaggaagccgagcaaaacgtcgctctcatcagaaaccggctaaaggaggcacagtcacgccaaaagagctattccgaccgtcgccgtcgcgaattaagctttgaggttggtgactatgtctatctaaaggtctcgccgttgcggggcactcgccgatttcaagtgcatggaaaattggcgcctcgatacattggtccatatcgagttcttgccaagaggggtcaagttgcttacaagttgcagctgccatctcaactctcagatgtgcacgatgtgttccatgtttcgcaactcaagaagtgccttcgagttcctacggagctcactccgctagaagacatcaatatccaacccgacctctcctaccaagagtatccaatccgcattctagaggaagccgagcgacacatgcgaagccgctccatcaagatgctcaaaatccagtggagcaaccacactcccgaagaagcaacatgggaaagggaagaccgccttagagccgattttcctagtttcttctcctagatcctatcaaatctcggggtcgagattttgtttaaggggggtaggtttgtaacatacccaagcctgtaaacctgagaactaaatttaatttaaatgcatcatgtggttgtggagtgattttaattgtttttggatcttaatcatctcatcacatgcatcttgataggcctagagtcacaaaaataattaatctggtaattatatgcatccaaaacttccacaaaaattctcaaaaatacattgatatgtcagaaatcaacccacaaattttcagagtttttcagtaaggattgctaacttgttgatctcctttaatctctccaaaaatcatgaaaagaactgcttagcagattcaaacttgctctctctgtaaaatttatttcaaaacctctttttgaagtttggtttcagccaaagtcttctactaactttcttctagcatcctgaggagtggcacaccctggatcactctctaaccctttcttctctccctccaaaaatccaatcagctgctaactgcactgtcaactgctgctaaccaacactgtcaatacatgttcatcactccatcaaacctaaaccagagacttctaacccaatccacttcagcacatttactctccacatcacccctgaccaagaggatatctagcccagatttcttgctgcacaaaatccaccttgaatcccctccaaagatccttggcaggcaaccctctttgacttagcctccaaggctattttcgaatttctttcactgacagtgggccccacaccctctgggatccacatgacagcctcccactctcccctcactgcatccaccgtccccccatgcccaatggatgctcaaggaacacaatgaaagcaccagccacctctctctctcactcccccactccactcttccttatatcccaagccaaagcaccagaagcaacggcacactccccacatcgcgttccaagtccaagaaaacacaccccacacacagaatgcccagagctcggccgtcttacccggctccggcaaattagccgtagtcgccgtgcatccccggtgagtccctctctcttccctcctatggaacgtgacctacgcatcacgccgagctcacccataccccttttgccctaggaccaatctgtcgagcacgtggtgggtgtcaccatcctcgccgccggccacccgaaccgccgacgccgctccggccgccgttcctcaccaccgaaccaacatgcatacgttacctagtattacttttggtaaaaaaatatataaatgtgggaatggtagatatgacctaattgctgcataatccaccttgaaatattgaatccttgctggttgtaaccatagagtgcttttgaatacaattattgtgttctttgggattatactatgcttatattgccgctatatgcttatattcggttaccgccttgcaaattactcgttttgataaatgttatatgtgaaaatggttattttgatgttgctggacagaaatttaaatgtgtgagtattgtgaactgaaaatggagataacttgtttttagacttgggcggcgagtggtgtacatatggtggtagttgtacaccgatagggggagcgttcgcccgggtcgattaaggaccccactctatgtcaccaactaatgaaaacagtacaaaccacatgtgctaagtatgggctggcctcaacctattaagttgtttagagtttagccttgcatcttggtaggccgaagggtatgggttaccgggacttggtaacttatcggaacttcctatggtttgtgatatgatgaaattgattaatgatatgtggtatgtgatgattttagtgggtagtctatccaatacaacggtgtcgtgcctcgtgagggattccgggcctgggttccttactgcgctaggttaaagcgtgggcccgctacctagtggcgctaccttgctagtagcgtgggtaaaacacacatcgtgctggtgcaaggctagacaataaacaatgtaacggttccgttatgacctctagatcacactcaatgtgtagagtgtggtgataccgacgggtatcggaaaaactagagcgatccatatcatgtgggcttaaaagttgtacaaactctgcagagtctaaaactaatctattagccgtgctcacggtcatgagcggcatggtgaagtgtcatgagtataatttgtgattttgataaactcttgtgaacttggaaaatggttggaatgttttgtttgtgaacttgggtaaagttcggtgaatggtgatgagatgatggaaagtggtgatgatctaccttgaggggtagatgtgtgttatttatccatttacattacaagttttacttactctatactattgttataaaattccgttgcgaaacatgttgtgaactaaaattggcatttatgcaaattaacctatacacaacttatccttgaatatggccaacatgtagaatgctaggattgcttccgacttgccagtacattaatttgattaatgtactgatttcttgctttcttttacttgtttatgctcagaccccgctgcaggtaatgactgtttggatgaggagtttgatgcagcttgtgatgttgcatatttccaggatggttctaactagggatttaccctagtcggtttgcctatgggcttttgggtagcacgcttaccgcatgaaccaatatttatggcttgttgccaagtactacttagaaccttattaagattatttatgcttattgcttagaaccacttattatttggatatcatgcttgagatgatttatgtgaggctatgttgcattcctgggcaactagtcccacatgaggatgggtttgaaatggttgagataaccggggaatatgcctttgttgagatcgagtctctggggtacgcttttggtcgccaccatcgagtggttgacgggcgtatgacgtagatgactggtgtggttattccaacggttgtgtcttctatttcatatccgatggcttagagcctatgtagtgcacccttcaagacatgtcggggtctgcgatgaggttggatggttactgtatttatttgggctttatttgagaccccatccatccagatatttcgcgctgacatgccttggagcgttgcaccacctaggctttgggacttccttacagatttaatttttattaaattctccatgattaagtcaactctctggaatattctcggatttttcagagctcaattcctaaatgatacaaagagcagttcagtaattatttgatcattaatgatctaattaaaatcctaaatatataaattgttgtttaattagaattgatcttaaaagcttaaaagagaagatctaattttaatttgctaaatctcaatataaaattgggctagataaaattttgttaaatactttgcttaattctataattcctagatttttctgggatttatttgagctaaggaagtatttttaataaatggaattgcatttcatgaataatttaaactgaaaaaggtttttaaaagtctcttttggctttgggccgaaagccggcccaaaacctctctctttctctctccctccccggcccagtcggcccagtccgccgcgccccttcctcccctctctcagccgctgacaggtgggtcccacctgtcggacccgtcttcctcctccagccgtcgcccggccgaaccctagccgagctgcgctgccgttgcccttccaaattccatcgcccctctctatttccggtcaaattgattgagggcaaatgatccttgagatctcctcttccttttctcttttggaaacatcggctaattttctttggaaaccggtggatttgagttggattcggattcatctctctcctctaaccctaacctttccttcgcgtcgccggtcgccgtgggcctccgtcgccgctcgctagcccctttaaaagcacccccgagctctcctctatccaccgccacctttgccttagcccgccgtcgcgtctagcgccgcctccgcgtagccctagccgtcgccgtcgttgccgtcggttcagccgcgccgcgctgccgttgcagccgccgtcgtcggtcgccgtcgccaccatcgggatcgtgaggtcgtcgccgtccccgtccaccgcttcgccgccgccgaagaccgccggagcaccgccgtcaccgtcgacccgaagaccgccgccgcttcttcctcgtcgccggcgccgtccgttgctcttccgccgtggttttggtcaccggtgagttcgccgtgttgtcctctacccgttggtgtcctccgtttgcgtcgttgtgccgtcgttcgccgacgagcgcgcgaggccgagccgtcgccggtgatgaagtcatcgctgacgtcaccgctgacgtcatcgtcgccttgtcccgtgaaccgcggtagatcaagttgatctcggccaccggttttggatagaatcgatctcggccgttcgtttccgtgagcggccgccgtgcacccggttcaccgcaaaccctagccgctgacgcaataattcccttttccttttcaaaaataattcattattgcgtcataattcaattaaaatctatataaaggttttaatccgatttaatctttaaaaattcatatctaattctttgtaactcagtttaatgtggttcaagttgcaaaagttgtataaaataaagatctacatattaaaattatccataaattgaattaaatttatttaattctttttaaatgggctttaattagatttaatctagtaaaattcataataaattcatctgaagtcagaatgaggccgttcaagtctcataattcatctaaaattatgatctacatgtttgtttactttatatgtactgtttatttggtttttattagtctttttcttcattttgcgtgttagcttgtcgtttccgtcgttgcgaaggttcgcgagtgcgtcggaagtgttcaagaagattatttgaagaccgattattgcaaggcaagtcacacagatcctaaacacaatcctttgagcatgttgatcctatatttaaattctctatttatttcaactgtgcatttattttcgaatgtcattgggtggtgtgaatctattcctttgttatggcctttttgcattgattactttattccttgataccttgggttattataacttgactagttgagctttatatattggttcagctagatattagatatgattgcttagccatgcttagaaacattagcacactattgggataacttatgactcattattatttaatgatggtttaatgatagttcacgatggttaatcgtgattggttaattaattacttgccaactaaaacttgataatggtgggttgtgagcacatggttttgagagtcatgctcatgacaattaaggaccggttcgcgagctactgttgtgaaacattaaccgtgccaaccacaagccagcgtgggcaacggctttaccttttgtataacatggttcattgcggagcaccagactgagaagtggcggagataagcccacgggggtcgctggggagtccatgccttgtttataagggggtgattatgatccaggaatggtgcactgtggtgagttgtgttgtgcagagggtattgtcacagcctctattcgggtactttccagtatcgcgacgcatggtagacatgatgttgaggctgtgtcttgtgggtacagtggtacacctctggccagagtaaaactattcgaatagccgtgcccgcggttatgggcgggttgagcaatgtttttcgtgattagtctcacacctctcataacaattatggatgttatacctggtaataatttgcttagctcctggtttggagttagatctgtacagccgggtatggttgttcaggatggttgggcctgtgcagcatgggtgtgttgctcagtgttgattaaaatttctgattaattactccactgtttcatttctcttaaatgttttgctaaatgctgcttttgcaaatgagcctatattatgccatcctttcgtatccttgtgcacttgcatatttgctgtgtggcttgttgagtatgtcatatgctcattcttgcaataatcaatcaacctcagttgaagaaaaaggatctaggaggagaagacgtttggcttataccctagttgagctgcctgtgggagtggagtcggagcttcgctagattttattttccgctgcagttttcttcacggtgaggactaagtgcctcttaagtaagtacttatcgttttagttaatttgatgaatctgtatattaaattgtcagtttgtgtacctcggctgattcctggacgaggattttatgcacaaataagttcggaaattactagtgaatttttgggcgtgacaccagactgggccacaaactaagccttacccactagacatgtggaagtacggtagtgctttgcaacagaggcccgaagaccggtccttatatggccgaggtgctactatcaaaaccatgcaccctgagcccagcctaaaaccattttgaggattttgaatagagggggaggtgtgaatccaattccacaataatccaaccattccatagtgtccaggtgatatgaacattcccaaaatctagagttgtaaaaccacctaatgttgcctaattaaccagcgaaacatctacctaaattcatactagtggtaccatgcatagggtacccactagttgggggttttgtttagtctagggtgaacaaggtaataataacaataacaataataaggtcaaaacaaaggtaaataggcatggctagataaaacagtgataacgcgggaatttaaataaagcgataatgcattaatttaaatcaaaataattttataaactgggattcaatatgttcaaggatgatgtgacttgccttgctcgctttcccaaacgtcagcttcaacctccacgaagagtggatcttccgaagctgcagcgtctacacgaccaacggaaaagaaaaaggcttttactctaataaactccatataaaaagcaggaacaaagcacaaaaatgggttcttgacttcttaaggaaaaattagagacttgaacggtccaattccgagttcaaatggccaagttatggccatttgaagtttatatgctctttaaatgaatatttgcgaatttcttcatttaaattttaatttaaaaaaaaggtttattgcgtcagccgaggggagggggcgcgcggaccgggtccacgggagtggggcccacacggcagcctcacggtccacggtggaccgggcgcacccgggctcgcaccggccagcgccgtggaccccacacgtcagccgcacccgatggcgcgggcggctgacggccgggccccacgcggcagccactcggcgcgcccgggggcggccatgccggcacggtcggcaggaggcggcgcgcgcgcccctatggtcgccggcagcggccataggcacggcgtagaggcggccgagagaggggaagggaagggggaaaagaggcggcggtccacggctcaccctaggtcgacggcgacgacgaaaaaggcggccggagcagaggaaggcggcggcgcggcttgggtcgacggggacggcggcgctccggcggttggcgagctcgacgagggggtgaacgggacggcgacggtgcggcgaagccgaaggaggcgacgccggggcgggaaacggtccggggcgacgacggcggcggacc

SEQ ID NO: 6540 - DNA, 20236 bp, Oryza sativa
  unsure (1)..(20236): unsure at all n locations
cctatgcaacatgggtatgttgtatggtgtttatttaatattgattaattattcaactgtttttactattctcttaaatatttattaaatgctgtttctgcaaatatgctatattatgccatcctttgttatcccgtgcacttgcatatttgctgtgtgacttgttgagtatgtcatatgctcattcttgcaatattcattcaccagaagaggagtatctcagtgaaggtgatgatctggaggattaggcttgttcttggttaagatgcctgtggagtggagtcgccatagctgttccgtagtttgttatcgttttatatttccgctgcgtagaatgttattctttgagaggaactatctacctctgtaataatttttatttgcgagtattaaatagttatttatttgtactctattatcaaattgtcattgtgtgcctcggttgattcctggacgagggtttaacacacatgtaagcgtttggaattttggatagaaattccgggcgtgacaagttggtatcagagccaccttgaccttaggataagccaaatggtaaaccttaagtagccttcaaaatattttgaaaaaaatagaactgctcttctctattctcttataaattaattaagttggcagcacatgcaaggttatgcaaaaaaaattatttaattcaatttcttttcttataaaagcaaaagttgttcttctcagaatgtttctttttctctttaccaaatcttattgattagtcggcactgtacatctattatggtatcgatttaatcatgttggcactagtactactcatcccttttaatggtgacattgtactgtgcttatagtaggtcttaggtattttggttttattttattcacttgttcaaactgatttgtctctgtttaaaagttaaattcaaaaagaaaaaaaatagctttgtatgtgtcttttctttttattttcttcctttttggcctaaatcagttaagtctagttggtacagctaacttaaaaatgtgcattaattcttctcttctatgtttctttagatgccgccccattcaccgagaaatttgttcaaggtgttaggattcgtcagggagctgaggttgatggcttttgaggtaggatatgaagttgctcccgagtatcgccaaatttcccatgaccccgacgaggagaagtgtcgtgttcgtgtgacgttggctagtgatcgtgaagaccttccgtccattaagttcgaagctggaggaagatcgtacagccatgcttgtcaagaagcagctttggtggccattggagagttgcgtcaacgctttgaagaagagttggattcatcagctttccagtatcatcctcacaagcctcatggacaagactatggaacctatacctgtcctgatggtgaagagagtgccactctgatgcatgcggtgcatatgcttagtgctatggatgcagtaagtgtggagcgagacaaagcagctcatgacagggaaaactggaatcgaggcaagatttgcaagttggagagcaaggtgtaccgtctacagaaggaattagctgaacttaaaggagaaacgccgccgccaacacccaagcttcgcctcaccgcaagaaagagaacctgtccgccacctcgtctccagttagcttcgaagattcgcgtaaggggtgaagttgtgcccgatcgtgctgaacctgtcatcgacatcataagtgatgaggaagaagaggaagatcctgaagaaagagagccagctactccagaggaagaagatccatcgcttcgttccgacgcaaggcggaattagtcgcttagttagatcgttgccgtagttcgctgtgttagattgcttgtttaagtttgcttgtgagtgtgtgggttttagttgttgcttacatcattggtgggatgtaacagcatgagtctagttcttttgcttgtcagagtgtaagatagttggtgagatagtgttaatgcaacttaaatgtaatcatacacagttaagagcaatatagaatttaaattaaataaataactccgttctaagggtgtctctctgtcgttctttcctgttgtctctgcttatcgtcagatggtgaacacgcgcactggcactggaagtggaagtggaagtggaagtggagctactaacaatggaggagatcccacgccagctcagattctggcccaacaaacacaactgatcaatctgatagtgcagcaggcacagaatcagcaggcaaacaatcagaaccagaatccacccccacctccccaaaacaagctggcagatttcttacgtgtgagaccccctaccttttccagcactaccaatccagtagaagcaggagattggctacatgcggtggagaagaagttggatttgatccagtgtactgagcaggaaaaagtttcttttgctgcgcatcaactgcatggacctgctgctgaatggtgggatcattttcgccaaggcagggctgaaggagagcctattacgtggcaggaattcacggccgttttcaaaaagacgcatataccagcaggtgttgtggctctaaagaagagagaatttagagcactcaaccagggatctcgttcggttacgagtacctcccatgatttcaaccgtttagctcgttatgctcggaaagatgttcgcacgatgaaagagcgtcaggagaagtttttggagggactgaatgatgagttgtcctatgctntgatgtctacggatttccgggatttccagcagctggtggacaaggcgattcgtcaggaagacaagtataaccggatggagcagaagaagcgcagggctacccaattcaaggcacaacagggcagtaaccagaggccgcgtctcgttactggacctcaagctccatcgtaccctcaaggaggatcttcatcagttgtccgtccccaacgccagttctacaacaacaatactggtaatcgtggtaatgacaaccgcaacgtggttgctcgtcctgcagcaactccagttcagaaccagcccgtcaggaaggaacagggaagcaagccaggggtgtgtttcaattgtggtgatccaggacattatgctgataagtgtcctaagcctcggcgcgtgaagaacgctccagccccgaacaactccaatgctccagcaccaaaggcacgtgttaatcatgttgcagcagcagaagctcagaatgcaccagatgtggttttgggtacgtttcctgttaactctatacccgcaactgtgctttttgattccggtgctacacattcctttttgtctaaaagttttgcgagcaatcatgggatggaagttattagtcttgggagacctttactagttaataccccaggcaatcaagtattttcgactcagtattgtccttccgttactatagaaatagaagaagttcatttcccatcctcgcttatcttgctagaatccaaagatctagatgttatcttagggatggactggctatctcgtcacagaggagttatagattgtgccaaccgtaaggtgactttaaccaatagcaatggggagaccgtttctttctttgtgtcctctcctaaatctcatggtgcggtcttaaaccaagttgctctacaagagatccccatagtacaagactacccagacgtgtttcccgaggatttgccaggtatgccacctaagagagacatagagtttcggatagacttggtacctggaaccaaccctatccataagagaccatacagaatggcagctaacgagttagctgaggtgaagagacaggtggatgatttgcttcagaaaggatacatcagacccagtacttcgccatggggagcaccagtcatctttgtggagaagaaagatcatactcagagaatgtgcgtagattatcgagcgttgaatgaggttactatcaagaataagtatcctctacccagaattgatgacctgtttgatcaattggaaggtgctacagttttctctaagatagatctccgttctggatatcatcaacttcgaattcgtgaggaagatataccaaataccgccttcacaactcggtatggtttgttcgaatgtaccgttatgtcatttggactcactaatgccccagcctttttcatgaatctgatgaacaaggtgtttatggaatatctggataagtttgtcgtggtgtttattgatgacattcttatatactctaagacgaaggaagaacatgaagagcatcttcgtctagctttagagaaactacgtgagcatcagctttatgctaagttcagtaaatgtgaattttggttgtccgaagtgaagtttcttggtcatgtcatctcgtctggaggagtggcagtagatccaagcaatgtggagtcagtgttaagttggaagcaacccaagacggtttcagaaattcgtagtttccttggacttgcagggtattaccgcaggtttattgagaacttttcaaagatcgccagaccaatgactcgtctgcttcagaaggaagtgaagtacaagtggacagaggattgtgaacgaagtttccaagaactgaagaaaaggctagtgactgcgcctgtattaattttgcctgattcgaggaaaggtttccaagtgtattgtgatgcatcccgactcggtttgggttgtgtgctgatgcaagaaggaaaggtggttgcttatgcatctaggcaattacgtcctcatgagaataactacccaacgcatgacctagagttggcagctgtggtgcatgcattgaagatttggcgtcattatcttttcggtaaccgtacagagatatatacggatcataaaagtttgaagtacattttcactcaacctgatttgaacatgcgacagcgaagatggttagagttgattaaagattatgatatggaaatccactatcacccggggaaagcaaatgttgtagccgatgctcttagcaggaaaagctactgtaatatgtcagaaggtcgacgtttaccttgggagttatgccaggaatttgaaaagttgaacttgggaatagtcagcaaaggttttgtggccgctttagaagctaaacctactctgtttgatcaagtcagagaagctcaagtgaatgatcctgatatccaagaaataaagaagaacatgagaagaggaaaagccatcggttatgtagaagatgagcacggaactgtgtggttaggagaaagaatttgcgtcccagaaaataagaagttgaaggatactatcatgagagaagcacatgaaactttgtattccattcaccctggaagcactaagatgtatcaagacttaaagcaacaattctggtgggccagtatgcgacgtgagatagcagaatatgtggctctatgtgatgtatgtcagcgagtcaaggcagaacatcagaagccagccggtttgttacaaccgttgaagattccacagtggaagtgggaagaaataggaatggattttataaccggtctacccagaccgtcggcaggacatgattctatatgggtagtggttgataggttgacaaaagtcgctcacttcataccggtcaaaacaacctatacggggaataagcttgcagagttatacatggccagagtggtatgtttgcatggtgttcctaagaagatagtgtcagatagaggtagccagtttacttcgaagttttggcagaagttacagttagagatgggtacccgtttgaatttcagtaccgcttatcaccctcaaacagatggacagacggaaagagtaaaccaaattttagaagatatgttgagagcctgtgttctagattttggtggaagttgggataagaatttgccgtacgcggaattctcatataacaatagttatcaagctagtttgcaaatggctccgtatgaagcattatatggtcgaaagtgccgtacgccgctcctttgggatcaaaccggtgaacgtcaagtttttgggacagacatattgcgagaggcggaagaaaaagtgaagattatccaagaaaggttgcgcgttgctcagtcacgacagaagagctatgccgacaatcgtcgcagggatttggcttttgaagaaggagattatgtataccttcgggttacgtcgttacgaggtgttcatcgtttccaaaccaaagggaaattggcaccgcgttttgtgggaccttttaagattctgagtcgaagaggtgaagtagcttatcagttagagttgcctccgtcaatggcaggaatacatgacgtgttccacgtatctcagttgaagaagtgtttacgtgtacctacggaggaagcagatcctgatcgtatagagcttcaggaagatttaacttatgttgagaagccagtcagtattttggaagtaagcgagaggaataccaggaatcgcgttatacggttctgcaaggttcagtggagcaatcattcagaagaagaagccacttgggagcgagaagatgaattgaaatcagctcatcctcatctgttcgccagttcttctgaatctcgaggacgacattccgtttaagggggtaggtttgtcacactctaaaaaaaatcgattaaattaaaaatgcatgttttaaatcattttttagaaattattttaaaagcctacaagctaaaccctaattttctaggaaaattttcaacataaaaatgagctagataaaattttattaaatactatacttgctcctctattttctagatttttctgggaattatttgagcaagggaagtatttttaataaatgaaacatcatttcacaaattatttttattgaaaaagttctaaaaacctcttctttaggttattgggccgattttggcccaatactccctcctctcccgcgggcgagccggcccaacccactcagccgccgcccctcctcctccagccgccgacatgtggggcccacatgtcggactcgtcttcaacctccggccggccgccctaaccgagtccgagccgcctccttctcctctcaaatccgctccaatccgaccccgattcctccgggtttttgaggggttttgatcctctcgttctcctctatctttcccctcaagaaacggagcaattcgttgagtattttatccgaatcgagttcgttttgattttatccctaaaaccgagtttggatttttcccgagtcgattcctctcgtttggagttcgatctcttcaatccaatgctatataaaggaccacctcgtcgccctctttcgtttgccccctctcccgtcctctcccgtgcaccgtagcctcgtcgccgcgtgcacttaggtcgccgccgccgccggcggtcttcagccgcgccgcgccgccgcctccgccgtcgccgccgcttgccgtcgccgccgttaggtgcgccgtggtgagaggaacctcggccacccgtccttctttgccgccggtcgccgtagctcgccgtcgccgcgcaagccgaaccgccgccaccgccttctcgtcgccggccgtcgtcgtgcgtcgtttgtcgttgtggtgagtaccgttgggttcgcctcgtcgtcctctacgtgtacatgccctccaaatccgcggccgaccatccaatctccggcgagttggctaaccctagccggccggccattgctgacgtcagcatgacgtcatcatcttcttttttctttcttttttccaattttctaatagattaaaacttcggaaaatcataactaaataaccgtagatccgttttaggtggttcaagttgctaaattcttctaaaatcgagatctacatgttaaaaatatccacatgtactgtttatgcttgtttttgtactgttttgttgattttgtttatttgctttagtttccgacgttccggaggagagcgtttcctttgaggaaggttccgaagcgtttgcggaagcccaaggcaagtcacacagatcccaaacaaccctttgagcatgttgaacccgtttaaagctattattttattacaaatatgcattgttttcgaatgtcatcgggtggtgaacctttcccagttaattattggccgaagatgactttattttcctatgggttataatttgatagcatgaaccttatgtattggattggttcagctaaatgctctatgtaagtttgcttagccatgcttagaaacattagctaactaaagggtttaattataaactatgttattattattattattgatggttatattaaatggtagctcacgatggttgatcgtgtgatgttaattaattgataattaaaacctggttaaggtgggttgtgagcatacggttttgatggttgtgctcatgacaattaaggaccggttcgcgagctactgttgtgaaacatttatcgtgccaaccacaagccagcgtgggcaacggctttatcttttgtatagcgtgattcattatagtgcgccagactgagaagtggcgagaagtccacgggggtcgctggggagtccatgccttgtttataagggggtgattatgatccaggaaaggtgcgctgtaatgggttatgttgtgcaaggggtattgtcacaactcctttccgaggtaccgtggtggtattgaggcacatggtgacatgatgtggggttgtgtcttgtgggtacagtggtacacctctgatcagagtttaaactattcgaatagccgtacccgcgattatgggtgagttgagcaatgtttttcgtgattagtctcacactactcattaatgttaataatgtgataattaatttgactcctggtttggaatggataattcctggtttggaggtttaatttgttcaactggggttggttgttcaaatgaggttgggcctatgcaacatgggtatgttgtatggtgtttatttaatattgattaattattcaactgtttttactattctcttaaatatttattaaatgctgtttctgcaaatgagctatattatgccatcctttgttatcccgtgcacttgcatatttgctgtgtgacttgttgagtatgtcatatgctcattcttgcaatattcattcaccagaagaggagtatctcagtgaaggtgatgatctggaggattaggcttgttcttggttaagatgcctgtggagtggagtcgccatagctgttccgtagtttgttatcgttttatatttccgctgcgtagaatgttattctttgagaggaactatctacctctgtaataatttttatttgcgagtattaaatagttatttatttgtactctattatcaaattgtcattgtgtgcctcggttgattcctggacgagggtttaacacacatgtaagcgtttggaattttggatagaaattccgggcgtgacacaaattcaccgtaccaaaatcccatgccgcgtcgataatattggcgctaaagcaaatacttgcctggctatgccccgcgagtgctcaagaaaattcagcaatttctatatgtgcgctacgtataaaaaaataaagtcgcaatgccaaaaaaaaggaagctatgtataaatttgctaccatatacgcagtgatattaaaaaccaacaaattagtgggcatctaaaatatgcccaaaatgaaataaacatataaacggaaatctacagaagattctacggctgcgacatctggagctttaggatatatttttctttttagccttttagcagtcatgtaattttattttctttcatgttggaatttctaatcaggggttttctctacggagatgtaattaacagaatttctatgtaaatgtatgaattttggaagtaatggactcgcaatttctgatttttatttatttgttgcatttaaattaaattgtctctaacgatttgcggataacggacctactattacgaccgtcccggttttcccgtcaccaaagatataaatgaagtgtacagcactcacacgcaacgataatgggacctatgcaaccaagaagagagctaacacaaaatggatatgaaatcaaaagctcgtgttgcaaaagtacaaggagagacgctagctgattgctcaaaatctgaattgggctaccagatttgcacaaaacaaataaagactaacttctgaaataaacaatagatgtggtgaccgcagcacttctctctttttttttgtaatccttcttgtttttttttttttttgctttctcttttttttgaactcttatacttcctttttttttgccactacgatcagcacaccggattgaacaatatgggtatgactgtaaaaatacaaccgtgcaaagcccaagagcaacttcctacagctagtctcaatgggttcaaaagtatttgcaaaggatagaataggctcactattttttttttgtattattgatatatggactagcacacaaactgaaatagactcaaacaaaactcagaacaaccactaactttgttgtgtccgaaacacgcagataatggccgaatgaatatgtcgaccagagataatgatttgtaggacaccacgtgctctttccaacaagtatttaaacactgatttccgaccctctatgcaactttgatgactattttactgaacgaaatatgcactgaaaattcagaacgcgacaagaaacaaaatctagcaaacaagataaattgatataggctcaagtgtaacacgaaggaacactaagatcagcaaccaaacaagtctaatggattaaaacctaacaaaaaaaaacactagaaccatattgcaaactatgggctattttttttagggtttttgtgtataggacagaaataaaatatgtagctagggtaaaagatcctaccgagacaaccgtgctctgataccaagatgatatggggaaaagcccgaccttctcgacgtaggatccggataaaccgtgaaacctcacgaacaggatgaacaacacgctgcccgtgcaacgcacctttcaccacgaattcgcaaaaccacacgctttgataggttgatccacttgaccacgcaaaagtggatctattgccccctcatttccctacaaggaaaagcaagaacaatctatggcaaaactcccaatccctctctctagtttggcggcggcggcacaaaacctaggagaagaacaagagcaaatttgatgcaattttcattagaataaacgtggtccccctcatgggtcgtgcacaaaggtatatatagccattacatgggttagaaactaactaagaatcaaatacaacacaatatggaaacttctctgcagcaccgtcaatttgtttcggctcttgcggtggaaccagaacaaatttgtgtcctgagccctatccaccacctggggcatgaagttagctttccaacgagtgctcacacgtccaaaacggactacgaacgagagagaaacaagcgttttagtccatgtatgtccaagctggcccaaaccgagtccgaactgaatcttttctttcttatcttgaaactgatggttttggaaggcttcaatccgtggagaaataatagatagactccttcccaacccaagatgggccataggatagtataactccatccaaccatgccgtgcaaagccgacgctcatcaccattgttgttacttgcgcgacacccggtctgcccgcacaggatgtcttcaacttgcaattgccgttggtagaaagctcggaatgacatgccgtttgattcgatggaaagtagacttgataacctttcctaatatataagccattcatgttgaaagccttctcatcaatgcggaattcgccatgaacttcatgaacataatagcatccgatcttccacatgtgcgctgctacactcgtcacctccggctggacccccatgttgtttatgccagccaatggtccaaatctctcatgtctgaaagtaatgaagtgcaaaatattatgtagcatcaaattctcatatatttcacgcatagacttagagagaaacgagttcaccttatattctgatccgcaagtaaagaacaatgtacttttgataagtagatctgcatcatcaagtctcatatgccgtcgtcgccgtcttgatctacaacagccgtaggccatcgttgggggtagtagttccgttgccgccacctgcccacgtcaaacctcagttccctgctctccggttgccagtggtggctgccacccataagttcaaagggaggaggcggggatgcacgacacctcatatcccctcggttgtcccgcaccaattcctacctcccctcggctgcctcatcatcatcggccatgccgccattctcgatgtgggtttcatcgtcatcgtctttgacgccacctaaaaccgtcaggtgggaagggggagatgagggaggaagaagtaaagaaagagtaaatatgggatccactgtgtttgtaccataatttggctaagagttagtttcattatttgagcaggacaaattatttagataagttgttatgattcatggagtgatttgtttgagaactagttagatgtatatgtgcagtgactcgtgatcgtatttgcaaactattgagttgcattagtatttgatttagcatggaaatatgcatgtatactagctgcagctgagtaaactatataattgtgtactggtatattactccaagtgtaccagcattaccagctgcagatgaagatggatgcagcactatggaagccagacgtgtcacgttggagcagattggatcgcagtgttggtgcactggagtctggaggctgtggcaggcggacaattgaggcgaagacgcgttggcgtgtggatgtatgaacgatgcagtgcgtcggtctgcatctggatgttgccggacctggttcgttgcgctacatgcggccgtgtcccgtgtgaaattagaatcggtgtcagccaaaagcagataagtaaagacattctttttgcccttgacttttttgacgtaaggaggtagagctctaccttatagtcatttcgttaaaagaaatgaggtttataggttacaagttaaaggttagagttaactggaagcagaaagcagatagaagagatacaaagagaggagagaaaaaggagaaaaagaaagaaaacaaaaaagaaaaggagactagggtggcggatttacaagggagtatacatgaggcttttctctaggaaagccttgcacaccaggctattttttgtctgtttgtttcattggttctcaggctctaaagttttagggtgtctgaaatttgctgcgtgatgcattgtaggttgtcaaattgttgttgtgagatttccacagtgtgtaagcgcaagcagcaaaccaaaatggttctattccctttgatgactgattcatgtccatgactgcttgtaggaaggccgagcttgattcggagttgtttcccttgatttgtgcagattgattcctcctcttcggaggaatctacccatcggacgtccgatgtccttaaaaaaatcggacggtcaacagttgaccaacaagtgaaacattaagttatatatggtgaaacaagaaaaatcagcaactgaaacatttaaatattttatgaaacatggtgaaaatacacgttgaaacatgtcgttgtcacatatgaaacaacaagtattaacggattgaaacatatatttttcttttatcaaaatataatcatgcgatatcttgttgtaaagatttaattacaacgaatacaacgtgtgatcgaatcgtttcttttatcaaaatataatcatgtgatatcttgttgtaaagatttaattacaacgaatacaacgtgtgatcgaatcgtagattggataagtaatttaagagaaaaatcattttgaagcttgctgaaatacatacatgtatgcatggataaggtggagagagagagaggagagagagtagtagcaggtggtttcaagaattttgtgaaacacacataagacgcatattgaaacatatcactatcacgtatgaaacatttagttttaacggtgtgaaacacatgtttttcttttgatataatataattatatgatatcttgttgtaaagatttaattgcaacgaatacatcggtgtgatcggttcgtagatcggataagtaatttaagagaaaaaaaatatttaaagagaggagatcgggtaacgcggtccatgagcctggtctacgcgacaaagctgccacctacctgacaggtgtatccagcgttcgtacgctaacacgtttgtagatcaatcagaaaattactgagctaaaaaaagtggtaattctagagagtactttcctccctataattttttttttcttttgtaagatgagaaatttcagaaacactttagctttttgcacgtgaattgtttatcatgctaggttttactacattcagcgtatgcgtcatgtgctgatatagcgtcctcctacttttaggaggaatctacccatgggacgtccgatgtccctaaaaaatcggatggtcaaatgttacagttgaccaacaagtgaaacattaagttatatatggtaaaacaaaaaaaaatcagcaactaaaacatttaaatattttataaaacatggcgaagatacacgttgaaacatgtcgctgtcacatatgaaacaacaagtattaactgattgaaacttatgttttcttttatcaaaatcatgcgatatcttgttctaaagatttaattacaacgaatacaacgatgtgttcagatcatagattggataagtaatttaagacaaaaatcattttgaagcttgctgaaataaagcatgtatgcatagataaggtggagagagagagaggagagagagtagtagtaggtagtttcaagaattttgtgaaacacacagaaggcgcatattgaaacatctcactatcacatatgaaacatttagctgtaacggttcgaaacacatgtttttgttttgacataatataatcatatgatatcttgttgtaaagatttaattgcaacgaatacatcggtatgatcagttcgtagatcggacaagtaatttaagagaggaaaaatatttaaagagaggagatcgggtgacgcggtccattagcctggtctatgcgacaaagctgccacctacctgacaggtgtatccagcaatcgtacactgccacgtttgtagaccaatcagaaaattgccgagcaaaaaaaaagtggtaattctggagagtactttcctccctttaactctttattttcttttgtgagataagaaatttcagaaacacttttagctttttgcacgtgaattgtttatcatgctaggttttactacattcagcgtatgcgttgtgtactgatatagcgtcgtcctacttttaggaggaatctacccatcggacgtccgatgtccctaaaaaaacagacggtcaaatgttacaattgaccaacaagtgaaacattaagttatatatggtgaaacaaaaaaaaaatagcaactgaaacatttaaatattttatgaaacatggtgaagatacacgttgaaacatgtcgcagtcacatatgaaacaacatgtattaactgactgaaacatatgctttcttttatcaaaaataatcatgcgatatcttgttctaaagatttaattacaacgaatacaacggtacgatcagatcatagattggataagtaatttaagagaaaaattattttgaagcttgctgaaataaagcatgtatgtatggatgaggtggagagagaggagagagaatagtagcaggtagtttcaagaattttgtgaaacatactgaagacacatattgaatcatatcactattacgtatgaaacatttagttttaacggtttgaaacacttgtttttcttttgacataatcagaaaattaccgagcaaaaaagaagtggtaattctaaagagtactttcgtccctttaactatttttttcttttgtgagatgagaaatttcagaaactcttttagctttttcatgtgaattgtttatcatgctatgttttactatattcagcgtatgcgtcgcgtactgatatagcgtcctcctacctggcaggagttgccatgtataacggggccgtatgccgttgtcttgtgtatatataggcgttagattagtttaggcaaagaccccgaacaaattatcaatctactacttatcttctactttttagttcttttctatttcatattttattttcatggctgagttctactttttagttcttttctatcagccctagaatttggttaatttttaccgttgttcaccagaaaacggtcatgcttctgtacgaaagcgagaaggttatccttttctaggttgcttagaaactagtcgttcgttgtcacgtaaatatgatatttaccttctttgctaatttgcttgtaaattagtcgcttaatttcgtgaaagtgaattaatctagaaatcggttctgctagccggttttgatctaacgattttggcgactctattgtttgcaccgcaaatcgttaggtgattctatgttgaccatgaaaaagtatcaacacactgttagagtggagactttaatggagaggttattggattgaaaggtaaatttgtctctgagtctctcttttggtaaactaaccaactggaatatttagagagtcggatctagagaagagatgtggacctatgaaggaacgtttggaacaatttactcagatttgatagaatatcaggcgactgatgtaattaggcccgtcacaaccgcagaactgccttgctagctacttgatccctgcccccttgttcatttcaatttcaaaaggagcttgattcagcagctgaaaaactcagaaaattataggcctgcatttggatgaagttactggttaaatatctaaattcaaaattcgagatggaatagcactatgtattcacacagattaattaattaattagccaataaaaataaaacgtactgatatatacttaattagtagaaacaggcacagtagaggtagaggtagaggtagagaattaggaagagggggtgactggttcattggaggaagtagccggagaggaagaagaggaagccgacgaggaggctgccgtagatgagcagcgctttctggtcgccggtgagggagttgccgccgaggccgaactgctggttctgcgcgaacccggcgatctcgacgctcttgctctcgaagaaggactgcgccgcgccgcacgtcgggcaccgccagtcgtcggggagctgctcgaacggcagccccggcggcaccgggtacgacgggtcaccggcggcctggtcgtaccggtacccgcacgaccggcactcgtacacccccgtgttcagcaccgcgaacttctcctccagccgccgcgggtccaccttcggcccctcctccagctccaactccaactccggcgacgccaccgcctccgcttgttcggtctccggagccgccgccgccggtgccggagtaggcggggttgtcgtagtcgccgtctccagcggcttgtcgtccttggagacgtcgacggagcggagcaagaacgacgacgtgctggtgagcgcggtgatgagcggcttgtgggcatggtggtggtgcatcgccggcggtggcggcggcgttcttgggttcttggagagcatcatgcagcaagggtggtggactagcctgggcgccatggctaatgccattgcgactaaatcctaataattaatttgttctctctctatagatgctatgcatgcgcgcgtgtagactgtagaggaggagaagctaaggcgaagctagaaggaatccatggaagcatgggagaggatatgctgctgctatggttaatttgtttcgtgatgacgatactactatgggagagggccgggggtgagggtgaggtgagtgtggataaggcgtgtccgcgtgtgtgcaccacagctaagctgggccaagttcctcgtttgctcctcgtcgcgagtgacgacggtgtgtcatcatgggaggcacaagaaaaacaaacgaccgggggaaaaggttcccaatacccgcttcttgaacgtactagactgatcaacaaacatggctatttcaatttcttgtttggaacaataaatattaattgataataatatatattaattatagttaataaagccaaaatatattctaatgaactataaaatagactaattatatctaatcaacactaattttaacaagttaattactaactagtaatatgcccgtactaacgttacggcgtaacttaatttataattcacttaagaaagaaatgataaagagagttatatatatggagtgatatttgcattccctttctagatcttgagcaaagctatacagatctattaagaagcattgtaagatgagatctaacataatggtagtgcttttcattccgtaacattatctcatattcaggcaactctgttgcacggtgtaaaacattatccacagagtatgaaataatcactaaaagatgggaagcaactcaaaaactcaaacataattagtgggcttggctgatggcagtttgtgtcacatcctctgaaattgtccaactcattatttttctgtcggaaaacaatgcactcatatagtataaaattcatactatccctcataacatttacaataacaatcagatgcataataaaataaaatattttcattaaaacaatatatgatggtaaataaggatgacactttgtaatccacttcttttattgcttcctctgtgttccactgtacttcttgctagattgacaatttgtacaaggacaaccttccctctgatatttggattcctatcgagaagtagctccaacctaagcaggtttggactgattcaggtatccatatcatctacacctaacatcagcatctcgcttttaccttagtttaatttcctgcacctacaatattaagatggtctcaagccgcccaaacacggacatccactgaaaggatctttaggctccctgttcttccaaactatttctatctactataaccactttttgattcataacgcaaactgaataatgtgctgcaacaagaaggaagtggcattgcaaggtcatgtactctaagacattgaataattcaaggaaagaaaaattttgcaaagatgagtattatttggggaccgacaaatatcaacagtaggagatgccttcaatgtgataagaggaaatcacatggattacaagcatatatagagcctccaatgacctgaaaactacaccttacatccaaccaaagaaaaattaatagaaccaaccaaaattccttgcttacatagaaaaaaggagcaggtgccatggtgtaccactgcaaattaataagtcatttggagaaaaaaaaagcaactcaacacattacctgttcacatcgggatgcaacccaaagttatcgtgttccttcagccatcacaagttcaaattttttccccaattgtgacttacaaaacatcaacagcctgcaacgagtcatataattaaattgaatcagttcttttctccctttctattttaaagttctttgttcaagggaattagtcatatgacctcgaaaaatgctattttcacgctccatttgtttttaatgtatggcatattggttagttcaaattgaactaacgttgatgccattactgttaattacaaagaagggtatataagatatagcagtaacgtcattacaaagaatttattttcaaactcaacagtgaatctgcatattgattatattattattattattattattattattattattattattattattattattattattattattattattattacaaagaatttctattattatttctctcacagtcaagaaatgtgaaaaaaaggggagagcaggtcataaatccataaattgacatcaacttattttgtagcaagtacagaaaacaaagtagctgtagcactacctgatacacaggcaatcgatcaaaggcagtgggatggtcggcttcagttcggtggcatgattgatcacaacaggtgcctaatgagagctagagttccccaaagcagtgccggctggcgaatgggaggattagcggaatcagtcacactggatccaccagtgtccggcgatcggtgagctggtcgtggagttgcattcccagcccacaaattaagcaacggaatccagagtaaccaatcctaatttagcacaaattaaagcttgcatgccgg

SEQ ID NO: 6541 - DNA, 20380 bp, Oryza sativa
  unsure (1)..(20380): unsure at all n locations
atgtttgtgaggatggtagaaaaaatggaacagtatactcaagccttttgttaggacatgaagggtgtctatatttactttattatgcatttctgttagccaaacttagtcaaatttctcttggaggaaaggaataccaaggtgcaaaagcattgactatgtttgggagaaagtacttttaggttggctttagtgttatctttgagtatgagtaatgctcttcagaggtgcatagttggacattctcttttagttagttcagcctcctatgagtatatgaccatcattattctgtcattcacttatttctgttcttcctttttatcatgaggaatcaagctagcacggttaattgcctacatagcaatgcaggatctatttgtttttatacttacgtttttatacatagcaatgccaaacataatgaattaattagttgactgaagttgagaaaggaaaggacggctgtactgagcaatacggattattttcttaacttgtgatgctatttttttatttttatttggacttactcgccagctctgttttaaatgcagagagtgtcacagtagtcaataatacattagtaaatggcactgcaacagctagcacagcaactatatcaacacccagcttgcatgaccttcaagtatatggtgttattgtaaccatactgctgtgctttattgtgtttggcggtgtcaaaatcatcaacaaggttgcacctgccttcttaataccagtcctcttttcactgttgtgcatttatcttggtgttttcattgcaccaaggcacaatgctccaagtaagtttaccttattgtttactttatattggatcaccattattgtactgatccataaatttataatgttggtttgcctatctagagggaattactgggttgagtataaccacatttaaggacaactggggctcagaatatcaacgcacaaacaatgctggagttcctgatccaaatggctccatatattgggatttcaagtaagttttttaccttctctagaaatataaataacttgtcattttatggaaattttatgaggaaagtaagcattacccagtatatgaagcaccacaaaatttgaataatttttcacttgaccctatgagacggtatgaactatgaactttgagcaatcttggcaatgagtcctgctcgttatttgttactaatttggattcgggtaaacctttggagcccacatatcatcgactcattagtgtcccttcagcttgactagcccagctgcttcgtaatgcttgtggttggtataagggcccttaggcctgtttgaggtgtccatggaccgcagtggcatgatggcgccatggaggcagccgcaccacaagggcagagggaagagggagagactaaagactattgtttttttcttgcttaatgaatagagatacaatcccattcctatattgatgggataacttgactcttaagaaatagtatatctctaagattaaggaaacactacctccattcctaaaagagtgtcttttagcaatgaacctgagttatttcatgagaatatgttctatttcttccgttataataaacctgcactgaagtttcaaacaagtccctaaaccttggtgcaaatttagggatctacagtgcactttacttatttctttgttttcttaaatgtaaattgctaactatattgacttttcagtgctttggtaggcctctttttcccagcagtgactggaattatggctggttcgaaccgatcggcttcactgaaggacacacaacgttcaataccaattggaacattatctgcaactcttacaacaactgccatgtacctgttctctgtccttctatttggagccttggccacaagagaagagcttctaactgataggtacatacttcttaatgctgcatattataagtgctcctgctttacaattgtagataatgcatcagctcaggttatatttatctaattcatttgattgatcccatcaaggaaggaagataatttggccttacagatttatggtgcaactataactgctactcctattctactggctgttgcaggaattaagggcatgtagtttttcttttttgtgaatctcaattgtttggtacagttataagagatccttttcagagtatatgctgcatgcttgtctgaccataactatttacctgctccttttttcttccatttgaaactaacataaacaattggcagaacatgggtttatattggcaatttaataatttgtaccatggcacaacttagataagtgttgtgaatatattctttctttgtaaacaactacttcctctgttcacaatgtaagtcattctagcattncccacattcatattgatattaatgaatctagatagatatatatgtctagattcattaacatcaatatgaatatgggaaatgctagaatgacttacattgtgaaacggagggagtacattttttacacacgactgtagtgtacatgttaattttgtcctagtccataccgagctgttatgctactgatttcttctctggtcaactcataaatatacttaatacttgcaggcttcttactgctacagtggcatggcctgctccagcagtgatttatattggtattattttgtctactttaggcgcagcactgcagagtttgacaggggctccaagattactggcagcaatagcaaatgatgacattcttccagttcttaattacttcaaggtttctgaaggggctgagcctcactcagccactttattcacagctttcatttgtatctgctgtgtggttattggcaacttggatttgattacgcccaccatcacaatgtttttccttctgtgctatgctggtgtgaacctgtcatgctttctccttgacctccttgatgctcctagttggcgtcctcgttggaaatttcaccattggagtttatcacttgttggtgcattgctttgtgttggtatgactatatactattacaaattcattttgacacaatggcatgcatcatgagctgtaatgctttcttaggacattattttgattaaagacttctgacatgctcatgcattttaataccaccctcatccataatgtactgaagtattgtttaacttgtactttcgcacaaatattttaatgcaaccttattttgtctttataatactgctttccacttacttggatcgttctctcaatttttcagtgatcatgtttttgatatcctggtcttttactgttgtctcccttgcccttgcaagcctcatctattactatgtgagcttaaaaggtaaggctggagactggggagatggatttaagagtgcatactttcaattggcactacgaagtctcagatcattaggaggtataactctcttcttggaaactaaatatcatatttgaaactattaagagttaccttgtttgtaacactgaacattcttgtcacagcaaaccaagtgcatcctaagaattggtaccccattcctctgatattctgccgtccttggggtaaacttccagaaaatgtaccttgtcatccaaagcttgcagattttgccaactgtatgaagaagaaggggcgtggtatgtcaattttcgtctcgattattgacggtgattatcatgaactggccgaggatgcaaagactgcttgtcgtcagctggacacttacattgagtacaaacgctgtgagggtgttgcagagattattgtagcgccatcaatgtctgagggcttccgcagcattgttcagaccatgggtctaggtaacttgaagcccaacattattgtgatgcggtaccctgagatttggcgtcgcgagaatctgatacagataccgtcaacatttgttagcataataaatgattgcattattgctaacaaagccgttgtcattgtgaagggccttgatgagtggcctaatgagtaccagagacagtacggcactattgacctctactggattgtgagagatggaggattgatgcttcttctgtctcagctcctgctcacaaaagagacctttgaaagctgcaaaatccaagtgttctgcatagcagaggaggatactgatgctgaggagctgaaggctgacgtcaaaaagttcttgtatgatcttcgaatgcatgctgaggtcatcgtcgtgactatgaagtcatgggaacctcatatggagagcagtagcagtggtgctccacaggacgattctcaagaggcttacacaagtgcacagcgaaggatcagcacatacctctctgagatgaaggaaactgcacaaagagaaggacatccactaatggaggacggaaagcaagtagttgtgaatgaacagaagattgagaaattcctctatacaatgttcaagctgaactcgacaatacttaggtactccagaatggcagctgtggtcctcgtaagcctccctccaccaccattaaatcaccctgcgtatttctacatggagtacatggatctgcttgtagagaacgtcccacgcatgttgatagttaggggatacagaagagatgttgtcacattcttcacatgattagagatgtataccttctggcggctctactgccatatgattgttgtaacatcatcatagcaaagtgggcaagcagattttgtgcagattttacagctgaaagtcagaagccatcaccttgaaggctacctaccctgagataggagatctgctgggcctttcgctggcatattgggtacgtcaactacagtatgtccattctttttctcggattcacatagcaagcttcaatacagttaattgtcacaaattttgtagccctggtgttccccatacgtgtaacaatcttagaaacgcaacgcttccttttgcactgaaacagtagcaatggtatcacattttttaaaatatatttccagttgatgtaatgagcaaactgaggtggccattaatgttggcatgttgttgattggcatgacgtttatactgatacacgtgaaaatcagctgaaattattggtaacactgtacaggactttccttgattcactactgcattattgcactctatgtagtcatcaaaatttggtagtatgttggagttgtccagggacaataaaatcagctgatgatcaccagggtacttgtgatatatattttctcactttattagtgtttttgtcttgtaaaatctgggggtcacataacttgtaaaatttcacgaaggcattagtgacaaattagtgacactgtcatagcatttttcttgcaccgttgcataacattttcctcaggatgttaatcttaagctctataactacaagttcatcttcttatcgtaccgttgcatattacggtataacagcacaggaggagctcctgtttctttcaaacagaatttgttgatttcggcaagtcaaactttggtttggcaagtctgcgggtatgatcagcatctggtcgttgcgtagacccttccatggatcttgaactttgcattcgttttatgctccagctcatcgtcttttgtgcctaagacgaaatatttaagaattaagaagctgcttccatagatgtttggtaacgaaaaagattactactgtattttgctctgtgacgactattgcttataaatgagtacgtaattagcacaaggaaaataaaagaaaaaggagagaattgttaatgaaaaagaaatggcacgcgttccacgtgcatggcgcttggcctcatcatcaaatttacacgagatgtcgtcagttaagagtacttttcattttaatttggaggtaaaatttgctacaggacactaaaaaacgtgtaattagctgtaggacaccgcaaaaactgtaattagctgtaggacaccgcaaagacatgatttagctctaggacactctaaaaacacgtaatatgcctaagggcactgaagctattattttattcttttcaaacaaaaaagagagataaaaccagattgtccttcggctctctcggcttggctccaggcgtgtgcaatgagaccacgcgcggcttactctgtttggctcctcatcggctcgatcccctctactcatctgtcgccgtgccaccgctcttatctgctcatatatgtctgaccagcagcggatgtctccatgacgatgacctcgcatcaggtgattccccaatggccaccaacgagtgaccttccatgcggctgctactcctgaagggagcaaaatggggtcatggagatgggtgcaacagtgaaccaaatgttgcccagcgcacgagcgcgccgctgcaacctgtgattccaacacgatatccttccagattgcaaaaccgcgaggcaacgtgcgggctcgagtgcaggggaagggctcgagtgcgagtgaggaggaagatgggggcactgtcgtgcgcttcacgacgccggcacgcgtaggcacggtgggcgccgccgcgccctgagtttggctataattggcttggaggagaggcactgcgagtccgccctgcgtcaacggcacaaaggcatgctgtaaaagtaggaaacggtgtatgcggaggccgagggtggtcgccaaagcggaggcaatgactggaagacgaagggggcgaacggtgagactggcgacaagtggcggggagggaggacagggtggataaactcggtaggctcctcggaatggccattgcggggcttacgcgtcacatcgcggagggtggcggcgtgggagacggtggtgtgtgagagcggtctcgccgtggtggagtgtctccgccgattgacacggggtactcgtactttctacgccgtttctttctcaattacaccggatataataaaataatgtcttcgatgtacggtagctaattaccaggtttttacggtgtcctatagccaattcatatctttacggtgtctcacagctaactatatattttttgagtgtcctgtagcaaattttgcctaatttggatatggtggcatcgcaatcgcacttatgtgcctacctgcactgcacagcacacatattgtgatctgactggcaggtaccacactctaaaagcaagcatttgttcggatactgtatcacagaatttatagaatccgagaaaaaaatgtttaagcagtcacgaatcttatcgaattttttaatatacatggtggcatgctcccctgctactattactaatatattttcgaaaattctctaaattcggcgcctgatgcgggcgcgcatgcatcgggcgcctcgcgccgccgctgcctaggccccgcgaatgcatgggcgcctcgtgccaccgccgcccatgccccaccacgtgtccccactatgcgcgcccgttgcaatagtctaccggatataatggaaacaccctgttaaggtggatccgctttatttttttccatcaacaatgtttcagctagttgtactcgtgatctttcactatgtatagatcaaatgtttcagtggatttttgatactgttcaataatttcatcttgatggacacgtggtttgttgatattcatggggtttaagtgttgtaatgggtttaaatcgtttgttgcatacgttgaactaaattgtttcatctaacgatctgaccgtgtgtcactttttttaagaattgaaacattctttcgctatttgctgaaacattgtttttatatagggtgaaacaacgtctgattttttggaaaccgttgtttcatatattgtagcaaaatgtttcatgaggtaatttggttgtgttttagttttctaaaagattgaaacattttcgaactactttgtgaaacattttcgatctacttggtgaaacaacgtccgatttgtagccacctcgatatatttttttgggttgtttggttcaaggttatagtttatcccgttagatgcgtcacactttcgcattttattaggttagtatttggttcgttactataagtataacaagccacactttactaactccttgctccacatgtcataggttctgcttggaagagtttatgacattagcttttgctagaatctttcatttatcagaaaagttctctcaatcagtctaaaaatttatagttatctatactattataaaaattaaaaatgtttttgccggtacttttggtttgtcatccgtgtatgagttggtttttatgttcgttcgcttttggaaacataaatccgtatttgagttggtttttaagtttgttcgcttttgaaaatatagaaagaatcgtataagaaatcttttttaaaaacttgcatgctaatttaagatgatcggactcctatttgcagcacatgattttctagcaaaatatatatccaagcaaatttaacacagtgaatttcaccgtaactaaaccatatctctatctctactattataaaaattaaagatgtttttaccggtattttggtacgtcatccgtgtttaagtcggtttttaagtctgttcgcttttagaaatataaatccgtatttcagtcagattttaagttcgtttgcttttggaaatacaaaaggagtcgtaggggtgaagacagagcggattcggacggatagtggtcataccatatcctaaaccatattttctaagcggattcggagcaggtgcggatagtgtacggatgcggatgcggagcggattgttttcggatgtcggaaatggtgcggagtcggtgtggaattggttcggaaacggattaaatttatcggatgctacatgtatatgcaatcaatacaacattgagttaacaatccaaggaacaatagtacaataatcaataaatgactcatcgtaataattatatgattaagtgctaaacaacatgaatacatgatgcccataatataaaaatatagctacttgagtgtgacatgagacgataaaagcctttgactaaaatatctatgttaattgatgaattaggacattggatgtaccaatttatgttatatgcaatagatagagtggtcacatatgttgatattttcggattatccggcaaatggcctatcggataatccgaaaaaaatgttggataatccgcatccgttggatattagagataccatatccgcatccgcatccgtatccgccggatttctaaaagcctataccatatcctcgtttcggatggattcggagcggatcggatctcggatattatccgatccgttttcacccctaaggagtcgtataagaaatctctttaaaaaaaaacttgcatgctaacttgagataaaagtcagactcctaactgcatctcatgattttctaaaatagaatatccaagcaaatttccacggtgaatttcaccctagctaaaccatataacaattacaagattaaaataatcttcacccgttgcaacgcacgaatattttttctagtaaaatctaaaaaataaagaagccagaagattctcataagctatttttcataattttaaagcttcccagacagggtcactggataattttgtagctaaatattgctatacggccaacaatttattggctatacgtacttatgtacttacgtgtgatttgtcatacttttagcaagttaggttctggtaaaaaagttagcttccaaccaaacaaatcctctatattttcttttattacataaaagatgcatacaaacatacgctaccaccactatacatgtctaccatacttacacatctacggatacatctttctacacacactcaaagagacaaactagtggcaaatcctaagatcctattaaacgtaactttgtgaaaggaatcagactttaccaccatacaactggtgttttcccaacaacacttcgttctatatctacatctacttcctctgtcccataatatagcaacctagaactggatgtgacattttataatacaacgaatctaaacatgggacggagggagtacaagatattggctctttatttctctttctcttgtactatgtagatatagaaaatttattgggaaagtaccgatagtgtggactgtggagtaggggtgcatgcattactccagtcaccaggttcaaatcttttatcctttttatttttaataaaaaaatctgcttgttgatccagaaactcattttacatatgcatgataacgccttaaccaatacatatatgcgcaatttaaataagagtacgttttattgaaacatacagatttcatacgaattaattcaatccacccaatttttctcacatccgatccaatctgttcttgcgctaatctcttcctcacgccatgcaccacaaaccctctagtcgaatcttcatacttgggaggggtctccactcctgctgttggagaaatcgctccatcgacaactccgtatctggagagggaggacttaaataatcttgagggttatcaccacctctacatctacatctaacgaactgtgggatatgcaccaaatactggtatttaataatatagacaattagacaccacgtctacactatttagatactattctaatgtcgatcaaaaattaaagtaaacactaatgcacaatattttagtatgctaatgggaattaagagataaacctcacaaaataaatctcaattactcagtaaagataatatcaactaaagcagagtgattgacaaggtacatgtaatgccttagaaaaaaaatagaataccataaaagatatattagaagtccctaagtatttggtgtttaaaattagaagaaaaacaacagatatacggtagctgggctgcttttggctagcccaaggcccaactgcccctccacatccccaaaaccctaggaggtccctccacctccccctagccatcatttgcaccatctccctcccctctggcgccaccccctccccttctccctggtttgtgctccccttgttgctgttgtggcaaggaaggagaagaagagaaagggaaagaaggaagggatgggaagaaaggtgaagaaagaagatgcgtttttatgttgccgctacttgtcgagacctaggtgaagacacttcggaatgcaactagagttcatctcatcattggtgaaggcaagtaaacatagtggtggagcgagcggcaggggtcgcggcggtggagcagcagcgaggagcggagagcaatgggaacagcgacgcgagcaacagcgggagcgacagggatgacgtagagtgagtagcagcgggtgacagtagcgagcaacggcagagcgagcagtagtgagggcggcgacggagcaagctgcggcgcgcggcggcggagcaagtagcagcaggcggcaacaacaagcagtgaggggggtggcaacgcgtggtgacgatcacgtcgactacagatctaacggtggtgcaagcaaatcctgcggcgatagtgaatccttggagatggtgggtcagaagtgcatcgatgcagcgcgagcgaatctagcagcagtggtgagctcatcgtggcgcgcggcgaggtcttggagatggccgatccgacaacggcggcaagctcgttgttgcggctatgaagtctttgggatggcggtgagctctttcaccatttccctcctttttagtctctacaatttagcaaattcagttttatacttgaaatgttatggatacgatttgatcttatcagagcagtgagttgtagaagacgaggcatataaaaatatggtagataaaaaacgacttaaaatgtgtcccaaatgtatgacatggcatggatcaaatgtaaaaagagttgcaatggtatcgttacaattagatgaattgcaatggtattttttaaaacatgcaaagttataatggcacatatccaattaatcctattaaaatttatgatgtaattataattaaagttttaaaatttatagtaattacagtgtaaatataggcaattgtagtgtaaaaaaaatttgactatttttttaaaaaataatatcacgctataaaaatcaccatttcgaagtaggataataatataattgctcctaaaatatatgggcatcttatttttttctggtgttagggagactaaagaacggcaaacacataatcaaaagctaaaagtttgactataatctgatgaaaaaattatcgccatgttagtgatttttttaaactgaatctcctgtttggaccgtaataaaaagataaaaagcttatttttattttcaaactaaactccgtaacttcagttcattctccgcaagaacagcagaaaagaaaaaggagaaacccacaaaaactacccttcctcttatcccctccggtccagtccctccacctccaaatccaatcctccctaaaaccccagcaccgccctatccttccttccttccttccttcgtccgaccaaaacgcgctcgcctcgcgtcatcggatcaaatggtggaggcggccacgcgcggagcagagagcccttcctcctcctcctcctcctgctaatgcgccgccatggccgcccgcgcgctgggtccacctcctcctcacgccctcggcgccacgcggcaggctcctcgctgcccccacgctgccgccgcggacgcctctgcgcccccgacgcatggataccggcgtggcgccgcggcgctcggctccgcgctctccgcccgccggggaaggtctggccctcgccttttttttccctctccttgctgcgtggtatcattctggtacaccctacccttatatttttgctcaattgctcgcttgcagtttatggcgggttcgggttcttgaaatttcttatcccagattgcgtatagttgtcctgaaataatgtcctgcgaattccacttgtatttctgctggtatccttcactcgcatcagcatagctagaatgctaattaattaacccagattgcctataactgtcctgaaataacgccctgcaaattccacttgtattcctgctggcatccttcacttgaatcggagctagaatgctaattacttatttttggctgttttggttgagggaggtttgcatttttcgtggatattgattttctggttaatgttcgatcatatttctgcaggcatactttgtgttcagtacaattgatggatgctcttagaggtggcaatcttcaagtggaaccaaacatacttcattcccccaagccattgatgtctactagacgtggtaatttctttagtttagttgtccatatacacttgaaatgtatttgggattttttattttatgaatatataatgagtgtgcggttcctgcatagaacatcagttgcatttcccaggaaattttttaatcatacatttcagcaattttaacaaataaagttgtacgtcttgtttagttgcctagataattggaatgaatatcatcttttacacaagcaaaaaattcatgactgacgcagctgtttatattagaaaaatagaggtgacctctctcatttaggctctatcctgatagctgcaattgagagtatgaaaatgtattccgccaattcattatgtattcattcatctgtaacatgaaatgtaaaacactaaacagcaatacaaggaaatatttggaagaaacatgtcttttgccttcagattggaggggatttcttgtgttgtctcacatgcaccactaaaacattaattattgttactgagggatatttcatcaacatgtatgttactgcattcatcttttcatttgctattcatttttcttgttaaactacaggcgtaaaacctagtgaaatgtacatctttgtttctcaaaagtgtaccttttctaattgctaaagggcctgtttcgatgggttgaacccaaatccttaaaatctaaactaagtcctgaatggttggcaattctaccaagggccttgcttaggcaaacctatttttaaaagttaacgaatcttaaagaaaacaggttatttttaggttgaccaacctatattaacataaaagtgtcacatcaaagattatgtatggatatagatcttttaattttgaagttcatgcagatttgctcacccgaacatagactatttcctttgaaagaagtgaatcaaagcacattccttcccctatatttgtgcaagtcttatttgctaaaatcatgcactctttccgagactaatacatagttttgacatgttcaagttatattacacacacaaggatcatagaagttcagctcaggtgtttagtaaaatcggccactttgttcagcttcgtagaagttggaagaagtgtactgaagagcatcctttcccctacatgtgcaaagtttgttttagtaaaccatgctgtccatgcaactaagagtttatcatttagatatatagttcatgcaaccaaagttttgttcactgctagtatacacttttgacctctcaaatttatattataatatgaaattgaacaaggtatgcaactaaaattttaccatatagacatatagttcgtgttttgaagtttatgtcatttcccagttggtttcttacagatgactcagccataacctgtaaaggattctgtacaatatcgtggaacctcaaatcagatgtgctggatggttacataatcttcgtcactggagatccagttaccttgggctgttgggaatcagatatggctgttcagttgtctccttctgttgaaagtaacaacttatggacggccgaaataaaggtaattcctcttccaacataaatcactttgtcaaaaaactgaaatgagatggcacaacccatggacatgttcctaaattttcaatattatctatgcaattttgtagttcgcgcatcttatgttagtgcgattaagaagtaggaagcaactggacctatcattcatgtacatttctgctactgaaacattcttttaagagtcttatttctagacaaacaatttcattttatgattattcaatacttatatgctcttgtatgatgggatgatttttagtttctccattatgattatttgatgtgatgtctagagttaaaatcatatgatggtgtttcatgtttccatgattccaatggaaacaaatacaattgtcatatttctcagtgtgttgcaacaacagtacaacttcaacaacctggctgttcactttgagtttcctacacagccaaatacatgttattgtcttcctttccattcttcaatggtgttgggctgtgggcatatataattatcttcagtgactagatattgttaaacctacattattctagcacgttgtattcttctgtatctaaggtgctctccgttcaacaaatgctcatatatatttgtctgcgcttagtttcctttggtcctttactccttttacatctgaccagcagttcttttttcctgatctatctttttttattctttctcacaatttctctcgtacagaaaatttagatacaatttccaatatgaaatctgctttcccttttatgcacctttttttagttttgtttagtacaaacttttaatttgatataaggatgcttcttatttccagttacagcaagaaacatgttatatgcaatcaaatataaacttttttctattttatgtaccatcatgttaacatatttcacttactgtttgtagggaaagatttattgaatgagggaatgttgtgtgccaattttctgattgtgatgaacatcattccaaacttatctttgaaaccagccttatcttaactgtttcaggtaccatatggtgtgcatttcaagtataactattttgttcgagaggagaatgacgcctcttctgatatcatatggaggccaggtcctgagtactccttgtcaatacccccagttggccggaaaaaacatgtcattgttgtgaaagatctgtggatgaaaactagtgtggcaggcattcccactccttcctggggatcatggctgatggaagctaattttcttgaagaccaatttgctaagagtggagagcatcaaaacattgtgaaagcccattctgtcattgatacggtggatcgagcctcatcagtaggtaatgttgcgctatcttgcattcacttttatagaaatagtacatgtttccttagtgttgctgaacacttaaatgtttccagttgattggcaggtgaacatattattctgaggcttgggaacggcacacctttacatgtcaagaatatatcagagaatccatctgccagtgtccatgatgattttactgtaaccgataaagcaaattcaattaaatcaagtataagtgaacatgaaaggaatcagcctgttgaggaaccatggatccttggatctgtcatggcagcaaagaaatctgttgcagcagggaagcacgagaaaaacagatggaagtttgtcaataagaaacagaacttgagtgaagtaagtgaaaacatacctgaacaggatcaacctgtagaggagccatggctatttcaatccaaggtggtagcaaaaaaacctgtagttcaaactaaaggcaaaatagaagcaaaggatattatcagaaagctaaggaaaatggataaacctccagcgcctttggaggaggataaggcaactagtggagagccttcatcaagagtcatagtaattaattcatcagtctgcaccatgcagaggattgcagtattggaagatggaaaactggttgaactcttgctggagcccatcaagaacaatgtacagtgtgatagtatttatttaggcattgtaacaaaacttgtgcctcatatgggaggtgcatttgtggatattggactttcgaggccttcactcatgagcataaagcaaaaccgtgatccatttgtgtatcctcaaattgtcaagaagtgctaaaagagattctgcgaatttttctgattataatgatgatagccttccaacatatgaagacgaagatgatgatatgactgatggggagttggcagatgaagaaaatgatgatgagtcatcagcatttccagctgaggtagtttctgaaaatgaagaacacatggcctttttgcccaattctaagataaatatgattcatagtgctgaatttgaaagtatctctagttatgatgaagaaaaagatgacgaaattgatgatcacatggaagatgaatataatgaggatcttttgcctggtgatcagtcagaagtatccaatgatcttaagacattatcttccattcaacatgctttgagagagtctagtgatgatacaaatggaagtaggtggtctcaagttcgcaagggtacaaaaattatggttcaagttgtcaaggagggattgggttcgaaaggtccaacgctgagtccctttccatgcttaagaagccggttttgggtatgtgagataaatatgactagctatctctcatgctattctagcattacaattttttatgctttatgatcttttgtttacctttggtaatttataaattaactgcattggaacagaaatacttttgatcagaaatcttatgtgttgttactcaatagtctaccttgtttgttctttagttctaatattttcttattacgatgcggaagggacatttaataacccagagtgatgtcaaatatgagtagttgtgatgttcttaggacatttaatgatatcactatatagaggaatagagacatacaagcacttcagtttatgcaccatgtaaatcttttggtgataaatgatgctgtctgcagagaatgtatgcttatatatatgtacttcagtcacctatctattcaatgtcattatttgctaatgattcataactttctgcaaaaaattaccatgaaaaaagaggtttgtagcattctgcattgatggtcaagtaaaaaaaggatgttcatgttaactttgtaagttgtaacttacccttccatttcaaatttgcagatactggtttcccgcggtaacaaagttggagtatcgaaaaaaattactgggatagagcgcacccgattaanaggcattaccaaattattacgacctcctggatttactctgacagctcgtactgttgctgctggccattcttgggaggagttgcagaaggatcttgatcgcttattatctacctggaaaggaataattgagcatgctcaatctgctgccttagcagctgaggagggtgtagaaggtgctgttcccgtaatgttgcataggtcaaagggtcaggctctatctgttgttcaagatgatttcaatgagaaggtgatactatttgaagatagcaaaatcaatagcatacttttctttgcttgatttgttttcaaatgctttactgtattcttgaattactgccattcttcacttaggtcaagaggctagttgtggattctcctcgcacctaccatgaggtgagaaaccttaaatctaatccaattttagtctaagctttgtatccatttcctgtgattcattttcccttcccatgattctatgctgtgtgttctatggaccaaaggccaatctctatatgtcagttagtcctgctgttcaaagcagttagccacttggaaacctgtctccaaaatgactaatattttttcaggcgtgtatgttgattgattaagtaatgatagttgcgcatgcttgtttgcacactagtttttccttatgtctatagaacgttcctggcctacctactgtctactgttgtatgctattggactttctggttaggaattacatttttcaggcttataactcttttttttttgcttatgcatatttaggtcacaaactatctccaagaagttgcacctgagctctgcaatcgagttgatctttacgaaaaaagaactcctatatttgatgaatataaaatagaaaaggagattgacaatattctgtgcaaaaggtatactttttttgttgcatttgtttcttaaatagcttcattgctacatattcttttgcttgctttgtaatgtttatcaaccatttagcatagaacaaaaacacatcttgtaatatagattactttgataagtaattttggtttacctggacctggttttttcctagactacaaattgcatatcaccatttgacaagcaagggagctgtcagaaataagactgctctactgataacgagtgccatgttcaacatgagcttgtggctggcagttgcgctaatggtgattaggcttagcctagacctgttcatggtagcctgacctggtaaaattgagcaagcctggcatgatgtgtcagacgtgggcctagatttatagcccgatgaaaaaaaaagcttatgaacgacacactattaacttacatttctgttaaaggtataaatgatacaatttctgtagtatgatatgttagtgctcttttattgcagggttccactacataatggcggttctttagttatagagcagaccgaagctctggtttcaattgatgtaaatggtggtcatagtatgtttggtcaggggacgtcccaggagaaggctatactagaagtaaacctagaagctgcaaaacaagtatgtcccatgttctgtttcgtactggaaagtagtatatttgctttcaaaccttatttttctttacttatctagaatccaatccaccttttattttgacgttttactgtatgtcttactcatttacctttcagctgactatgctttaattcctaagagatgcacttggcagtacttctatttgtctttcaccaaaagtctaccagaaaaaaaaagaaaaaaaaaacatgtatagtatctagaacgacaagctgctatgtggggccatcagttcacgcacagattctgaagctgcgtagcagctttctaggtgtaagcagttagtgagatagctccttaacatctgatacaacaatttatgattaagttcttttcacttgaacatttgatttgttaggctaaagttatagccgtcctttcatatgggcttcagcatatccattatggattaagaaaggaatagacgctagttatctcatctcctgttctatattcctcacccctgttcacagtatgatccataatcccatagtttgtggcaggaagccagcagaatccaattcctactgaccgcaatcccttccctggagatgtaaagccagagccattctgatctttatttttgggtccctgctgtctactaacgtcactcagttagctatagatcagtcttctactagcctatattaatcccgggaaatcacatgctcataaacacatttacattcatgatactagttcattttctcgttcatgattatatattggttattaaattgctaggcaaaatactctattgagtgagctactcacacatgtagctatttgctaatattatattgatgatgcatgttggttaccaaatc

SEQ ID NO: 6542 - DNA, 47013 bp, Oryza sativa
ccccccccccccccccgccgtcaagcgtggcgacggttccctgaggtatctgaaactacagatcctcgctgtcatcgccgtcatttgcgggggccttcttcttggcctcccctcgccggtcatcgggtggggttgcgggggccttgccctctcgtcaaccttgccacttctcctcatcggctttccggaaccgctcagccaaattcttgatcgagcggcagtcggcgagactgccgataagtgttgtgcaccgagcaccacttgtctgccaaccggccctcgccggatggagcagtggagctcagcttgtcgccggtggcttttcccttgcgcggggcccgtgtgggcccatcggccgcaaggacgtggccctcgtcatcggagcgggccgacttcctttttccccacctatctcgccgcttagagcggggaacagactcaggggtagccgcagccgccgcgctggtgctgggggagttccaggcccatgcctccttccgagccaccttgtccgccaactcgaagagctcggcagtgatcttgggctccttggaggcgttcttctccagcatgcggttatgccgcaagccattccgaaacgcataaacaaccgcgtgggccagaatgcatggaatagtgttgcggacctggtagaaacgctgtatgtacgatcagagggactcgtcgtccttccgctgcacagcatgcaggtccgcctcttctcctgggcgggggtatgtgccctagaagttcgtgatgaactgctggcacaggtcctcccaggaatggatgcagtcggggggctgggtcatcagccagccgcgcgcctgacccttgagggccatggggaagtaattcgccaggacccggtcgtcgccccctgccgccacgatgatcgtggtgtagatctggaggaactcagagggcgaaactttgggggccaccggacgttctggagactcacaacgaaggccctacaaccggtccctccaagggtgaacgtggggggcgggccgcctcacgaggaggaatgcggcactccatacgaggaggcgccttcccccatgcgggcagctcggcgctcgtcccggcgtcgttcgatattgattcgagcgtcctgctctccgtagaggccatcgtgacgcctccggcttcccgaggcccccgacgatgttggagccgtggaccgtcttgaggccatggccgatcgatgggccctcctcctcgccgacaaggagagggtagtgggggtacgcgacgtacctgtggcggtggaacggccactcgcggctaactgccgctgggcactggtgaccaagttggcgacgtcgtccaaccatcgttggacgggggccttcggctccgcgttcaccggagggtgccgcaggagggctcccgcggcttgaagtgtgccctggggcgagctgccgtcgcgataggtcaggcggcggcgcgctctgacgtgccgtggcctccccccgtccggaggcagggagagggccgaaccacccaatcgggcgggatcctccctccgcggggggtcgcggaggggcggagtccgagagttgcgtcggcggtgacgtgggtcgcgactcccgctgggatcctcactcccggaaggagtgggggtgtgcacctccacctcttcctccaaaacctcgaccatgatcgtcggggccggaggaaaacttggggcagaaggaaacgacttcccttcgaagcgcgcgaaatccccctacctagcgcgccagctgtcaaggaagtgatcctctctagcaagagatcgtgggatccccctttcgtgagttcggccgggggaaaaggcccgcctctggaaatcacgtatccgccccccaaggctgctagctagcgtgtacacaacaagattatacaggttcgggccgctatgaagcgtaataccctactcctgtgtatggaatttagactgagagttacaaaggttcctaaactctggagagcgctctcgcttcccttctcctagagctcaggttttctaagagccgtccgctttctcggtgggcaaggtcctccttttatacctcaaggggataccacatgcaccgcttctacctactcttctatccggtggggacccaccctaccttgaccggatctcgacccgtgccttcgcctggaagctaagccacagtttgtccttgagtggggcccaacgccgtccctcgcctgacacgggggacagccctgtcattcccttattaatgggtgaagacttgtggtggccgccctctcgtggggagaactccgaatgaccctccgatgggacgggtcatacctacctccactccgccggaggtagatgcgacatgggggcatggccgtccgtccagtcagacgtgaccggcgacaggcaggtcacagatcggtcattcctgaccgacgcgagccagtcgggcacgccgcacgtctgtccctactgcattgaatgcggtagggggcagttggggcgctgcgcgcattaaaggtggttcagcctgggccccctccccgcttgctccccccgccagatggcggctgggcgagggcctcggggcaaagcggcgcgagggcccgaggggtatgacatggcaccccgaggccccccggcctctattgcgattcgcggggtgcgggggtagggcaaggctgttgggtcacacgacaggatgggaaggtaaattcccctcacttcgcatacccccgggcccatatctccgacagcaatgctaggaagtcatacaatatgaaacggagggagtactacaaaaaaaacttgttttcgccatgggtttctggtacgtcattcctttccgtttcccacttagacggatgtgtttttcacactttgtttccgatttggcgagcggtcttctcacacaacaatgctacccagcactagcgatcccggacgacgtccatctaggcagcgtccagaccaccacttggaccgaagaatttttttcattttttttaatatttacaaaaatagtctatcggtgaaaagatttacaaaaatagaccctgccgccctcactaggccggcaagccgatgtggcagacggcgccacgatggcgtcgtgtgtgcattttgcgcttaggtccggagcgcaatgcaatttgtgctcgacgaaaaaagcatttggctggtttttttgcatctagggcccttgccgccatctaaaaaaccagccaaatgctttttgcagctctgttgttaacaattaaagaattatttattggtaaaacttgttaataatgttttaaaaattgcattgaagtcggttgttttgcaatttcatattttaagtaagagtttatgttgtaacttattcgacatattagtgtacgaaattgatattggcctatcgtagtctcggtcgtcgaaacattatatacacttaaacaaggagaattatgtcacgtaaagaaataatagtagagtttgagcatgatacatctggttccattgcggttacatagataagattggattcaaactaggagggaggtagtgaaagagttaaacacaacgatgatgtagtaatgggacaaatttcaataaggtaagttgtccgataaaagctaacccctacgtgaggatccctctcctctctcaaactacgctttagtaaacctgtattgctctggtagttcaagctgcaccacacggttaggtggagttagaacccttttggtgtctatccattctctgtattgacatctccttggtgattcctgtgagaaacgaatagatgtgaagcgaacaaagttagtaaatcttgtcagaaaataaggattcatgataatcaaaatattcttaccatgaaatcgtcgtctagaatatttggacaaaaagaactttcgacccaaagtcgtaggctttatggaacgaagaacctgacaacgatcatcgcatctgcattttggacggtcttcccatggagggagtgccgtagttaacacccgccagccacactgttgttcacgacgttgtcgttcgtaagccgcttttctttgcaggtattgctcagtactttcggatgagaaataccagcgtcgttcttgtaaataagtagttaggtcaagaacgggattttctgtattgacccactcgatgtatccgcaagccgtagcgtgggtctgacgaatagagtagtatgatgaagaataaaacaattgcccatacaaaatgaataagcatatgcagataataaaatacctcacggtcatagttagggcacctaaaaaagtgctttcctcgaatgtcaggattcatcgaagccattagttggcatcggtcactgcaaaggcagagaggccgctggcaccaaggtggtagtaggtatacacaaggatcgctacaccagttcggatcctcaacaccctagcgtctagccattgccgaaagctagtgggatttgcaatgaaaccagtgaggaagagagtattgaatgtgattgagttatgacagtttgtgagacatcgctcattatggcgacttatgtaggcaccaaaatcgcaatgataaccttgacatgtctacattatgggccatggtgggtcagcctgattggcgctgaaagtaagattggacatatgcggatatataccctgccgccttgtatatgggcagaataaggccttctgcccttttagagggtggcatggcgccaaaatgaagattagacttatgcggatgtgacatggaagattagacgtttgtggaagaataagggcatgagaagccattcagcagtcgtatcacacgcgaataaaggaggctgcatcggtgcggcagaaagtactcgtgcatgcgctgaaaggtattgtgcttttgtaaaaagtaatagtgaactttagggatgcgaaacccgaatagcaactacgtattcattctacaagcatacagtactagcatgtaaagtaattaaacaaagagaagtctgctctactggccctgccccgcgccgcgaccacgcttggtcctccgggcctgtactcacacgtgatcctgggagtacgtgaagcgatccggtggcacatcacggatagcacgagtgtcaggcggtgcagtggagggcgactggtcctacgtctgcaccggcggtgcgcctcccagcaatgagggaccgatgacgtcctctatcgagtgctggaagtcaaagtcgctaatgtcgaagtgcaaagcggaaccccacccgtactccgacgatgtcctggcatggttcatggttggtggaccctgactcgacgtgccaagaagacaaggcaaattgtcatgcgaggcttcgtaagttccaaatctcatctctattatttttttctgtttggccctccacgccttggcatagctaatagtatacttgaatgtctctgcgatatgttggattattgactttggttcatatgtcagattgtcgatgacatgcgcatacatctcaaatgcaacaaatgcacatgtaacgttcctgtggtatttctgaacaccaggtagataacatgtatgcttggtaacgactgacactgtctagtaatccttccattttcccttataagcgtgcactctccagggacacccatctttttccttaacacacctaacttcatattgtaaccagttgagcttggcaaccaaaactctctatgaagtgacactgcaaaatactttgccgcctccttcatatattctccattagcataaatcgcttcttgaataacctcattgtactcccatctcacactatcctcttcagagacgaccagaccagaaaaatcctcagtagcccattccgctggattaatatcgttctcctcatcacctgacgaatcatcttcctctacacgtttgttgtcagaatcctctctctccatttcattccctcattagccactccaccaggttgaatgcccactggaactactacgccaccttcctctggtgcgttgacctcttacacgaaagtctcattcacttcagcacttggtccctcgccatcatccatgttcatttgcacacttggatccttcgggtgaacatacggaagcatagctagaggccacccgtgttgcaatgcattctccacataccatctccacattcgagagttttaaactggcattagttcccaatgaaaaccctcaattgcccgacttactacaagatagattgttatgccacttgtctgtgaatcaactcccaagcccctcatcaaccatccttttatagaaggttgtaacggactcaaaatttcagggaaaaatttttgcaaaatattttaagtcatgctcttcttcattcttatgttaagtgaccttgctttctcttaatctcttttactcttgatctaagttttatttgcaaagttaaaagctctctttttaaattttataaaatccctattttattctctatttatttcaaattttataaaacctttccatttatttctttaatttctaactttggctcaaaattatatttcctttgaacccattcccgaacacctccaacgaataccctttcaattcccgcttaaccatccctagagcacatgaaatatcaacctccctagaatacatggaataccaattcttattctccccggaaccaatactttccttttgatctccacccaactatctccagaatacatgaaatgccattctctaaccaccctagagtacataaaaatgacaatttccaatttcctcaaagataatactctccctttgaactctacccgaatatctctagagtacatgaaatgttgatacctttcctttagactccacctatatttcccagagtccataaaatatccttttcaatccccttttgagtcaacatacccatcctttagagtttatcaatctaccactaattccgttcctataaaaattcctatccacatatacttccgaatccagttctgtactcccacaattattttccctttgaaatctcgttcctccaaattatccatttataaccctgaggctaaaccggccggtgtaattccaaattttgttggaatttattttggatcacccctatctagatctatccacaaaaaacctttacctccttccatccgatccaaaatattttatggttaagttcttattttaatcgagccgccaatttgattaccatggcttgatcgcatccttggcacaagaataatattatcaccaataattgctcttgtgctaagaaacctaatttctaatcccttccatataaagtccgaattttctttagcccaccaccgaatcaccagaaattcataccgcatatctggggactaaaatcctatttattcctccatccatttttaccaccatcccaaatatttatccaaagttagtagattaattatttctattttctttccttccatttgattatttcaatcttacattttaaaatattagaggaaatattttgtgacaagttttatatatttggttcttattgaattctattaaaattggagcatctttattttgaatccttttcaagtttatatttcaaaaataaatatctttagttttatttttaaaatatttcaaacctctttagcattttaaaaaatctattttaaaattccttttctaaaatttcaaaaagatccactaacatttttctttagatctatttcttttgaattccttagccaaaatccaaaaagatccacatccatcctttgatttccatctcctttaaattccttgaccaaagtccccaaataactttctttagattttatctcctttgcattctattcaattcccttcatataaaattaccaaaattctctattcaatttgggccaaaaactcctcatttggcccattccattctcttttttcttttccctccattttttctcggaataagttatctaaggtcccttaacttgtcaacgaatccgattttcgtccttcaaccggaaaaccaggtacaacaggtctctcaactatcaaaaccggtgctgatgaggtccctcggcggttttgactaacgtgccgcctacgtggctaatttaactcggtcttcatctgacgtggcattgacgtggtgcttacatggcaatttatcttgaaaaataataaaacatggaggacccaaatatcagtttcacaaaaaaataataataaatagtgggacctgcgtgggccctacctatcatcctctttctcccctcttatctttatcatctctctcagtctctccggtgggagaggagcaacgttcgtgctcgagtgccggccggcgggaggagaggagcggcggccggtgagagagtgtcatgtatctggtgggctgcatgggctgctggagaaatgggcttggcctagctcacatactgaaggtgcaagcaaccaagaagtataaataccaaccgtggcagtgagagaaggcatcgatgaattagaacctgatggttgtggcctcttcttcctcctcttgatttctcctctaatcccctactctgtgtttctctgattccctttaccccctgcttctcttcccaatctctgctgctagttcttccaatttgtatccctaaacttgatatacagagttggagaggatatattgctcctgtgcttgtgttcaccggtgagattcatgtgggatcgtgacaatatggtatcagagcagtcgattcatgggattccgatccaggagatgcagtggacgacacatgggggcagtgacgactgttggggccaggatttgagccatggaggtgacagtgtcggaggcgcccgtcaggtgttcgatgaaatgccaagccggttaggaagtgctgcaggtgctgcactccatgtccaagtgaaccacctcatctaccctgtgtctaccaatgtgatgcatcaagtcttcaacccctacggagcagtggcggtgcagatgcttgtggtcgatgcatggcgtgtggaggcaattgtttggtttcggacgacctgcgacgctgagtgggctcaggctgaactccacggccgcaatatctacgatgggggctgcgtgttggatgtgcaacatgtgccgaccttgctcgaagacagagccgacattgcgcccaccaagtgttcgatgcaagtaccagtatgtgccaccacaaagtctgatacccagagcactcctactactctggaacacgtgttcccggccaccatgagcccatctgcggcctcaaccaaatcagcagtcacaacaacgtcggcttcactcaccgaggccatggaggctgaggctagcatggacaaggtggtggagaatgcaggcaaggccattcaagacctgtgcactaggatcgatcggattttggaggcatttcgcgacaccaaggtggatttatccgagaacaaggattccactagagatgtggcagtgttgagcgccaacactagtccaactaccattgcattggaggtcagtgctgaggccggcccaactaaccatgttgactcagccaagcttggcatgggaacaaccatcgagtgttcaatgaaggggaagaatcagttggttgatgatgatggcaaagacatggccaacgatgagagaactgagctcattgaagtggataccaagtttacttctgtgaatttatgcttcagagatccatggttagccctcaatgcaattccttccaggatcttgattgggtgtctaagccatgaccttggtgttaacagtctctcgttggttccatctacgttggaagtgccataccattgctttgtattgggctcagtatgtagagttagctctccaccagtaccactttggagagtggcagttccattgtacagcgatcaggtctattcaggttctcggccctcgccatggcctgatccatggttgcattcaggcagcggaagtgtggtggtatttcagcctctccaaccatggccaccccctctacaagccaagagcaaaggttctattgttgagcggcaactagaactgtggcatgatcctcaaataaaacaagataacaaaggtgttgtggtgaatctcctacaacccagactttcacctgacaaatggaatgagtcttggttcagttgtgataatgcttgggagttagcacaaagtcactgcaagttcttgctgacagaacacatggccttgattgcacaatatgaaaagaatcgctttgagcaagatctaagtctgtgtatggtaagcaaaagggcatcctggaatctttggaatctgttgactgagggatcaatatcattaatggaagcaaaagcacaattgtttaggaggatgcattgggttggtagtaaaactatggatcaatttgtgtggaatttatgcatgccgaatatggagaaatcaccatggccaccacctcctcataagatcagaactgatttattgtggttgaattcgcatgaagtatcatctctccaattcaatgctgaattctggaggttgctggcaagaatcaatttgtttgattgtcattctggacaagaggatatgcagctgttccaggcaggtgcaaagcagtactctcctttggtggttagaatggcccttgccgatcatttacaagcaccctgggaccctggaggcagtaacctggttactctcttgcatgttaggaaggacaggcagcaaccaccaccacgaccactgcaaattgtctttcctattggattatctggtgtgaaggtctggctattgtttgctctcactttggtgcagttccttggatcggttaccacgtataatgcaaagttttggagattttcgcctgatagtgtttcaatccaagggagtaaagaatccaatttcagggttgcataccttatgtgcagaagttcagataggcaacttgcaagcagcaatatagctctgaacattcaaacaagctcttcttgtcatgttttacacaagtgtcgtcaagttctaaattcttgtcaagcaccaagttcatttcagctcaaacttacagcaagttgtttactgggcaaacattctcttagaaggaaaggcataggttctgttcctactgacaaaagaacccatttacaagtgctgctgcatcaacttatgtacaagaaatcatatcaaatgtatgagaccagagctcaagtgctgaaactgacaaggccttggaatcttggaattcttcttctcaacaattccttgatggctatctacagcagaagttgttgcatcgacttggggacaagtcgatttttaaggagggaggaatgtcatgtatctggtaggctgcatgggctgctggagaaatgggcttggcctagctcacatactgaaggtgcaagcaaccaagaagtataaataccaaccgtggcagtgagagaaggcatcgatgaattagaacctgatggttgtggcctcttcttcctcctcttgatttctcctctaatcccctactctgtgtttctctgattccctttaccccctgcttctcttcccaatctctgctgctagttcttccaatttgtatccctaaacttgatatacacagttggagaggatatattgctcctgtgcttgtgttcaccggtgagattcatgtgggatcgtgacagagaggagcggcacgcgggcgccagccggtggaaggagaggagccgcgggcggaggccgaggggggaggagaagttggcgggatttgggagggaaaggagagggagaagcggccgccgccgccgccgccgccgctccggagtgttggctcctccctttccgacatatcttgacccacatcgtttctgttgttgttgtcagtgtaccactgggtgctctcaagcacggggcgcctcgacggcgtgctggccggcacactccgcggctacgtttggtggccgtcgatctgcgacggccatgggggagacggtcgcagctgggaggcgagaaggcggcgaccattggcttgggccccagcctcctctccaccatgctagcacatcgacgggagctcgggaggctgcggtggcgcaaaatgatgcgggagctcggctaggcagcactgccgccatggagctcaatgcagtttgcggcggatagctacccgcgtgcacgacggtgtgggcaccgcatggcgaagcacgcgctcagagatgcattggggttgccgcgacggacggagccgcacgctgccgaggccacgcgcggcggcaggcttgatggagaagcagaaacagttttttttttttttccgttgcagcgcggcactttgagttttggtccttggtaatggtaggagcaggagcagaagcaaccttgttggcttgttggccttcctgcctttcctgcactacttcttccccgatcaacccttgaaccaagttatgtaggacttccacaacaacagcagcatcagcgacggcagggactggatgtagggatgggtaatcaactaatcatgctttccggcggcggcgactaatcaactaatatgctccgtcgcgctcgccggcgaccttctcctctgcctcctcctcccccagccacctctccactgcccgcggcctgccgctctgcccgcccctccgctcgcctgcggcctaccgccgccgctccggcgtgaggatgagggagagccgagaggaagaagagggacagccgagagggacttgtggggcccacgtgggtcccaccatctttttttatttgacatgtgggccccatcattttttttaatttatgtgtgaaactgacatgtgggtcccatgaagtttattatttttctggatcggattgccacataagcgccacgtcaatactacatcagatgaacaccaagtcaaataagccatgtagacgccatgtcagccaaaaccactatcaaaactaccgagggacctcatctgcactggttttgatagttcagggacccgttctatctggttttccggttgaaggggaaaaatcggattcgtggacaagttaagagacctcagttgaacttattccaatcagttataacatgcatggaatgaaacaggttctcgaaattgtggacttactaaattcctctcttattgggcctcactctagctaggcccagattcctggtaagccttgtagcaattggtgtagtcgtgtagaggatctgattgctttttccaaactttgttttgtccttcactgcataaatatacacttatgtattttacctattttatttaagaggcttctctgtaaaattggttatactctcagttcttcctaataaattctatgcaaaaattgctactacgcatctaaattttatggtctttggtgatggccaattggccatcagaagaacatatataccctgaggatagattaaaaacttggtaatttattgaggataccattgtcattatttaattattattttgggataaatggagagagaaacatgcgaatatttatcattaaaaatattcactcatcctagcgcattgcaagcgtgtagattaattagcaaccgatatgcaagctagtactccctccgtttcacagggtaaaccattctagcatttctcacattcatattgatgttaatgaatctagatactttcacaatgtaagccattctagcatttttcacatttataatgatgttaatgaatctagatatatgaatgtggaaaatactagaatgacttacattgtgaaacggaaagagtacattgcaaggggcttttaactatttgccacttttagatttggcaaataactatttgccacccctatctcaatgacatatgggtccagtggcaaaaagttatttgccacatctaaatatggcaaatggttaaatatctcacattgcaaggatcctttataacgtgctcatatggatatgttggctacataatgtagtatttataaattataatgcgagccgaatcaaaaaaaatgatacaaataaaagttattgttatataaaaaaaacgttttaacctgatgtctactaataaaaaccaacttcttactacatagttaggcctggtttagttcctcaaattttcttctcaaaaacatcacatcgaatctttggacacatatatgaagcattaaatatatattaaaaaaattaattgtacagttagggggaaaatcgcgagacgaatcttttgagtctaattagtccatgattagccataagtgttacagtaacccacatgtgctaatgatggattaattatgctcaaaagattcgtctcacggttatgaaattagtttttttcatttgtgtccaaaaaccccttccgataccctgtcaaatatctgatgtggcaaaaaaaaattcttttcacgaattaaactagcccttagaaggtaatttttttttaaagaaatgaataacttgaggttggagccttggacacggtgtgaactcccaagtacgaaagtctagtttgcctgcgtcattgtagtgcatatacgcaatgaggcagccctcaattccgccgcatcttttgttggtcaaaggatgggtaattgtatgcggccgccttttttccgtggtagatgttctacttctcatgcctcagctgcatttctggagcaaaggacctgacagttcgatcgagcgagctagcggctctgattgtttgataaatcgtaggaaatacaaactaatcaaataaaaaagatttatacgataaaacttagcgatttaaattgagttctgaaaaacaaactacgatgaatttttttttaaaaatcaagatgcagatgaacaggagttcgagagtttgaacttcgagtagctagcaaagtcaatctgaacagagtgcacggtagattcgaccttttcttatacggtgaagctcaattttgggtagatattttattcgtctctttactagtgataaaataagatctaggcaacgcaggtgacaaaaacaactaaaaactaattacgaaatcaaactataagaaaaattaaaatcaacttgttgaactttatgggaaaagctggtcatgtgatagtgagttgtaggtaataagttcaaatccataaaatcaagatatacctctaggatctctcttttctaatatgtgttaggagacgaattcataaaagtgttgtattgcttgtatatttgtgtatgtgcatgtgtaacaataattaccactttggttatggatgaacggtaaaattcaaacaaattttataaaacaaatacatttcagtttgattttattacctgtttaccaagcaatttctagattcctaccggcttgtctgatcaccatgatgactgaggctgtgttctttgctcctagtcccaactcctctcccttgtttctatacaaaagttgcttaaaatatcataatgatccatttttttaaaaaaatagctaatacttatttaatcacgtatcaatagactactcctttttcgtgtggaggagttttgttcccatccacccaaaactaacacagcctgagcagttaagatgactagccccaacgtttggcatattgaagaaaaaagcaaaacgatatatttacaaatgaaaaataatttatgaataaaacttttatctacgtgttcttaatgatctaaaagcaaagaataaaaaataaactacactgagaaaaccccaaactctaaattttaaaatttaaattttggctaataagtataagcataactgtataagcaaaatgatgatgcttgacatttgccatccgtaccgtgatcctccttttactgctcaccaagaacgagttttaacacaaattaagattgatagaaaatgatgtgattgattaagcttataaagttaaaataaaatgtttataataaagtagtataagacggcctcgacctcttggtgacggccttgatggaggcattggaccttgtagtcaactcagtacatggcattttgcggcgagcaacgtcgacgacttgatggaggtttagacaagtcggagtcaaaagaaacggactcgataggcaaaaaggactgccatgattatgattggagtccctggcaaagtttggccgagttcaactaactcacacctaatttctgaacaaggcctacgatttataaaaaactgtatggaactgcactaattccctaatttaaacagatcaactggcctcaatgtatgtttgaaattcatgtgagccagtcaatactgcattttataacagcttcagctatttatataacggaattatttaaagttgacaccaatagaggactagaagagtgcagagtgcataacgctgagaacaagaccatgttttaccagatgctcgctgccattctccaagcacttcttataggtacgtatgctggctgcaacatatgttcaccattattatcatcaccatttttctctttctgaaattgcctgtgacatgctacacagctcagatgattcatgggcaaagcgataaggaagttcttgttcagctcaagaacttcctgcaggtgcaaaacccgataaaccacggcgcttacgtcagctggtcggagtcagaggcctcgccgtgccattggaaaggtgttgggtgtgatgatgccgggcatgtgaattccctcgatctttcgaactcaaacatcgcaggtccattattcagaaacttctcacgcatcatgcggcttacccacctaaacctttcatcaaacagcatcactggtgaactccaggatgatctcaaacaatgccagagtctccagcacctcaacatatccaacaacctcattggtggcatccttgatttgtccagcctgaccaaccttcagacactagacgtatcccaaaatcggtttcagggaaggatagacagaaacttcccgggaatatgcggcaacctcactttcctcagtgtctccagcaacagcttcacaggcaggatagataaactatttgacggctgcccaaagctcaagcatgttgatctcagctggaacggcttcaccggcatggtctggccaggcattgaaaggcttagacagttcaaggccaacaacaacaacctcacagggagaatttctcctggcatgttcacagaagggtgcaaattgcgctcactgaacattgctatcaactcattgcacggtagctttccaagctccattggcaattgctctaacatgaaattcctttcactatgggaaaacagcttttatggatctataccaccaggaattggttcgattgcacggcttgaggagctggtccttgcaagcaacagctttgatggaattattccaatggagctgacaaactgtaccaacctgaaatatttggacatcagtgacaacaattttggtggagaggtgcaggatgtctttgggaaactaacatgcatgaggagtctgttactccaagagaacaactatactggtggcattacctcatccgggattctccagttgccgaatctaattgtgcttgacctatgctacaaccaattctccggtgatttacccagtgaaatcagcagcatgaagaatctcaaggttctcatgcttgctgaaaacaacttctctggtaaaataccaccaacatatggtcagcttctcaggctccaagtattggacttgtccttcaacagtctttctggtgagattccaccagacattggtaacctatcatcacttctccttttgatacttgctgggaaccaaatttcaggtgagatcccaagggagataggaaattgtaccagcttagtttggcttaaccttgctggaaaccagctaatggggcaaatcccaccagagatggcaaatatagggagcaatccaagcccaacattcatggagaatcgaaagaacccagaacttttggaatctatcaccagcaaatgtgtcgctgtagagtggcttccatcaagttatccagaattcaactttgttcagtccctgatgatgtctcagaagaactgccaaaccatatggaatcgactcgccatggggtatgacgtacttccaatatcttcaccactgcgaacagcattaggatatgttcagttgtcaggaaatctgctgtctggagagataccatctgctattggtacaatgaagaacttcagtttgctccttcttgatggaaaccgactctctggacacctaccagcagagattggtcatcttcaacttgttgctttgaatatctcaagcaattttatttctggtgaaattccctctgagattggtcatatggtaacacttgaaagccttgatctgtcaagtaataacttctctggtgcactcccatcaaaccttaaccaactcactaaactgagtaggttcaatttgtcatacaatccgcttctctcagggaatgttccaagcagtgggcagctctccacctttgatgagcaatcttttctgggagatccactgttgtctttgaatgtaacagcaggttccagttctgattctagtccaagggagttctcatcatctgacacagaggagcatcctacaaacgaagagatcatggtgacaacaattgcattccttgcattcttttcagtcacattgcttaccagagaatttcatatcttcatgtacttgtacttcacagcatcacggaaaattgccaactgtaggattatttgcacctgagtgctagataagttaaatcacttaatagaacaaatacctttgaaaagcgaatgtgtccctttatgttccatttctgatttcaaatataaatatttactagacaatatggcatgctagttggcatgtagtcacattggacaaatcagttcaaacgaagctgctgaaaagatgacaaaggacatatgcaaccgaaaaggcttggttgtgaagattggagaatcagcattttcgaccaaacccctctatagtttgtaccagcaaccataaataagtgcactgtaactaaccatgctgtagaactgatattactgtcgattttaaaaagtgaccaaaccataatgtagtaatgtactgcataaaacactatgatatcaagttcggtgtcagcactgataaagtttccagcaaacatgcttcttgttgattgcagtcttcctaccttgcatggcaacgtgccaactcaaagagttataagtagaggatctctttttccaaaaacaaatagtaagtttactgacaactcagtgctcttacaacaatgtaagcatttggcaatacgcctcttttgtgaataataaccatccgcttgacactgggaatctccaaggttggtcaaaattcacaaatacatctggctatatatgaagaattgtttcccgctgtacgtttctcttcaactgcaactgcacaagctcctatcaatgaaacagctgataccatgaaaatatcatttaatttagtcaagaaagatgaaataaattgtaaattgcagaactatttaattcatacggagtctaaatcagctcaaaggaaagaagtggactctaaagctttgcattttgaaaaagcataggtcaatcatacaccatggaaatattattttgaatcaaggtctcaaggaagaagcaaataatacaagtctcaattgcataattaaatcagatatcatataattaaggatgaactgaaggatatgcccatatcttaaatatatcgggaatatgtagcaaagagatagataccctactctaatcatgtagacagaggtactgcatgagcagttattcaacagacattcatgacttcatgtacccagtcccatctcttagagtggaagacttctaccatgtaaaaaggcatgagcaaatgcaaagggttcagcctgtatagttatttgattccagtgcaatagataatcattgccaatgcatgtctctagtccagaactccagattgccatatcaataaattttgaagtcactatttagctggtaagttgtgttaagtgaaccaggctcaaagtcattgtactcggtggaacttaaccgtagcacaaataacaacatgaaaatactatgacttgtttctcttgtcatcttatccaatgtgttgtattcaatagtatccaccttggaactcacatttaaagaaaccattttggaacaggggtacatagaatgtcagcttgattgagatggatttgtatacagctaactaccttagtagatgcactttcaagagtatatgcatctgtaggaagagtttgctatcagggtttcccttaccatttaccgcctggtaaccgcgataaactgagaaaaaccggacaaaatttaccaaattttatttttttaaaaaaaaaatactttttaacgtggtagggataccgggcctttaccgttactgtgccctggtggtaagcctggttaccacagtaaccagtggtaagggaaaccctgattgtggttgttattgccttttgttattgtaaattttccgctacttaagggattggataaggtatctcagttgcacttaggagcactagatgttgtatgtagttttctgaccatctatatcatcatcaacaaaacttatatctgaagttctaaatgtacttcagtttgtataatagtgagaacatttctcattgaatgtgagcacaaatttctaccaagatcattttcttggttgtgttggggatagtcaggtcacagtcatctagccatggatttgaactttatgagaaagctggtgaataacacatgtgattgaataatttttttgcgaaaatggtgggccagtcccaatctatccagtgtagtgagcactaacttaaagcattaattctaagagtccccttttaaacactaaagttaatatagtgaaattccgagcatttgacagattcaagataagcagtaccttagaggacgttttgagatacgttttcacctcaaatccatctaaccctgaatgatgaactcttagttattcggtttaacttttatcaagaggttgtaactataataagtaataaggtgcattaaattggtcacataaaaatgaatcacaaagcatgtaaagtaaaggcatcatatgcacaaccacagaggagaattttaaataatagatcagcatgggagagactgagttttagatgaacatgtcaataagtcatgctgagaaaacaatgtcatgttaaggattacatgaattcatcatcaactgtcaaaggaataaacagctatattgtcaagtagaaatatgaacaaagaaggtcgatgatgctttatcattaaaaggcatggtctagaatgcttaccgatgtgatagtgtacattcttcaatttatccaaatgcattcctatctgatctgcacatcccagaaatagcaagctcaaagaaccacaatatcctgattaatctctagaagaacactactactgaattccttaattaaatttctctgcatcacatgattacatatctaacactaaattgagatgcttgtcccaaatattagttgtatttaccttcctgataaaaatatcccaagaatcatcatccaagaaatcccgtcaacttaaaactacaatttcaagaattttgctaacgatatctttatgtattgactattgagtcagaaaagctatcaaccaaaatttgcaaaagaagctttgcttggactgcatcctctggtcaccatctcaaaaactgcagccccttcatttggcttccccgttttgcataatccctttatcaatacatcataagtcgttgcatttggtccatatcctcattcaaccatcacattacacacccgcccagcctcctataactccacattttcacataatcctcaaataagtgaattctacgttaacagactcggtttgaaacccctctcgagttcatcaaccaggttcctttccttgcaaaccattccattcttgcccaaccaatagatcaatgtgcttgtgaccacattatctggtggcacgttcttctgtaccatccatctcctcatttcatatggctcatttacttttccaccttggcatagcacatcaacaactttagcacctcacttatttgcgtgcctcagcagattttgtgacctcattcggttgtaacctggccacatccataattttggctgcatgttggagcattccgcactggcagtaactgccaatgagcagagtgtgcatcgtagcatatggtctacagtcactcgcaactatatcatcataaagattttgtgcacactcaagatccccctttcccacagtggacagcaagaaccgtggtgtaggtgacggcatctggggcgatccccaggccaggcatttcatcgagtaccttgagggcagaatccaggtcaccgatgccaacaagccccttgagcaggaatgcaggatgttgcggtagccgatagacgagattgggtgtgatgtagaggttagtaggcacatcgcaagagagcgcggcagcaaagcggaggcggcgcgcggagatgagagaatgaaggaggcggcgcggctagggctggacggtcgaggtgacggtgtggtgggcgagtggcacggtggtggtctttgcggtggagaaagagagggcggtgcagcgtcggcgtcggcgggcgtacactaacagcggcggcatgggcggaaggaagggaagagacaaattcacaggggctgttcttaaaattccataaaacattctacaatagggccactctgtaaattcccatttttctctttgtgaaatcatgaaagccctcactgtaagtgaagaaaactacctcgtttgttcattataagatattttgggttttaaatagattaatgcacgggttcatatatgtgtcaaaataccatatttatccccactaagaccatgtttgtttcagcgatttagattattgagtcagattactgtaagctggattataataagctggcgtagaatgagctatgagttatttgtttctctggactattggaggcatggattactgggtttgaaaggccaaagtttataatgtcctcaactattttggatgccttgctcatcctttttgtcactatatacaacaaatacatattttgaaaatagctaaaaaaataatgtcatgtattaataaataaatcattcatgacaacttttttataatagagtaaacaccaaattattatctcctagcaaataaaacatcggaaatattatcacacaagatatttgtgtctccctcttcgtctccaaattgactagcattcgcttgagatgaaggcatcatcatatagttttcatcattatcacaccgatcaaactcttcccactcaatttactatctcgaataaaattatgaagcgccatgcatgcatgtataatgcatatatagcatcggataactcatatgtccaacaaaatttctccatttcatcttcaaaataccaaaagaacgctcaatcatattacaaatagatgaatataagtggttgaacacctccttgtcactagaatgcctagtgaaggagccggcgcgcagtgacggtccagattagagagaagcccgagcgtggggtgaggaagacggcggcgcggctaaggtaggagaggcccgatgctcgcgtgaccaggggacgaggcagtggcgcacgctgctgggggaggaggaggccgatgcccacgcggccggggtagatgcacacgcggagtggggaaggagtccgctctgtttggttggatgacagagatgggtaatttcttttaagtatcttggggtagtgggtctttagccgtgaaataatatggaaaaaaagcacttttggaggaattaccagattatactaatatggcttatatattatccattcatttcaaattactcataataatctagattatgataatcttaaactaaaacaaacagggtctaagggttacttaagtgctattttctcaagaagccatatcacaacaattgttgttagcctttggataattcatcaatggtgcaaattgcatcttttcttcccaaaagctgcaccatataactcagtcatttataacctttggataattagaagaagggagaagaggccaaaacaacttgacggagctcgtggctcctcaccgggagaccgcgcaggcccccctttgccggttcggccgggggcttagggtgagatctcaagctctcgctgtgtgtggaaagatcgtccgcccgcaagacacacgagacacggcgatgtatacaggttcgggccgctgcgaagcgtaataccctactcctgtgttttggtggatctgtgtatgaaagaactacaaagtgtgagccgacctctcccttgttctaggctctgaatctggaaagaatcatcccccttctctatgggcaaggtcctccttttatacttcaaggggataccacatgcacccttctctttccaaactggacttttcttctctttatggacggagattggtatggttgctgtccgaatgacactttgatgggacagcccacacctacctccactcccagcggagacgggcgcaacgtgggatcgtggctgcccgttgctgacgcgaccagtgtcagaccggtcattcttgtccaccacgcgtcagtttaatagcatgcatgtttgcccttcttcgtgtaacaccttgtctgtaatggttaggatgaagcctggtataaatctaaccagggctaacgtgccatctctaagagataacacgctagctccggcttgagacgagttgcctagaggctttcgtcttgacgggatggggcaaggcgtgcgtcagaccgccagtcgccacctaacccttgatctgaccggtctgtgactggtcacagaccggataaaagagcgtgctgtactgcgttgcatgcagcgtgacacgcttgaccaaactgcaataaatgctgttaggtgagcacagctgtgctcacttatcccatatatgtggcgcagactcctttaaggggtcggggtgcttcggccctcggggtcggggcaaaagcaacccgaccccccctcgggggaaatcaggaggagggcggacacctcaccctcgggcccgacgtccccgaaggtgccaggccacgtgggcgattgtgtctgcctcaagcctctggtcatgatactcccggtcccatatcaccgacagtagcccccggcgttatgccagagcaatttcccttcccaagggaagcggtcaggtgtgacgccacccctaaagcctggtgacaggtgggaccggtctccgtagttgggcaaaatacccaacggtctcaatccatgcacattggtattgataactttggttgtccataatgggcggtctattcaagactgccacatcacttgagcagcgcgcgaatctgggtgagcagatttgtctcgctcggagatacggtaacgccgcttcagtcggcgagcgtaattaacgcgcgcacgatacaatccgtttcgattgccacaaccgcatatccacttcacgcgccgtaagcgggcgaatgggattagtggaagcgtgggcacgggaaactagggagcgagatagcgagatacgagggagcgaggtagtgggcgcgagaaacgaggagccaggcccagcgatggcaagggtataaaagcatcgagaaaaggatttgctcccttcctttcgccattgttcctcttgccttcgccgcctgagctctaactctttctctgctacgccctactttcgccacacgcgctcgttctcaatcatctcttcctcaaccgccatggcacggggctctgctctgctcgacggcagtgtactaccgccttcccgcatcgtgaacgagaggcacgccggactgccgcgccgcttcatgcctgagtccgccaccggtcgggagacagtgatgctgggcgaggggcgcccggcaccagactacccggggcggtccatcttcttcctccccttcgcaatggctgggctggtcccgccattttctcatttcttcatggatgtcctggagttctacgatctccagatggcgcacctcacccccaatgcggtgatgacattggccatcttcgcgcacctgtgcgagatgtttattggggtgcgcccctctcttcagctgttccggtggttcttcaccgtgcagtcggtgtcaccgccgtcggtggttggcggctgctacttccagccgcgggggccggtgttgaatcgctacatcccctgcgtcctccgcaagaagtgggacgactggaagagcgactggttctacacccccctcgccaacgaagcgcgcctccgacttccaagccagcccccggcgcaggtctccagctggcgggcgccggtagatctgggggaggagtacgacgccgtcctcgaccgcctggcgggcctgcgatcccaggggctcaccggggccatggtgtacggcgattacctccgtcgccggattgcgccgctccaacggcgcgcccggagcgcctgggagtacactggtcctgaagactacatgcggacccaccagggagccagatgggattgggctcccgaggacttcaagatcgtggtccaaagggtgctgaatcttggctccgcggaggcgtctcgcattcctcaggagatcctccccctctgcagcgatcccgaccgcgcctccattctaaccattatgatgggggtcggggcctcagaggagagagcccctaagggccacgacggcgcgggcgagcgccgccggggggaacaatctgccccaggagggggtcgtgcttctgggccccgcgtcgggggctcggggagcagccgccctgccgacgcccaggggaagaggaagctgggaggaacacctcccccatctcctccccgagggggcggggcggcgcgtgccagtagtcggcgcccggagggggccgcgccgacgtcacagcccgagggggagcgcaagaagaagcggctccgcaagatgggggagacggaaccagcccggggaaacctgatttcccctccaaagtggtcatttaaccgaccccctcgcaggttcgtctcactcttattgcgaccatctttctcccaaacggaagttttttcttactcattttgttcgtcttctggttttttcttctgcttcagcgatgtcccgtcgcattcctcccgccaccccaagtccggccagtccgaggccgaagatccagcggccgcagaggagcggaggcgagagtctgaccggcgtgaagccgcagcccgccttcgggaagctgaagaggccgcccgggaggccgcccgggttcgccaagcggaggaagctgctcgggaggaggccgcccgggctcgccaagccgaagaagctgcccgggaggaggccgcccgggctcgccaggctgaggcgacagctgctgctggcgcgtcacttgggcctactccctcgggcggccctcaggcgacatccttcgaggcggctcgcgacgaggccgcgggcgcgtcgcctgggcctacctcaccgggcgacgcccaggaccaaacgggcccgggggacatccccgagcccagcgcatcctccggggggccaagccgcgtcgcattttctccaaggcggctcttttcctcatcttctgtcgccccgctgagcgccgagccccttctgcaggccctggccgccgcgaacaccgcagtgctggatgggttcaacgcccgagtggaggccctgcgtgcggaacgagcggagctcgaggccgcatgggcgcgtgttgaggaggggcggcgctcggtggacgccatggtggaggtgggccgtaaggctcaccgccgccacatctcggagcttgaagcccgcaaggcggcgctggcggagatcgcccgagaggtggaggaggagcgagaggccgccctcatcgccaccaccgcgatggtcgaggcgcaagacaccctccgccttcaacacgcaagctgggaggcggagctgaagaacaagctcgacgccgcccaaggggttctcaactccgccgctgcccgagagcggcgggcaacggaagtcgaagcggcgtcccggcggcgcgaggagtcccttgaggcccgtgccatggcgctggaagaacacgccggcaccgtggagaagggcttcacggaccgcgaggccgccaccgctctccgggaggcgacgctggcggcgcacgaggccgcctgcgccgaggaggagtccgcgctccgccttcgcgaggaggcactcgctgagcgggagcgaactctcgaggaggccgaggccacgacgcaacggctggcggacagcctctccctccgcgaggcggcgcaagaggagcaggcgcgccgcaaccttgaatgcgtccgtgccgagagggccgcgctggagcagcgggctgccaacctcgaggcacgggagaaagagctggccgcgagggcgcgcatcggtggggcggctgcgggcgaaagcgacttagccgctcgcctcgcggctgccgaacacaccgtcgctgacatgcagcgcgcgctggattcttccatcggggaggccgaggccctccgcttggcgggcgagatggggcccgacatgctttgggactcggtctcccgcatggatcgcgccggtcggcaagcgggcctctggaaaggccagtcgaggacgcgccctagcaatctggaaggcctcgctccgcacctcaacaggatggcctgggttctcgaacgactccccgaggagctcgagaagaccattaagtcatcctcgagggacctcgcccggggggcggtcgaactcgtgctggcgagttaccaggcccgggaccccaacttctctccatggatggcgctggaggagttcccccccgggaccgaggacgacgcgcgcgcgcgggtcggggatgctgccgaccacatcgtcaacggcttcgaggggtcggcccctcggcttgcgttcgcccccagctccgacgaggagggcgacgccagcggtgaggacgacagtggcgaagaggccggcgacccgggcgcgttggaatgagcccccaggcccccgccaatttccaatcttttctttttctttcttctttttgtatagatcaacttaatctgcaatcaaaaatgatgaaaaatttctatgttaactttattttgctatacatatgagctgaggatgatttgtgccgtggtccttttgcgccttagcttgaaataagggctcgtgcccaagtcccagtcctcgagtggttcgggtcggggctagtgcctggggagatccacatgtcgagactggccaggccgggaacatggtgaccgaggggtatgggtgacccgattgtgggtttttgccgattcccccccggagttcaccacgccccggggcacggctcggttctgggccccgtttggcgattttagctgaccgaaccgaacccccaagggcaaggttgagtacgagtgaccttattttaagttaagattcttcaaaaggaaagaacagcacagacacaacctttaggaatttgaaactgcttttattgaaatgctgaaataagaaaagtaagactgtgcatgtgtggtagcccccggccaaccctgcacacccgaggggggtgcggggttggcccgagccaaaacctgacacccgaccccccccttcaggggtagaagcgacgaaggtgctcgatgttccacgggttcggcagctcagtgccgtcgcccgtggccagccgtacggagcccggccgggggacgccgattactcgatacggaccctcccacattggtgagagcttgctcaatccagcacgcgtttggacgcggcgtaggacgaggtcgtcgacgcagagtgatcgggcccggacgtggcgctgatggtagcgccgtaggctctgctggtagcgcgcgactcggagggccgcgcgccgccttcgctcttccaagtagtcgaggtcatctctacgaagctgatcttgatcagcctcgcagtacatggtggcccgaggagaccttagggtgagctcggatgggagaaccgcttctgcgccgtagacgaggaagaaaggcgtttccctggtcgctcggcttggtgtggttcggttcgcccagagcaccgctggcaactcctcgatccatgaatcgccgtgcttcttgagaatattgaaggtcttggttttaaggcctttgaggatttctgcattggcgcgctccacttggccattgcttctggggtgggcaggtgaggcgaagcagagcttgatgcccatgtcttcacagtagtcgccgaagagttcactagtgaattgggtgccattatccgtaataatacggttaggcactccaaaacgggccgtgatgcccttaatgaatttaagagcagagtgcttatcgatcttgacaaccggataagcctcgggccacttggtgaacttgtcgatcgcaacatacagatactcaaacccgcccggggcccgtttgaacggtcccaggatatcaagcccacagacagcaaatggccatgacagtggtatgatctgcagggcttgggccggctgatggatttgcttggcgtggaactgacacgctctgcatcgccggaccagatcgactgcgtcattgagagctgtcggccagtaaaatccttgacgaaaggccttgccaaccagagtacgcgaggcggaatgggctccgcactcgccctcatggatatcagcaagaagctcaacgccttgttcctgagatatgcacttcaggaggattccgttagccgcgcgccgatagagggtcccttctaccaacacgtagcgtttggaaatgcgttgtacgcgttcactcccttcgcggtcctcaggtagagtcttatctgtaaggtatgtttggatctcagagatccaagcaatcaatctaagggagcttggagcgctcccttcgggtcccgaggcctggactccgacgggcctcgggggccggtcaggcgcatccgtctcccctaagggatcgggtcgcgccgacggctgggtcagcctttcttcaaaggcgcccggtggggtctgggctcgcgaagacgcgagccgtgagagttcgtcggcaatcatattatcccgtctgggcacatgccgaagttctatcccgtcaaaatggcgctccatacgccgtacttggcgcacgtaggcgtccatctgcgggtcagagcaccgatactccttacagacttggttaacaaccagctgagagtcgcctaacaccaggaggcggcggatccccagcccggccgccactctgagtccggcaaggagtccctcgtactctgccatattattagtcgctcgaaagtcgagacggaccaagtatctgaggacgtctccgttcggagaggtcaacgtgacccctgcaccggcgccctggagagacagagaaccgtcgaactgcatcacccagtgggcggtctgaggcagccgagaggggttcgtactggcctcgggtattgagacggtctctggagccggggtccactctgccacaaaatcggcgagggcctggctcttgatagcgtggcgtggttcaaagtgcagatcgaactcagaaagctcgattgcccactttaccactcgtcctgtaccctctcgattatgcaagatttgaccgagggggtaagacgtaaccacagtgacccgatgcgcctggaaataatggcgcagtttcctcgaggccatcagaatagcgtaaagcatcttctgggcctgtgggtatcgggtcttggcgtcccggagggcctcactaacaaagtagacaggccgctgcacctttcggcggggccgatcctcttcgctaggggccgtacccccggggcgttcttcatccaagtggcctctcggggcgcactcgtcttctgtgccgatgacctcggggtcggaggatgaaaggggcggccttccctcagtggcctcggggccgtcctgagggtcgggggctcctggcatcgtcggacaagcgggtaaagggcctactccggtcgtcaggggcctctggcctccgtccggctcgggggcctcttctccctgctttctcccgggtcgagtcaacacagggttagcctcggggccaaagggcgataggtgcggccttcccgcagtggcctcggggccctcctgagggtcgggggcacctagcaccgtctggcaagcgggcagagggccgactccggtcgtcgggggccttaggccaccgttcgactcgggggcctctcctccctgcctgctcccgggccaagtcggcacagagtgggggtgcgcagaatgaggattgtcctcatcgcgctccacaaccaacgctgcactaactacttggggggtcgctgctaagtaaagtagcagggattcatttggatccggggcaactagaaccggaggagagctgagatacgccttcaactgggcgagggcattttcagcttcctccgtccaagtaaacggcccggagcgcttaaggagcttaaacaagggtagcgccttctctcccagccttgatatgaaacgacttagggcggccatgcaaccggtgacgcattgcacatccctaagtttgctgggagggcgcatccgctcgatagctcgaatcttctcggggttggcctcaatgcctcgggcagagaccaaaaacccgagaagcttgcccgcaggtacaccaaacacgcacttatcggggttcagttttatgcgggcagagcggaggttttcaaaagtttccgctagatctgagagtaaggtctcttggttgcgcgtttttacaaccaagtcatcgacatacgcctcaacattacgtcctatttggctacccaaagaaattcgagtagtacgctgaaaagtaggacccgcattctttaacccgaagggcattgatgtataacaataagttcctacgggggtaatgaacgcagttttttcctcatcctccctagccatgcgaatctgatggtaaccagagtatgcatctagaaagcacaaaaggtcgcaccccgcagtggagtcgacaatctgatctatgcgaggcagggggtaaggatccttaggacatgccttgttaaggtcggtgtagtcgatgcacatccgaagcttgccgttcgccttgggaacgaccaccgggttcgccagccactccggatggatgacttcacggatgaatccggcctccagaagtctcgccacctcctcgcggatgaaggcttgacgttccggggcctgccgccgcactttctgccggaccggccttgcgcccggccgcacggcgagacggtgctcaatcacctccctggggaccccgggcatgtccgctggtctccatgcgaagacgtcagcgtttgcccgcaggaaggagacgagcgcgtcttcctatttgccatccagaagaccaccgatccgtgtggtcttggatgggctgtcgcccaaggcaacctccttgaccggtacctcgtcgcatgtggcgatccggtgcctcggggcggtgggggcagaggtgccaagcctctcgtcaccaccctcgggcttgggcgcagcagcgaggcggtcggcgcgctgctccatgcaagcgagcgcgactttaagatcgccatggacagagatggggccaccggggcccggcatcttcatctggaggtaggcgtagtggaccgccgccatgaacttcaccaacgcgggcctccctaggaccgcgttgtagggcagactgaggtccgccacatcgaagctcacccgctccgtgcggaagttggcgggtccaccgaaggtgaccggtaggtcgatgtgacctgatggccacgtgtgccccggcgtcacaccgatgatcggttgagacggctggagcaccatccccggggccttgatagcatcaaaggccgcgggggaaaggatgttgagagccgctcctccatctatgaggacacgccccaacttcacgttgcagatggtgggggaaactaccatcgcaacctgccctccccgggcaatgcacggtgggtggtcggtctggtcgaaagtgagagcaacctccgaccaccgcgcccgacgcatcgcctcatgagtaggagccatggccagcagctctcgcttcatagccttgaagctccggcgagagatgtgagcacacgctcctccatcgacggtggcaatggtggccccaggttcttggaaacctaggtcatcatcaccatcatcgatgccaacagcgggggccttctgcttggcctcacttcgccgtttgccggaaggaaccgccggggacttgccctcacggcgttcctgcctcctgtcctcctcccacttcctcgttcgctcagccagatttttgactgcacgacagtccgcgagatcgtggagggaggtgttgtggacggagcaccacctgccggcggggcgctccctgctgggagtaccagcctctttctttttgtcgctcgcaggcctcccctttcgagtggcccgcgaagcgccctcgacggcgaggacatgaccctcgtcgccggaacggtccgacctcttcttcctcctcctgtcacgccgccctgtctgagcggcggatccgggggcggccgaagctgccactccggaaccggaggagttccatgtccacgcttcctccttacgagccactcggtccgcgagctgaaaaagctccgcggtggtctggggctctttggaagcgatcttttcgagcatgcggttgtgtcgcacgccccccctgaacgcgtagatcaccgcgtgtgcagggatgcatggtatagtattgcggacttggcaaaaccgctgaatgtacgagcgaagcgactcatcatcgcctcgctgtactgcatgcaagtccgcttcttcgcctgggcgtggatatgtgccttggaagttcatggtgaactgttggcacagatcctcccaggagtggaccgacgcgggtggcaagttcatcagccaaccccgcgcctgtccctttagggccatgggaaagaaattcgccatgaccctgtcgtcacccccagcggcctcgatcccggtcgtatagacctggagaaactcggtggggttgacgctcccatcgtacttctcggtgatggtgggccggaaccttgggggccaacggacattccgaagactcgccacaaaggctctacagccgacaccaccagccgggggcacggagggctgatcctcacgtccatgtcgaggtgacactctggacgaggaggcgccctccgttgcacggggagtacgccggctattacgccggcgctcgatgttgaggcgggcatccggctccccatgctgatcctcccgagtcgagggtgtcgacgagggagtggcagccgaatgccgtgcagccgccgccgctcgctgcgccctccgccttgacgacacggagccggtggtagcggcgccggaggtcttggtggtggcggaccgtccaccagcacccaggcgctgctgtgccgtcatgaccaagttggccacgtcttccagccatcgctgggctggagactcagggtcatggacgacgggcgggtgacgtaggagcgcgccagcagcctgaagcgcaccctgaggcgtgctgccgtcgccgtagacgaggaggcgacgctccccatctcgctgttcccctgcatcacctgcgactggtgatgctgcggatttattcaccctctcgagcgcctccccctgcttaggactttggtgtggaggtgggggagtacgagctcgacgacgtgggtttggctctccgtcgtcgccgctcacactcggagagaggtcgtgcgcctttgcttgctcggccattaggctgaacaagggaagcttggcggacacggaagagtatgagagctcagaaaacacacgctgagccccctacctggcgcgccagatgacggagctcgtggctcctcaccgggagaccgcgcaggcccccctttgccggttcggccgggggcttagggtgagatctcaagctctcgctgtgtgtggaaagatcgtccgcccgcaagacacacgagacacggcgatgtatacaggttcgggccgctgcgaagcgtaataccctactcctgtgttttggtggatctgtgtatgaaagaactacaaagtgtgagccgacctctcccttgttctaggctctgaatctggaaagaatcatcccccttctctatgggcaaggtcctccttttatacttcaaggggataccacatgcacccttctctttccaaactggacttttcttctctttatggacggagattggtatggttgctgtccgaatgacactttgatgggacagcccacacctacctccactcccagcggagacgggcgcaacgtgggatcgtggctgcccgttgctgacgcgaccagtgtcagaccggtcattcttgtccaccacgcgtcagtttaatagcatgcatgtttgcccttcttcgtgtaacaccttgtctgtaatggttaggatgaagcctggtataaatctaaccagggctaacgtgccatctctaagagataacacgctagctccggcttgagacgagttgcctagaggctttcgtcttgacgggatggggcaaggcgtgcgtcagaccgccagtcgccacctaacccttgatctgaccggtctgtgactggtcacagaccggataaaagagcgtgctgtactgcgttgcatgcagcgtgacacgcttgaccaaactgcaataaatgctgttaggtgagcacagctgtgctcacttatcccatatatgtggcgcagactcctttaaggggtcggggtgcttcggccctcggggtcggggcaaaagcaacccgaccccccctcgggggaaatcaggaggagggcggacacctcaccctcgggcccgacgtccccgaaggtgccaggccacgtgggcgattgtgtctgcctcaagcctctggtcatgatactcccggtcccatatcaccgacacaacttataatatgaaacggaggaagtagtagtcatttgttttttcaaaatgaatgcacaggcaaatatgaagtggaaaacataactcgcaattttttttagatggtgcacaaatattatattaaactagatgggtactccacgcgttacagcaggagaattgtgtgataatatagtagatatgagttctctttcttacctactatacgatttttttcatgtgtttatatattttgtaactttataattatcctaaggatataaatggtttggttgtatggtgtgccttttgggggaagagatgcaatttacactcttgatgaatcatccaaaggctaaaaacaattgaggtgatgtggcttcatgagagaagagagaattagcattaactacacttagtggggatgaactttatagatatataggacaagacaaaaaaattacaatacaagaaaaattttatctctttcttccatattccctttttatagaagaaaaagatattgagattcattccacttttacccccgaactatttaattggaatgtttaaccctctaaactatttttttctcattttatatcccaaactattaaaaacggttcacttcacttccctaacgctactatttttttctctatataagccgtattttgcactttggcaaaataagatatgttcacaacaaacaaaaaattaagtctgatttaaacataaaatttcaaacaaacaaccatgaaaatatttttaaaaataaaactttgataatatagccatatatggctctaacaaatttcatataaaaaacaactttaataaagagcaattaaaaaagagaaatgttcttatgaagtaaaatgaaccactttcaatagtttataggtaaaatgagaaaaaaaatactagtctgtccaaaaaaagctaaactctggcttgtgtccaggttcatagctaggattagacttttttttgggacggaggggatagttaggaagttgagtgattctttgaattagttcagagaagtaaaatggactttttttttctcaaattttctaatatcacactaactacatgcggggtggggttcttttatattttttgaggaacttttttgtaatgtgttttttttatcgtttccatggtatattttacccagtaatagcaaatgatttttaccgtttccatggtatatttacctagtagtagcaaacaagcctgccagatcttgcggccaggtaaatagtattaaaagtatattgaatcctaaacataggcataaaacttttgtccatcgcagtctaaccatttaagaaaatttgaacagccataataatcaaccggaatagctactgagtaattctccttgtgttcgctcacataggatatcagagcatcactcatatttttttgaactcttaggtctcctttggaatgtatgattgtgaaaatataggaacaggaaaaatattgataagagtgtcatacctattgaattcctatagcaaattaaaacaaagagaaaaacatgaggacaaacgcaaacatgaagaaagttctgaaactatcgtttggatgatatataggaaaaacgctggaactttgtgtcattgggagagaaaaacatgaagaacctcatgctagactcctccaaaattcatagttcaaatccataagaattttgaaggaatttgagagagcttttactttgttccaaaggaccatatatgattttttttctcaggaaccaaatcctccaaaattccttgttttcccttcattccaaaggagcccttaataatgaattcatacgattgtgtgatccgccaatttgtactccctccatttcacattatatgaagatttggtattttcatccctcgtctagattcactaatattcacataaatttgaactgaaacacatacatggatctatgtatgaatctattcaaaacccaaaatgacttataatgcaaaataagtagcagtttgttctattatggcatcgggtatgatgatgaatattagatgtggaatttcaaacccattctcaagcaatggcgatcaataggaggaattccttacctattctgaccatctttttcagatggattctaaccctcttcattgcacaaaagttagccttccatctggccaaaagaaatagagaagtttgcttgtcatataataaacagtggggaaattaaatcaccaaaccagcattctgcttgaagcggggtcatcattattccctatttcacagcatacgggataacatcacattgccttgggaaaatacctcatatactgatcatgttctcatagaacaagtctaacaactgaatcaacatctttctctctctaaaaaatcaacatcatatcaaacagagaatgtgcaagagaactctacaagactgcaagggacacatcgaacatggtaacaagatcgtggtaacaaaatgaactaatcggtataaccggtaaatacattatgatagttctgtccaactgctatccatgggaaaaaaatgtatggcacaatttacatcttagtcccgtaaaaatatgtttggtgttagactgaattaattagccttgtcatgaataaggagcatcagaattcagaagagtcttgtaaatgcacaacaatctgcatcaatattttatcatgttccctggtttatcttttgaacagaagatggggaacattgtcacaaagtgctcaggaaataacctgcataacagaaaacggttaatcccataatattatactccctctatttctaaatatttgacaccgttgactttttagcacatgtttgaccgttcgtcttattcaaaaacttttgttaaatatgtaaaactatacttatacatataagtatatttaacaatgaatcaaataataggaaaataattaataattacttaaatttttttaataagatgaacggtcaaacatatttaaaaaagtcaacggtgtcaaatatttagaaacggagggagtattagtataggagaaaagccaaagaaataaggaatatataacttacaaaagttcattctgcaacttgatgcataaagcagggcatagcagtcctcaacatggataagggctttcatccaataaaaatagaaatgagactgcactgcatgatatgaaattggaactagcgcgccacagaggaaacccaagccctaactcccattctttctttctttctttttgaatcaactttccattctttggaggtttgcgcatcctaagttttgtcaagagtctttctattctatcaaaattacgaattttccactgaaaacactaccatgaaccataataaactcgtggctcataattatcatgatacaagtcgtccacataaaactccaccaaatatcaaagcgccaaaccacttattggacacaaatctgcagagtaccaacagagctaagtgagttaataatctcatagatatacaaaagaatgaacacatttcggttcaatgtaaaaacacatacttcctgttgcaatccaggcggtcagataaatcaacagttgaaatctgccatgctaactgcgcagatgcagcagctagaaaaggatagtaaggccatgctgtccaacatgagtaaagtttgcagtcaatatcatgtatgccaataaatatttgttaaacaaggcattatgataacattcaccaaccaaggtcagcactgtagccactgagtgctaagctgccaatgcatgcaacaccgaagccactaatccagtgttttgttaaatctccaaaccttaatgctgtggacttgacccctactttgaggtcatcttctttgtcctagcatatatttggataagaaattacgttatctactaagatgttatcactaaggtaaaacatcaaaaaaaaaaaccattagtacctgatgtgcatatatggtatcatatacgagtgtccagcatataccagcggtatacaatgggaggatgatggcaggatctaagctttctttaatggcagcccatcctaacaaagctccccaattaaaggtcaagccaagatacgcctgaggctgtaacaaatgcattaaaatgaacacaattgatcaccgttggtgaaataagttcacattattatgacttccatgtgctcagtgcatacccaaaatgtgaatctcttcatcaagggataagagaagaccaaaaaaagtgaagatgccccaagaatacggctgcacgaaaaatataacgcagtgatggaggtgaatattaatgtgctgacataagcaaaaaaagaaattgcagaaatataaaatgcaagcagcttgtattttgttaagtggataagaaactagacttaaaacatattcagtttttgcattccaaacttagaagataaactcgagtgttgcaccaaatatctccgtgctattttctgcacaaaaccttgaaaaacacctattgttatttagtcaaacaaggccaatgtacctatagttatttagttggagaagaatgcccaatcccagtaaaagctgcaatccaaggaagcccactccttgtgtaggggttagaatgcctgatgcaaaaggcctgcttttggtgcgctcaacctacaagaaaacaaatacttttctgtcaaagatcaagatgctgaaatcccatcagagagtaaactgctttatgttcctggttgaccattccactgaattgttcttggagcaactggtgatatggtgatgacatttaatatggttattggttttttaacttgaaaactgcaacagtctgaaaggcatttctcttaacaggagaaagtacaacgaaacggaaacgattaacacaaatcaccttgttatcaatgtctcgatcaagaagatcattgaccgtgcatccagcgcctctgaggaggacggctccacatccgaagagtgccagcattctcatgtcaggcagctcccccggcatcgccgccattgagattgacctacgaagaaagaaacaaacggttccagcctcatgtaggttgctgtggtggtggtgtactagtagcagcagtggtagattatagacagtatagtaccagaagcagggccacgcgaggagccaggtgccgatgggcttgtcgaggcgggcaagcatggcgtaggggcgcgccgcctgtgggagccacctgtcaacccacgaggacggaggcgccgccgcgggagacgggtgcggcggcgaggaatcctcatccggggagccgtcgggggaggcggaggaggaggtagagaggggagagtagatcgagaaggtcgcggggagcaggatccccctgccgacgtaggaggaagacgagacgcgcggaggcggaggcggaggcggccagcttcgacggcggcggcatagcggaggcggaggcggagcgaagtatggggcgacgggactggggccgtcggggcaggattccggggtggtcggtggaggcggcgagagagcggagagtaagagtgggagcggggcgcggcggtggcggcggaggaggtcggcggcggcggctgctcggagtagagccatgggcttgtttggaaaaggaaaaaaaaaaactagggaaaattttcggatctacaagggtttccccacttgccaagtgacaggagacagagagagagaaaagaactgaagaagaacaacaagctcaccagggagatctcaccggagtgggagatgaactagagtctagaggcggttgcggcatcgatggtgggcggctctgtggttgaggttttgatgggagatggccgtgccgtcgagggttggccaacgccgtcgcggcaccggcggagacagaggccaacgccggagacggaggcagtcgcagctataccgggccaaacgggcggcccggctcagcccggcccgttaggcacggcttctgtagcgggccggcacggacccatcaatggcccatggacctagtcagcccgttggcacggtcggcccgaagtgaggctgggctgctggggagcgcggcacaggcggaaaatggaggcgggagtggctcagcgcctcagcgggcgggcgcgcgggggaccgcgagacgcacggtctcatggaggacagcgattgcacaggatactacccccaccagggagtgtattgggcatgttcctagctcccaatatttaattttagtagcatttctatatgatcgctgctcgataattctttcgcatagactgaaggttgattcggaggataccgaagatacgggcaccgtcaacacatcccgtgctagttttgaaagcacaggatatgacatcttgtgatcgttccaccatcgagtagatgattcatggttgatagcgtcgctatccaaatagttggacaactcttcaacgggaccatgcgatctagcgtcaccacttgctgctgacgaactactacaccaccatggctagaagatgagccaccccaaattctgctccactgtaactttttcttacctgctgcaggggctggtgggggtctttgcaaatgaactccttgaaactttaattcatacttcccaaatacctcataaaattagttttaacatcagaataataggaataatcaatattaattatctccaataattgatagaatattgaggaatccccgtaattttcccctagaatcaagaataaatgcaaaagcgtaaaacatggggggatgtttttccaatatttaagatatttttgtttcatactagagactgcggacattaaaagttcaccattttcatactctttcaacagagtggcaatttcaagaatattatgcaaaattaaattagttgctggatgatatacttgagataaaagaagagtacagttatgaaatgtttcaagaaattgattgaacctttcaattcgacaatatgccaagtacggtcaattggtattgcctggctgtccctgtttgttggtctattacatgttgaagaaaaacagtaagtaattatcctttaacatataataagtggcattccgtcgatgttccgcatcggttataaacttacgtcggggcttattcgatgcacgacaatacctttttcgttgtgcaatccgtgggtttgaagcagttaaccacgtgattgcttgacgaacggtgtcgatgggtacattcactctcttaaaaccacatttaacaattagattaataatatggcatgcacaacgatgatgcagaagaaatgatttagcataaacacaaaataagggttgcagaatttgcatggccctagaagagatgcactattagttgttacagcaaagatgttatctacaaggctatactcattaataacctctcgaattctctctactatattttcatcagtatgtgcaacatcaattgaccttagcccaagaactattttttgcatttgtcagtcatcataaatgaaatgtacaactacactaaggtaatcctctttacccctactactccatatgtttgtggtgacattaacagaaaagttgcatgtactaaataattccttcagtgattcacaacctttgtcatagacattttttaaatcacgggttgtggtttgtctactaacagcttaaaacctaggattatgagaagttttgatgtaattttcaaatgcagcactctcaccaaagttcaaggataaatcgtgtctagcaattaaacggacaagagattctcgagctactataggatcgttctcccatgtacgtaaccgtaccatcaggatttagtagcagttgctgctgtcatagttggattcattgcttctttacacaagcctaagcatgttgcttcaagtgtattgttccaccaattgattttgcagatattttttgcatattctacatttcgcgaatgttacctgccttccaaacgccggaagttcttgatctctttgagctggtgttcgtcgatgcactcccgcgcatagtaccaaatccttctaaacccgccggtacctcctcggctcctccacagctggtggtgttggagccaacctggtcgcatcatactcaccaggtgggaatgatcccgacaagtaattagggtcgaaaaatcaccaaacgtgaacgacggaaggttcggatcgtccattctgaaatgttaaaacaacgtgaacaaattttcagaatatttattcacataaaataaataaagggttaattagatctataccactgtaactttgacgattttgaaatatgccattactattcatctatttgaaggcatgccattataattctatagttatttgaaatatgccactacttaccctttcaatgtattttcttaaacttttagactaaattacccttgtcttcttcctccatctcttcttctccaacatatgcatcccctttcttcacccagtgataccgacctgccggtgcactgatgcatgctctctgcgcgagccccttcctgcggggcgttttcacacgttgggccgttggcgtgtagggtgacagactagagctgaaaatggtaaaagttgcaatggcatggatctaattaaccctaaaataaaatacaaacaatacagaagtatgaatattatggtgtacttctttattaccagttaccaccttggctttacagctctggtgtgcactattttttatttctgacaaaaattttgactaaacaaaaagacgaactagcacacaaaagagcacaagaaagcataaattgagaggtttggatgatctagaatgctaaaaagaaatttcatatttttatttttttttcatgctgcaacggctactcctcaaatatagccgttggctagttggcctagccgttgcaaacactggacaggacacgtggcgccatagtattggctggcgagtggcgacgcactgagctgtacgcgcgggcgcggcgctgtacggcactcctcgcctccctgcccggccctgccctccaccgcttgacgatgccatgcggcacacgctctcgctcccgccgtcccgctcccacgtggccacgtcctgctcccgtgtggccacgttgcgcgtgctcgcgtcctcctgccccaccgctgactggctggctgaccgtgccgcccgtgtccatgggtggtgccgtgttggcccatgggctgaggcgctggcccagacacgggatgggagaatgggccgtgccggcatggcccacatgctacatgtattgctaggacggggcctacaatagtaatgtcgtgattgggtcagcccggcttggcacgacccatttggcaagttatagtcgtagcgaagagtgccatatgagccggctgacggcgcttcgtgctactgtctactcctcgagagaataaagtttgaaagagtaaatttcgtaaaaccatacatacttatgaggacatagctataggttttttaatctaaaagttacataaaatttcacatttattaaaatattgattaatttcagtatatgtagaacattttttttacaaaaatagtgaagagttaaactaaaaacttaataattgaaattttttatacactgtagattgaattttaagtaaatttcatgctcaaactcataagggtgggggtggggattttaacaactttacaatcatatacctaagcgtaatgcctcataagttatatctagaacattttttacaaaaatagtgaagagttaaactaaaaacttaataattgaaattttatatacactgtagattgaattttaggtaaatttcatgctcaaactcataagggtgggggtggggtttttaacaactttagaatcatatacctaagcgtaatgcgtcataagttatacactactacaaaaatcgtttttctgtacgaggggatcggtaggttccatgcgggccgcttgtggcggcgcctgcaaaaaccgcccccccggggcgggttgattagccgcatgcgaagatccattatcgcatgcggctggttaagacagccgcatgcgatgatcggccatatatgctcctccaggcccgagcttgaccatttgaaaacgaagctttctctctcctaaagcaagcaccaattagggggggaggttttcaactcgaaatttttacttgaactctatacgaaaggtgaagaactctctatcttgcttcatttggctccatttttg

SEQ ID NO: 6543 - DNA, 51234 bp, Oryza sativa
gccgcatgcgaaaataggcccattatcgcatgcggctgtcctaagcagccgcatgcgataatggatcttcgcatgcggctggcttaagggaccgcatgcgatgatcggccatatatgctcctccaggcccgagcttgaccatttgaaaacgaagctttctctctcctaaagcaagcaccaattagggggggaggttttcaactcgaaatttttacttgaactctatacgaaaggtgaagaactctctatcttgcttcatttggctccatttttgttatatttcgttggtggaaagtggagtttttttaatattttgacaaggtttgttccaactattttttgcaaaatctagcttcaaaatatatgttttgatgggcaaattttgcatgtaatcaattgtacatactagttacatgtattgttgtattttttttgggagacaaatgcatttaaacttttgtatgaaatacctgcggtctatttttttatctgtaacttttttgcctttatataattagatggatcggtcgtcatggatgtatgagatgcggagaacgcagccgatatttattaaggaagcatctaaatttattgatcaggctaaggagcatgctttgagggagaatatgacaaagatcttttgtccgtgccgtcattgcaagaatcagaaattgttggtagatcctggtgaaatattgggtcacataatggagtacggattcaccgccaactacaaggtttggacctatcacggggaattcgccaatccggaagatgacgatgaagagttaagtttcgagatgaatgaggcagagaattttataatcgaagacatgtcgcgtgaaagaatgattgtcgatgtttccaccgatagtgatgatttcgatggtggttttgatttagaggatatgctacgccatgttgaaccagaggtgctagcgggcaggtcacgaggattggagaattggcaagcattagagaaggcatcgaaggatcttctttacgatgaaacgaagggatgtgataaggatttcacagtcttgcgttcagtgcttgaacttctgagattgaaggctaaacatggatggtcggacacaagttttaatgatctgatgagtttgttgcgtgtgttgcttcctaagcctaactttgtaccatcgaacacgtatcaagcgaagaaactcatatgtcctttatctcttggtgtagaaaagattcatgcttgtaagaatcactgcatattataccgtaaagaatatgcggaattggaatgttgcccaatgtgtggcacaagtcggtataaaacggggaatgggcccgtagattcagagtgtaccgatccagattctgataagggtaagcgcgggaagattccttcaatggtgatgtggtacctaccaattaaggaccgcctgaagcgtctgtactcaaacccgactgatgctgagttgatgagatggcatcaagagagccggaaaatagatggtatgattcgacatcccgccgacgctcgccagtggaagacatttgatgcaaaacacccagaatttgctaaggatcctaggaatgtaaggtttgcgttgagcactgatggaatgaacccgtttggtgacttaagcagctcgcacagcacatggccagtccttctcacaatgtataatcttccaacatggatatgtcagaaacgaaagtacattctactcactatcctcatacaaggtccaaaccaacctggaatcgacatagatgttttccttgagcctttgatggaggacatggaggagctttggaaagaggggttacgactatgggatgagtttaagcgggagcacttcaatctacgtgcaatcatattcgttaccatcaatgacctacctgcaaacttttcattatctgggcagattaaagggaagactggatgtctgatatgtctggagaaaacttcatacaaatacctgacgtcgtctttgaagacagtgtacatgcgacatcgacggttcctaccacaaagacataggtaccgtaagatggctagattgttcgataatacagtggagaatgacactgccccagtagcaagaggtggtacatacgtgtatgagataacaaagaagattaaggttgtatatggaaagggaaagaagaagacagtaaagaggaagaaagctgatggtgacaacggtactgcgtcgcctttcaagaagcactcaattttctttaaatacttagattactggaaggacctagagattcgacatgcaattgatgttatgcacctcgagaagaacgtgtttgatagcaccgttggcacattgctggacatcccgagtaaaacgaaggatggattgaagtcacgtaacgaccttgtagatttgtccatacggcatgaccttcacccagtactgctgccaaataggaagaccgagattcctcctgcttgttactcgttgacacttgatgagaaaaaagccttctgtaaatgtttacaaggggttagagtgcctactggtttcgcatcgaacatcaggaagctagtatcaataaaggatttgtccatttcgggatacaatgcgcatgactgtcataggttgctaacagtgttcctaccaattgctataagggcagtcaaaccagtccatacaaaggtggttataacaaagttgtgctactttttcaatcgaatttcgcaaaaagtatttgatcctttggaattaggtccgcttcagacatttgccgtcgagactgtatgccagcttgagatgtatttcccaccatcatttttagatatgatggagcatttgatcgttcacatcgtccctcagattattgaacttggtccattatacttacatcagatgtgggcctatgagcgttacatgtcgatcctcaaaggctatgtacgcaatcgcgctcacccggaaggatcaatgatagagggatacacaactgaagaggcagtcgagtgttgtatggactacataaaggatgctaatgctattggcattcctgttcatcgacatgaaggtagattgtctggaaggggtactgttggtaggaagcagttcttcgataatgattacaaaaaggtgtccgcggcacacaacagcgttcttcaacagctcgctatcgttgagccattcattgagcgacacctagaagaaatcaaagcctgcttcccagggcggtccaatgattggatatcaagagagcacaagcgtcgctttcctctgtggttgaaagatctaaacctgccagttggtgattctgtggaggaacttactttacaaagattggcatgtgggccttcaagtattgtcaattcatggcaaggttacgacatcaatggatttaccttgagtacgactacgaaggacatgaaaagcacctcacaaaacagtgggatccgtgtcgaagcgattgacacgagtggagaaaagaggtcgtattatgggaccattcaagaaatatgggaactggactatggcctaaacatccagatccctgtgctccgttgtgaatgggttaaagacacaataggggtttccgttgatgactacgggctaacgatagtcgatcacagtaaaacaggccacaaggatgatccatgggttttagcagagcgtgtggctcaggtgttttatgtgaaggacccttcagatgaaagaaaatctattgtcatatccggaaagcaacagatcgtcggcatcgacaacatcgaagaccccaatgattacaaccagttcgacgatgtaccattgtttactgatcttcctatgcgaattaagaaggttgagagaacaatcgatgaagcaaatatgtcgtacgttcgagcagatggtgttgccaaggttattaagtcatagttatttcgtaacctttagttctcattgtattccaaatgtacgtgcatgaatttaggtcccccttatgttgtaatcattagcaaatgtacgtgcatgaatttaggtcccccttatgttgtaatcattagcatgtaacatttgattacgagttttgagcaattttcatgagttttcttagtgccaaaaacatttggaatgtataattgtggcgaaatattgggaaaaaaatatatatggacagtttacttatagagaaaaaaaaatatgagtttttttggtaaaaagatctttctatgcggctggcttaacagcccgcatggaaagatctttttcgcatgcggccggcttaacagcccgcatggaaagatctttttcgcatgcggccggcgtaacagcccgcatggaaagatctttttcgcatgcggccggcttatgtcgaccgcatggaaagatatttttccatgcggtcccttaagccgcccgcatgcgatgatctgcgcctatatatagggagcgcggggagccaaaattttctaagtcccggctcccgcgaaaccctagccgccaggctgccaaaatttcccaagtcgccatcgccgtcgtccccgccaccgccggctcctccccaaagtcgccccgccccacgccgccgccgccgccgccgccaggacctctcccccctcgccgttgccgtcgctgccgccaggacctctcccccctcgccgtcgccgtcgccgccggcaggtcgccgtcgccaccgcacggaactctcccccctcgccgttgccatcgccgccgccaggtcgtccccgccgccaagtcgtccccgctaccgccggctcctccccgaagtcgccccgcccctcgccgtcgccgacgccactgccaggacctctcccccctcgccgtcgccgtcgccgccgccaggtcgccgtcgccgccgcacggacctctcccccctcgccgttgccatcgccgccgccaggtcgtcgccgccgccaggtcgtctccgccgtcgctcggtaacatttacttttaaaaaaagaaatgtgaaatgtgcaattgtggattgtggattgtttaattgtgcatcgtggattgtgatatgtgcaattgtggattgtttaattttgagaatgtttaattgtggattgttaaatggagatttatgtttaaattgggacttatgtttaaattgggacttatgttaaattgggatttatgtataattgggactttgttaaattgagatttatgtataattgggacttttgttaaattggcagctatgttaaaatgtgacttatgtttaagttgagacttatgttatattgggatttatgtataattgtgatttttgttaaactgagatttatgtataattgtgacttatgttaaattggcacctatgtcaaatggagatttctgtttaattgtgacttatgctaaattgggacctatgttaatttgagatttatgtataattgggacttatgttaaattgagatttatgtataattcggacttatgttaaattgggacttatgtcaaattgagacttatgtgaaattgcgttaaattgggacttacgtaaaattgggacttatgtcaaatttttttacgtcaagttggaagatgtcgaacgaaaaggttccatcgaacgcaccaatagcgcctcaagaaggtaacgctcctcaaaattccggtagcaataagcatccaggcgcttctagtgaagaaacgtggcgcacaccaagtgacccgtttccaatggaaataacacaagtcgccccccgcgatgatgatccggactacatacctatcgaacaggccgtaagtgatgaaaatcgttagccatgtattattccctaactatgatgtgacatgaacttaatggtgtatagagttacctattctgtgcagatggtagtccgacgccgctcgaaacgtaaagccgggaggaacaggacagagcaagaagttgagatggacaccgctacgtctgcacctgaacgtacggagacatctacaagtgcaggcgggagtgggaaaaaaagacgtggtgagagaagcaagaataaattacccaaggaaacttacaacgtgattgctctcgatcaggatgggaagcccatcgagccaccgatagtgcggtccaagttcatcaacgcctgtggcactctagtcaggacgcgttgtcccattaatgtcaagttgtgggaaacagtggacgacaacatcaagacacttctctggaatgagttgcagaagtattttgtgttccctcctggatcagaggtcagggggagagattacgcacttaaaaagatgggagatcgatggcgacagtggaagtccgatctaaatcgggattatgttcagaagaatctcccaccgtttacggattatggacatatatcgcaggctgactgggacacgtttgttgcggatcgtacaacagctgaagcattggctttgaggaaaaaaatgtccgagctcgcgaagaagaacaaatatccccatagattggggtcgagcggatacgctggtcacgtcgatcaatggcgggagatcgagcaaagatttgccgcggccggtaagcccctgctggtagaccccatggttgaacgtagcaagaactaggtttgggcgcgcagcacaggtcaagtctcggatgagggagacatactattcgagactccagacatagaagaagtgactactaatttgcagcagatagtcgagaaagaaagatcaggacagttcgttccacggagggagagagatcagcttactgcggcgttggggacggctgaacactctggacgtgtaaggggtttgtcctcaaagacaagttggaaggtcgggtttccacaagacgcaccaagttataagaagagagacaaatacaaagaacaactatcggacaagatctatgcgcaagtgaaggaacacttctactcgttggcagctgaaaacccgacagcatttccaaggttattccctaatagccagcaacccacacaatccgcacagcaaacaactaatgtacctagcagtgtaggctcagtgcagacaagtaccttccctgtggatagtataactggaccaactccgtgcagtctcgtcgtaccaatcggccgcgctggaaagactaaggaggttgcaacgggtttagcgatacccggacgtcaattccacaacacggcaatccctgaggattacgcaagggtacaggtcgccaaggtccatagcgaccacgtttccttggaactagacatacctgcacctgaggggattgaacttctcggtgatgcagtgaatcagtttatcttgtggcaccgcagagacataatcctgagcgcggccgttcttgcagcaggatcttcaaccccatcctcatcgcaggcaatgactgctgccgctcctgcaccaccgtcgcctcctgaaccaccgtcacctcgacatccgccgtcaccaccaccgcttaggtcaccgcctcgccaacctacaccaccaccctccccttctcaacaaccgcctctcccgaccccgcaaccagttcaagcctctcccacctccccaactaaacagcatgctcccccggctccgccctcagttcaaacctctccacctacaccccaatctgctctggtagaagaagtgcacataccagatggtactacatccgaaccaaagtctaatactttggaacctcgtcgtataattccaaagttgctatcgacatacgacccaaaggagattgacaaggataaggagaagttcatgttttcagctttcaggaattctgagaagagaaaagaacttgctcacgtcttgtcagactcccagaagtcagtactagcggcccaagatgaagtgcaatcctggttatctgccgatgtgcctgaaacttatgagtatggcaagccattctagccaacttatcttatgaacaagctaccatgggaaatgagggtaatgcacgaatggtatatgaaggcatctaggaaaggtctcggtttcataagcgtcgccgtcccggaaggcgctttcatgagtggtcctaatgggatattttttatctctttccaagacctttacgccctctacaagctagataaaatggacgttaatctcgttgcggctttctgtctgtaagtctaaactctttattacatgttgcacgtttcattcgaaacaaataaaccaaatctcatttcttctttattcattgtacagtatgcaattccacgaagctgatagaactggagcaaaggttggatacgtcgatccaacaagaatatgcaaaacacaacacaccgtagagctgagacaggactgcgagcaattggttggcaagaccccggaagaaaaggaagaatatgtgaagacattgcacaagaggaagaagctagaagtagcaacatacttggcaatagcaatgttggcgcacgccgacaaagatgtcttaatggtcccctaccagttcacgtaagctctctcttctttttgtttaattaatttatcttcttcggaattttctgtctccaataagcctatcttatatgtagagaccactacatattattccttgtatatccgaaagaccaattgatcatatcattggaccccgcacactatgacaaggagacatttatggaattcctcactattttgaatttgtaagtgataaacatttcattactataaattgtttaggtcgatcaccagtcttctaactactaataaaacaattgtttccttcaaacagagcacacaagtactaccgcaaaagaggtggaccagtacatattccatcccagaagaagttatccgtcaggactggctggccggtactatcaaatttataccaatacaactaattatcgaatagtacatatatactaaatatatctactgagatcggtccccataattatatcgcagtgctacaaacaaccaccaggaaccaacttgtgtggttattacgtgtgcgagatgctcagagtaaatgggaggtacaaaacaaccagtaaccgagtaggtcatcgaactcttctctacaaagaaacccatctcgcacacacttctcactgagtaccgttttattttcctttctgtgtgcagatccccgaaatcccatatattgcacaacgattcaaccacactactatcttgaacgtggccgctgacctctgccgattcatccgtcgcgatgtctgcaacgcaagaggtctcttctacgacaaccagagtgaactcgcaatggacgacaaatttaaacctctcagagagtgggagaaagaacatatgcaataacatgtacactacttatacatatgatgaaaaaactgtgccacttgtattatatatttgtatgtaaattacgattgaattaatggttatgtattacatgtttgttactgcggcacttgtcttatcttatatgcttactactccgaaatacgataataaatccctcaataatttaatattaattacgaatcaccaaaatgctagaataaatattattttagctattcggaaattgaatttcgcatgcggtctacttaagacgcccgcatgcgaaaatagatcttcgcatgcggtcttcttaggtcaaccgcatgggaaaatatatcttcgcatgcggcttcttatatggaccgcatgcgaagatctattttcgcatgcggccgtcttaagtgaccgcatgcgaagatcaatcttcgcatgcggctgcgacggccgcatgcgcaaatggtgatctttgcagaccatttcgcgcatgcgggccggccaaccgcatgtgaagatcgattccgcccgtatgcaaaaacgctttctgtagtagtgataatacgtgtggttttctaaagagcaaattccataaaatccagaattttaggcatctataactcaaaacctcagtgttttcaatttgtttcatgaaactcaagttttggggcaaagtgttttataaagccccacctacaagcttatatcatccatccatctgagactaagatgtttatctataataattgtaaaagaatgaatgagatatttttttaagtacatattcacgttagcgggtttcaacaaccgttgatcatcgtggtgctatcatttatgtgtatatttaacaaattattatgtcattatcagttaggattatgttgagttttttcattgaaaaactgagaaaaaaaactagataagatgaatatgtactttgagtcaacgaatgtgaatttatgaaaaaaataatcatatataataatgaaatatgagtattttaaataaatatatgttttttaaacattttgcctcgaaatatgggttccttgaaacatatcacaataactagggtttaatgttatggatggcccaataccttggattttgtgaaatttattcttttttaaaattactcaatttaaagtgcattgttcagtggtttttattttgggaatatacgtgctgcaaaaatatttgcaactccatacgagtcgtccatgccgacacgtggggatgacgcggtgagagtgagaccttgcgaaccgggacgttgtgttgagccgttgagaccttgcaaaaatggacgagttcacatgccactcgcgcgaactcaccattggtggtaggacagagctgcaaccctggcgagttcgcgtctagggtcagcgaagtcgcatgcctagcgaattcatttccaagggacacgaaagtcgccagcatgcaaagacgagattgcttgcatgggcaacgaagtggccagcttgcttcgcatgcatgcatgagttaggctgtgatcggaactagaagaacttctagttcccaaccctccctctcgttttccgtacgcatacttttcaaactgctaaacggtacaaaagttgcttaaaaatcaaattaatctattttttaaaaaaattactaatacttaattaatcatgtgctaatggaccgctctgttttccgtgttgaggagatggatttccaaccgtgatgagcgaacacagcataaggctttagcttagctttagcttcctttgtttgtgagatactggagcagtggagatcaatggctgtgtttagttaccttcaaacttccgaaaatcccatcacatcaaatgtttggacatatacaaggagccttaaatgtggaaaaaaaaaccaattgcacagtttgcatgtaaattacgagacgaatcttttgagcctaattacgccatgatttgacaatgtggtgctacagtaaacattttctaatgacggattaatttggcttaataaattcatctcgcaatttataggcggaatctgtaatttattttgttactagtatacgtttaatatttcaaatgtgtgtctgtatagttcaaagaaattttgaaaaggaactaaacacggccaatgtaggtttttgtttgttcgtgatacattcatgcatacaaaactctcttcgcgctagggtcgtgaacttgtaattgccgccgcgcgccgctgccgatatagctgttcgaccaatgtcttcgtgtcactaaccacgattgtggctcactgccgcgttccctcgatgcgagaacgtgcatcatcattccatcacattcttatgccacgatgatagtatatctctgccaattcttttgaagtatgaatattcctgtgaaacccataaaaaaatataggagaccgctatataccatgggatcctgtctagacgggatgacatctacgatgtatcaagttctgatactggcatacttccggtatcatcagtaggaaagaaagccatagagatatgtgtgttgttgctcaagaggaggaagaaaaccaaagcttatatgcaccttgtcgctggcggcaaggacgaagagagagaaggggagagcaaaatatgtatctccgcccaagaggatgaccatcatatattggccatcttgaagaagcaatgtcaccaagcccagtggccttcgccttcttttcgttgtcatagtcgatgtgccaagtacatcgaccttcactatttgctcttgtcaccgtcggtggagcaccaagcccgttagcctccgccgcctccgccctcttgtcttctcatcggaatagaaggaagagaggagagagaatcccttctctgtgcataggagcctactgatgacgtctcctgaggaacctcagcagtgggggcaaagactcctctagactggccaagcggcggtagcacacacgcccccatccgtgcctctcttgtggatatgtgtgtgtgagagagagagagaggcgaatatataacgatcggtgatttggtattaccatggggcctgtaccctctatcacgcgtggaatgggatctcgtggcatcacttgatgctcatagatatcgagtttaatactacctagtagcacctcatactaataggtattaggtctggtactgtgcatgtatcatgtccaatgttctaaatctctggctatggctatagccggagtagccggagatagcggattgggaaggaaatagctaggataaaccaatttcgacgctatgatttatcggctgctaatagccggagatagccactaaaatagccaaatatagctgcacttagcgctggctaaacataagcaaaactgaaaatgggcttttatgtgcatggtccacaaaactcagcccaaaactaaccctaaatcccccactcgtgctctccacctctcccctccccaaattggcagcacaccgtgaccgggagcgatggggcgcttgtgaccggtgttgatattttgtatggtcacagataaaatccgtaagcgcatggaaataccgctgtaccactttacccaggagtattccaaggtatcgattttccattaggaacgtgtgtgttcaacttcttcaagttcatctaagggtgtaacgcgccgcttttcgtgagtcgttaaaaactaattcggcaaaatcctaattgcgaaaatttccgttctttgtgtgcgagtctaagttgttcccgtggatctcaattcaatcccgttgttccctctcatcgaaatcaaaatcctccacctcgaaaattcttcttccgattcaagtctccgaaatccaattccgtccttgaatcccttgccaatattcctctcggtttcgagaataccaaatccccattttgaatcccttcgtcgactcctccctctcatccgaagtccaagtcaaattccaaattcaaattccctccaattcaacttctctgtcaaagtccgttttgcctccctctatttttgtgggccgaattcctctccctcggcccaaccctcctctcagccgtgtccccctcctcttcgcacgtgcgttgcacgcgccccagccgagcagagagagagcggctctctctctctctctctcgctcgctcgctctctcctcttgctcgccctctctctctccgtttctctcccccgtcgaagctcccccaccggcgcagattctcgccgccgccttttcaaatttcgccgcgccctcgcgtcgcgcgcgcgctcgcccgcgcgtggctgaccgcctggtcgccgccgcatcagccctggccgcctgcaccgcgcagccgcccatgccgccctgccctgccactcgctccacctgtgcgcgcgtgcatccaagacgtggaggcagagcctcggctcccctctctcacgcgctctccctcctccctctgctcgtccaaatcggcaaggagctgagctcctttcccctcccctttttgctttttccctcttagcccggccgcccgtgaccacctcctaccgctccttgaccgcaagcgtcgcgccagccgagctcccttgaccacctaagtcggtttcctccccgaaaccgacttcccgtgcctataaaaccacagccgagcccctcctctcaacccctcccgctttactctccacgctgccgcgccattgtcgcccctgccctgcagtcgccctcgtcgtccatcgccaaagcaccagggagaccggtgcgtgcgaaggacgcgagaagaggactccgggcgccgtcatcttccccttccccggcccgaggccggagagctcgctcctgcgccgtcggccgctcgtcacagcgctcgtctcggctcggtagtgcctccctccgttctcccttcgcgcttgccctttccctcctttagctcgctcggtagctcggtagccgtcccgaacgcgcgtagacgaagccccaagccccgccgccgcccggcatggcctcgctgccattgccgcccattccagggagccgccgctcgtcgccggcctccctcggggcccctccgtcccatccaaccctgggaacgagttccccgagtcctagagatgctctagctccgacgaatcgaaccctcgtcgtctcatcgtcgtttccccctttgctcgccgccggttgccgccgccgcgattcgccgtcgccggccaccctccggcgaatccgagccgttggctcactctctcttgtcttcctcgtcgttccggtgtgctccccgtcgcctctcgccgtcgcatggtgtcccggtgaaactgccgccgtccgccgtctattctcggccggcctcctccttcctcccgccggcccgcatggcagccatgaaggcgccacgtcggcgccagctcggctgcgaccgggtcaaaagactggtcggccgcctccctccgtcacatctttcatgcgcctggtccacggagagccctagcggctgcacgtgggcccgctgtctcttggtccacccagtgctcaagccgtgagccgcatccacctccctctcccccgcgccccccctcagttgggccgcctccccgtggccgcgccggcccaatggctcggccgagccgctaaaatcctttgggccgcgcccaagcgcctgagaaagtctgaaattcgcccctccttctttctttttcaaaaagggtttaattaaatccttttcctttgattagaaaatcctttcaaccttagaaaatccatatctcccgatccgtaattccgattgaccccattccacttccaataattctgtaaaattgagatctatctaatggcactattaatttgtctaaatagggtctttcttttggtccttgtttaggttttgattgtttgcgtatagttgcggttaccggattttcttcaatcgtggatttctcgaagattcgtgaagctccgtgaaaaccttgagcaaggcaagtcaccctttgaccaattgctcctataattggaaaatcattattattttgtttgcaacttgcattattagaaccactcacgtttaacttgcttggcctcggtttgcatgccaaaccgatggacctacctagtagtcgcactaattcctgtaggctgtactaccttgactccttgtcgctccacccttgtggtacttcggtatccgtgctctctgagcgcgtataccaaatatcccatatacaccgttgattgtcgaaaacttgggaaatgggtttgagaagccttgaaaacccgacacgtggtgtcggcgtgtttgaaaataaaatagtttgtgaaaactcgcgatgcgggtgccgtgcctacgtggcgttgtcccgtattcacatataaggaccgattcctgtgggaaactcatcgagcataatcaaagtgcaaccacaaggtggaatgggacaccctggctaagtaactagtcggttcagggaaacctcgcatgccaatagttgggaacgccggggcggggtcggttggagccaaaccggcttcctggtaagcaaggaagagaagcttgcagaattaccgatcgaggtggttggagtttgatttgtgaaaactaaaatggcctatatttatgtgaggatttgatccttctatgtggcatgaggtaaccctgggttggctaggaaaaggtcttgtcgcgaatctccctttttccgccgtgcgtcatgaacacgggttcggcaatgggagcaagttcgtgtcttgtgggtaaagtgtacccctctgcagaggttaactaactgttcgaacagccgtgcccacggtcatgggcggatgtgaggtggttcccgttgcgtagatttgattgcttgtgctttgtgaaaagttgttgtggtgtgggaatcgttaccagaatcagcctatgtggcagatagatgacctgagtggtcagaagcgaatctgtgtgattcgggatgtctacgggcatcatagactaggcttcccgagtggaagcagattgttgtgctgctgggcagcaggactctgggagtccgagaaaatgaaaaaagctctgggagccgattaatcaagtgaaatggctccgggagccgagaagtaatgatctgacccgggaggtcggtacattaccatttgagttgttgaaaagcatctcttaagtcggatcgagacgcaagtctccttttcgacccaaacttaaaaaagaaataaatcacttagtgatttcaaaatgatttcaaataaaggatttgcaaaacaaccttgcctctcttccaagcttgcattaaacacctaaattcccgtgacttgcggagtacgaaagtacttatccttgatctatataaatatatatagttcctccgccctgaagttgaagatgaagtaaagtgaagattagggtttcgtcctagttcccagccgtcgcctgtggtgttgggtgttagttcgttggttccgctgctgctgctgctggtgtttccttgtccgtgtcgtctgttgcatttttgggctcttctgagctgcaacctaagttaaggtaaataagtcctctatttattttaaggattgcaatgattcatatttgtcaccgtgggtaccagcactatgtcctgggactggtactgagatcgcggtttcgtaggaagcggttcatgccgtttctcctacgacacgctctagtcaggtgccgttgtacgacggtgccggattggggtgtgacagagggcacagcaaaaatgggcaaaggatagagaggatttcctagtgaaaaacagtgtctacagaaagcttatttaatcctatcgcaatacttcaggcactggctaacccactgcttctagatatcgctctactccgtacccagacagggaggacttcagtgcttctgagggctgtcaccacctctacacccacctcaaatctactgtgggatacgcagcaaataatggtactcaataatatagacaccaaatctacagtatttaatactactctaatgccgatcaaacatcaaagtaaacactatatctaatacacaatattctagtaagcttaatagaaactaactaagagataatcctcacaaagtaaatcttaattactcgataaagatattatcaatttaagcagagtaattgacaaggtacaaaagtaagagaagaattaccgacaacttcaaaattcctctgattcttctaccttaatttctccctattctaatgtccgtaaagaatacaatagagcctcttgtaattcagctcatgcttggtgtgtgttggaatgaagggaaatgagagggtatttataggtggaggtgccttgggagtgtggagatcttccatagcatccaaagagcatcttccttctcccttttgccatgtgaaccttctgatgacggttgagcgccgaaaacagtcacaaccatcattgaggttggtatctaccgaactcaacttgggcctgtgctagcggcctctgttagggttcggccgaactcagggttcgaccaaaccttggccggctccgttggccccgtttttctcctgtacaccgatattggggccctcattctattggtatggtggattgacccatttggaggtgtttaattagttttttggatccaaaactctataagtttggatatgagtttgattctcctcattcttcatgtatattttttctcaacttagatagtttgtcatctgcgtacaaatatacaccaacacttgtggacatttttacaagtataccctactgctatgttagatgttttatactttcagttttatgcaggtattaacggcataaatttgatacttaacagtcgtcatcaaccggaagcggcggcagctcctgccccctagcagcggcggtggctcctccccaagcagcgccagcgacggctcctccttccaagcagcggcggctgctccttagtgctttttccggcagtggatattgcttctctcggcacctggtggcggttgctgcttcttcccagcgacgaatggccactattcaaaaaatgcatgccaagtcaaaaaaatcgggactaaagatacatacctagttacggttgtgcaaccagggcgcacaatccgggactaaagatgcatacaagtaaaaaaaaaaagtgattgaaatcccggttgaaacaaccgggactaaaaatgcatacctagtcaaaaacaaatgtgtgggatatggattcgaaatcaagatctcccacctcagccatcacgcacgttaccatcccacctactacatacatctaacttggatagagatacttcctttttaaactaaccctagaggcatctttagtccgagttagtatcaccaaccggaactaaagatcaatttttagtccaggttggtgttaccaaccgaaactagagatcctccatctttagtcccgattggtatcatcaatcaggactaaaaaataatctttagtcccagttagtaagacaaacccggactaaaaatgcttccagggttcgaggccaacccctgtgaataaatttcaccgtgttaattcaccaatggtatatgtgatcaatttatttcctcatcaggttcaggcccagccaatggtatttgtgattagcttggttccccgtcaggttcagagtaaatttcatcattaattcaccgatggtacatgtgatatctgtgatcagcatagttccccatcacacgaccaaatcttgcgctaaaagtttattactcctatttatcaatcccctatcacacagtataagacatgacctaacttggcacgatattcaaaactaatatttaaattataatttcttatatacatataaggtttatagcaacaaaattataaacatatcaaagtaaattcaaatgtcaatccaataatattattttcagcaaataaaattcaatccatattatactggtcaaaatatactagaagttgaattttaaaaaacttgagctatgggatggatggagtactatatagagattgggcatttactggcttcctggcaactcggtcttgttgccgtcaaatctttttcaaggagaaatctatcatcccattaatctcgaccgggtcaaaaaaaatgcagcaaatgcaactatgcaaccgaagcacgttataggcttgacaatttaaatactgaactgcgatctaatcatctcttcatacagtatgtaaccgagttagtgtgacattcaaaactgatgtactttgaaaacgcaaatttttttgcctaacaaaaaaaaagtatgacattcttaaggggaaagggatgcccaacaaaaccattccaccaatcgagagtgccatgttccagttcatggcaaaagaaaagaccaattcaaaccaccaaactaatgtatcaaaatccaagaggaagataatcctgtcgaactacgccctcccttcttttcagccccagaatctgctgagaagacccttcttctccttcttcattctgttctcaatgtttgggaactcgatcgcattgtaggccatatcaagaacaataggattacacggaactgattggaatggaggtgggaatcgtgcaatgcgacatggtgttttggtatttgattcaccgagtgctgattcatagctttctagcatatcaagaaggaaagcctgctgcaaaataccagtatatcatcaaaatctgtttgaagatgttctataccagaactttctttcaattgcaatgatccatggggtaataaaatacacaacataaagtgctacaaaatattaacttaacttgcaaatctagcctacttaaacttaacgaacaataacatcctaagacattcttaacccttcacatgcatgcagaagacattcttattctaataattgtacagaacagcaccaacagaagcttgtcatgtcaagcatctaattgttagtccctcaatccacagatattgcttcagaacattagaaacttgaagtataaattattaattgtttttaaatatttaaattgatgcatgaaaaatatgtgtggattcttcttgacaagtataaattattaattgttttcttgtccatcaggattatgcataaattacaatggacacactggtttatgactttatgttgcattttatggatcatgtcggtgttcaaacatgtatttgtggctttagagagtaactgtcaagtacatctcatctttgcgatctagatatctgtttaaatatttaaattgatgcatgaaaaatatgtgtggattcttcttgacaagtatttgtccatcaggattatgcataaattacaatggacacactggtttatgactttatgttgcattttatggatcatgtcggtgttcaaacatgtatttgtggctttagagagtaactgtcaagtacatctcatctatgcattggactactcattgcgatctagatatctgttgttctaagtcttcaaacaaaccagcaaatgaatgaattctaatcccctcaagttcccctcctggtggacatgctgacatatgtgatgacttaaaccagtatgtggatccacatgccagcatcattgtttgtgttctaattttacctatgctaatgttaaagtagaaaagtagctatatttagggatggagggggtactattctaaaaaatgtttgtcaaatatgccatcgtcgcactattctgctgatcttagacatcaatggtaaatgacagggcatcccacaaatgatgcaaaccttagtaaatgtccacattgagtaagtcctagaaacatacctttcgttcaccaagtgacaatgttgagacacctttcgaaagtctttcaggaacattctcttcctccataatacctgtcgcatgttctatgaagctattggatctacagctgtcagaaagagccttaagatcttggactaaggcctgtaataattagcatttgagttaagattctgtgtacattttttaacacaaaaaacatgaacgacaagcatgctgagaaaaccataagtcattactttgaaaaattcattgaacagcccaaaaattatgttgatagaataactggtcaacttaatccctccattttttaatagatgacgccgttgactttcaaacacatgtcttattcaaaaagattacgcaaatgtataagatataagtcatgcttaaagtactttgaatgataaaacaactcacaacaaaacaaattataattacgtaaattttttgaataagacgaatggtcaaatgtgacaaaaagtcaacggcgtcatctattaaaaaactaagataatagatcatttatagttatatggtgtcatgaacatgcatgggtattgaacaggccaactgtgctagctgcttcaatccctgacgcggttcacaagtaatactccctccgtcccattttaagtgcagccatgattttccgtgcccaactttgatcgtctgtgttatttgaattttttttaaaaacaataaaaacataagtcacacataaagtactattcatgttttatcatctaataacaatagaaatactaatcataaaaaaatttcaaataagacgaacgataaagttgggcacggaaactcatggctgcacttaagatgggacggagggagtataagactatcactttctagatgagcattaacagcatgtgaccaagtatttgaccaggattgaagcttcgggtgtatttggtttgctaccatgccaaaatgttggtactaccaaaacctaggcaaattttggtagtgccaaaattttggtaacttttcatgtgttattggtatattttggaagcaaaccaaacactaacaaaatactgttcaaagtgccaaacaatttggtagggcacattttggcttcgaaccaaaatggccccttcatgcttggactagatcttacaactctagtcatgaactcacaattaaacagtgctcaagatccaaagcaaaaatgctacttcatccgtcccaatatgtaacaacctagaatgggtactacgaatctggacacaggctgtgtttagttccaaaataattcttcaaacttccaacttttccatcacatcaaaactttcctacacacaaacttccaacttttccgtcacatcgttctgatttcaaccaaacctccaattttggtgtgaactaaacacagccataggaaatgtccagattcgtaatcctaggatgggtctaatcccagacccatcctaggttgctacatattgggacggagggagtagcagatagtgggttggtaccagattggctctggtgtagtggcagatagcatgagctacggacactatattctcccatgttattgtacagaaaatttttaaatttgaattatctatgagcatatatacacactttcctttgccaatctaacataaacaatatgaattcatttatgacaaactaggcatatgcatatcttaaaaaggttgcaaacttgtgtatgcaacttacaaatagtgcccgctatcatggcagctacaaatgatattgacctattgtggccgttgccaccactattacgtccactattccatacccactgttttgaaatttgaattgctacgttgttacagtaacatcgagtcaccttagagcccactaccactacagcggccacaaagtggccactatcaccactatttagtaccatgctcattactaataatacaagcccaaaatggtattgatggtgacactcaaatcaacgataaaaatattaaccataatctaggagctactgaattcttattgatcataaaaaaaattgaaactgtggctaatacattaaataacatgacatgtaatcagcaagaagaatgttgggtttagcaaaaccttgtcaggactgttagtcagctgttgcagtgcagaatcagtgattgaacgggcatgacaaaacagcgcgtaagattcagcccttttaccggctgaactgtatgactttgccaaatagaaacatctgcacagtttatcaatttaacttgagattagacatcattagacgcacatttctataactcaaatgaaattctataaacctagcaagttttaaataaaagcagtaattttaaaatgtgaccacagaaaatgccttgtagcaatgttcatttcagggagttggaaacctttccctcccacacggaaaaagaggtagttcacacgcaaaagaacttgaaaaatggattaatatgatattttacagcaacttttcaatataatttttttttcaaaaacacaccgtttagcattttgggaaacgtgcgcgcagaaatgagagtagaagttgggaaactgtacaaaagaacacagctaaatcttgataactcattattgaggacatggtttagtagataggtaattggcgtagttgaaggttcttgtagcaagcaagacatttgccaatatcatgattaattgtgaggaggtttacagccaaagcagagaatgtgcatggaaagcaaaaggaaattcaagctcgatttgtaacagacctctcagctcggaaagccaaacttttcagctcatactcctgaataaaagtgttctcttccttgtttttatcccttcctgagctaattaaatcagtcagatctgttgtattctgcaaattaaagcagcttcacatcagcaaaagaacacaattctataaatgcctgatataaaagaaaccttacttgaataagcagatcatacaaccgaacaagttcttctggttttgtgattttctcattcttctcatcccggtgcttggtaaacttgcttttagcaatactaacgagtaattggtttcgctcaatggttctgaatcccaagacagcactaacagccttgtcaagaccattcaattcatctcttatattctcagcattgccagcagaagcctgcattcagaaaagaagaatgtgaattaatattatatgatgcatagaattcttctagaatataagctgctgcgcatgcgtgtgtttcataccaagtcattgcggatgcagctccgagcgtcatggtatgcagaaaatattttgtcaaaaatgccaagttttttgtccgctggaactgattctgtgtttgcaccattcaagtctttctccagctgttgagctgatcatataactagattaaagagaattcgacaagtaaaactaagcagacgtagcaatttgtttttttatcgaatacacaggagatctgcgtatattaagaagaaagagggggtagaaccctgagtacaaaaccaaacacgcacccactgagttgtaggaaccatgcgtatcgccaacctgaccacaaacacaaagaaagatgctgcatacctttcaaaatggagacacgggtctttgcattagtaattggaaatctgcgaccaagccagctaaactcggtcatggaagctgcctgctgcgatcttgtctcagataatacagcctgaaaatttccccaacataaacatattagaagatgaaaaaaaaagtttggctgactgagaatacatgaaattatcatttccaaacagttagaaatctaagcatggaattgatagcaaaaattgtgcgcagcctaacatcagctgtcaggaagagtgagattacctagcgtggcatttatactcctctttcaaatatgcaatcccaatggccaagaatatatacccaaactaatgtagcactatccggactaggataataattcctttctgacttcgttagaaaatgaattaggctgaattagcatgtccaaatttcaaagttgtccatacaaagagagtgggggtttcaaggaactacatgatttgttctatgacatatgaataaataatccaacaaaaataatcataccaaaattgttcataccagcaaaataataataatttgatcatgaaattttcacgttgacgaaagattgtccattatcgtagtaatttaaggatgcagaattaacaagcatcgtcctaactgcatttattttactgtattcccacaagtgcaaaagaaatgactaactacgttgtgcagatactacgccccgctttgtttgggcttctagccagcttctcaaccacaaaagcagaagacaaaataaacaagctgattctaaaccatgattttggaaaagtcaggcccatcaaatactgtacctacaacccactgggggcaattaaattacccacaatgccatcagataaaaaaggcacatttctctcctgcctattaccccttcctcccaatgaccccatgggacaaactgcacccataaggctagggggcaaagaggatgaagtctaggagcacaccacctctatacaccgtctcctgctgtcccattcaattcaccaccacctcactcctaggtcaagccacctcctctgctcactccttgcaggttggctctctccatctcctaactcctatgccagcgctgccccatgcaggcctctccagtaaaactcatcatgtcgttgacttctgatccagtcatcattaattcattactaatggtcgagatgatccggctgcaatgaagatgtcaactgatcatcatatcgagcggtggccttcgtagatgtaggttttatgtttctttccccttaatttgcatgacctttgagtagtaattcaaacattgtatgtctcaagaaagaatttcattgcctttgtatatccggaaattgagatgaacagagctagttgctcatcagcatttggacgatgcaattttctggtttggaaatgttcatctctatagtcaagatgtcaatttgtgtttgtggatttggctgcatcattcactggtatgcagatcctatatgttcgttgaatttttacacttagcacttcacagaaaaactgcagtacaaaacagtttcattgctttcaaggatctcacaagctctaactgcttctcatgcataagccagaaaagcatcttctgaagaatccactgaacagaacaggtggcctaacaacaacattacttcctagcaagaactaaacaagttgcaaatatcatattttaggttgagatcatatatagttaatatgtctatgaattgcaagaccgctaaaaccacaaaagttcaaacattcacgtttcatgtcataacaaatgtgttcagtaataaggtctacatgatttaaaaccctagtgcattgcaatcaacagtgtattttcaaaaggattctgacaaataaaaaatgagggaaccagtcatacccccatctgccccctcacctacaacagaaaactagtaaaaaagtatcatgtgcatgcaccaccgctctcccaccttacacacaataccacttaaaaagaacaaaaatccaattttaaacaaattctccaaggttaaaccatgcacttatctctacaccaaacatcccatgtcctctacataattcttgaacaacatcaaacatatattataacagtagtaagaaaacaaatatatatacctcaatcttagccttgaaaagatcataagcaggcccctccttttccagatctagtagttcatgtgcttgcaaagctgatccgcctagtttgcgagagcaaaatccaatcataggttccacttcctcaatgcgctgacggcataaaagttgattttctatactcccatatttcccaagctcctcatatacagccctgtgataaaacaatacatcactcagccatcaatgatctcccaacaattataatgcaaagaagatttagcagtggcgctgattatcaaatatgtacaaacaacaaggagaacaattatggaaaaatatatgcaagaaataatggccaaacttctagaacctaacctggtgttcttgaaatttgtcattgctgcctctatgttcttctcttgctcaaacagcaaggtacctttcatgtatgaagcatatgcctgcaaaacaattttatcaaagaaattatttaatgttagtattgtaagggttattttctcatatggcaatatcaccttaaaatttcttgatttgagttttctcaaaaaaaaaaaaaagggggtatgaaacacacctcagcttccaaagacgtcctggaatctccttttagagaacataaatgtgaaaaaagcgttgcccatttgacagcttttctaaatctacctaacatgtagatacgctgttgtgcatttggaccagcagttttcttttccatcgcatgactccatgctctctcagccatataaaatactatgtgtagaaacctgctctcatatgttgaaattacttcagaatgtaatgatgcaataaatgtctaaaaactacacaaattcaactgtaatgctcaatgccattgtacttcttgatgaagtcattaaaaaaaatgatgtgacatacatatatggcgataataataaatacttttgctgggtgatgggaatagcctgccaaggaacaatcagaggcatcatatgcaattaccaaacaaggagtgcaaacatttagcaaacaataactatgaagcaagattacactgagctcatcactatgcgtttatgacagggcaccaaacggttttaatcatcctcaataaccacccaatttcaccttcttttgtggtgctgccatggtggtggtgtctctatgcgtgtgctctggttttcactaaggaaaaatgatggatataggaacttaagactgtcataggactccaacccaattatcctagacacccaggaggttaacaacttctaccaccaggtcactggtctgtttccctactattgctcttagcagcttaagtaagatagcagtcccaaattggttcactaaatagtttaggtggagcaatatcctgagatctagatggcaagaaggcatcatgctatgaagtatgaaatggtaacttctttcaactttgaaaatgggaagacaacacccggatattgaagtatgaacagagacaccaagctatataacagattatcagcagaaagcatcacacctcacatctgtgactgttgactctgttatattcctcttggtatatttaccacggccatgcagaaacttgagagacttgtataaccttctgagacgtgcggtacagtatctcctgcaggtcatgaacatccttgagacaaagtgtaaccaataacatgaaacattaactaactaattacagaaaaatagtggcccatgcaagtgcaatgcatttcacaattgaggagttgtctgagggtgcagggggcagatgttggaggaatggcaagtaaaagaatatataggttgatttgattttgatttacttgggtctaattaattatgatcattgttaagaaatattaggggcatattagacttttcacatctcctgtatacatttgccctttagggctagatcaactgtactgtggaaaatccccaattcactgaaattgacatggtatcagagtctctcctcaatccctaactctagttcagctccctggcgagcagccaggggcccgcatcgtcggtcatcatcatcacctaagtacgtcatccgtcgcagtcaccacccattcgtcatggttgttgcgtgcctgccgccagtcgcggccgccacatgtgtgctgcctctcatcgtcgtcatctgctccaacccgtccacagcctgcagcagtagcaagttcctagccactgccgacctcgtcagacccgtcgttcccctctgcggttcctcgtcaatcacggggccatcctcactgtccacctcggatatgttgcattgccgtggctcgtcgtcgtcagcaagcccggccagtcaaagccaccgctgtcgcggcgcccgtctctgcttcgtccatctatcgcgccatcggctggtgccgcgtcatctgtcgtcattcgcagaaggcagccatcagtcgcccttgctctctgctgcagggagtggtcaagctcttcacccaggacctgctggcagctgcacgtcctcaagcagcagcagatctgtttgacctcgagtatcctcttcatcattctcaccagatcaggtgatattcatggggtttaggctcagatcgagtctattctactcattgtcctcaagctccttttgtcttctagcagtagcaacaacaggcttagcatcagcaagttccaatcctcttgctatcatcatctctactacctactatattattcatcttcatcagttgcttaatctcatctgctagtgcattcagttcatccaaagtaatatcatgtgactgctagttagtgtctttgctgctgttataggatattcctctccaaatgtcttttgctagtatcctaagtcatctgctagtttagattgagccaccactatgtcttttgctagcatatcaatattctctacaaatcgatttctttcctatctagtctatccactcagtccagccacatatcttctagtatcattgtgtcatttactagttcccatttactccatcaaagtcagtgcctatccttcaattcgttgaggtcatgccaatctatctccaacttgcccggcttcccgtcggagttggtctacgtcatcagttcaccagctccatgtcagagttggttatcatcacttcatcagctctatgtcaaagctgatcatcatcatcatctaatagtaaaggcccaagaacagtttgtgaagggcctctatcatcatcatcatcgaagtctccgaatcagtgaagggctgaagaatggttcgtaaaggctgtaaggaaccgagggtcaaagaacaatttctgaaggctccgaggtcacttcattgaggaggggacagatcttttcttcttcaatatccaagaattggcacactttgacgacatcatcaagactttggagatatgccaatatttactttgtcctagtttttagttttacctttcaaatgcaatgttactgcatcattgcatttgaatgggggtgttaagaatattatggacattttagacttttcacatctcctgtatacattgcacttgccctttagggctagatcaactgtactgtgaagaatccccaattcactgaaattgacattatcacagatggaataaaatagtggtaaattacatacactagtaagtggtgtcaatgccaagccatatcacatagacactactctagaaactaatttgtcaatgtattatttctagattagggattaacataaaatttcctccaatcctcctcctctccctgtttccccttgttaccttcttggtttacacgtagaactgattcttacatgagatcactctctcctcaataaatctattgctaactctatcaaaaatcccatctagcaccctattcaatactacaggaactatcctacatgaagcactgggactgctctgatcctttctgtaatagtataaatcctagatacagactaacttgtaaataacaatcaaaagcaagataattgggcaaaacaaaaaacatgccacgggattgtactaacatagaaacgaaaatcctttcaagcacctctgccaggaaaaagagcaggcattgcagagcaaatatacatttctcatcatttctcaaaatgaaattaaggagacggtttcaaaaaaaaaaattatagagattcagtatatatataccaaaaaaaaaaggtttgcatagaacagtttggatcgcaagtagctatacaattagatgagggcaatccatcacaagtccatcagagaccgcaggagataagatcgggagccttagacgattcgatctaacacgggggggcggaggggggaaatcgtagacagatctggtaggaagtccgggagcgcgcacctgtaccgcgtgtagtcgccgtggcggaggccgtgctgcatctgcgcctccctcatgagctccagcactgcgaggaggagaggagaaccggcggcgcccggatcagcaactagggatcggtcgtggaaccatcggggagtggggagaggggaggaagagaagcccaccgttgatggagaacctgacgagcggcttctcctcggccgcggcgtcgacctccatgtccgacggcgggggctggtccgcgggcttcgacatggctggcggccggcggggtgcgcctccggtgcagccgcggcgtagcgtagcgagggaggattgtgttgggttttgctgggttgggggccgggggtacttggatccgagtctccgagactgtttcacggggttataccgtctatctatcgtctttcgtgtgttagtactaccaagagagaagcgtagtgagaatattaatccaaacaataaaactaaaatgttagggaagtttttttttgtcaaaacaattgattgttatgattactaataaattataaatactccatccgttttatatcataattcgtttgattttttttcttagtcaaactttgttaatttgattaaatttaagtggtattctttttctcctgaaaatgaagataaagatgaagattaagttttttatgcaaaacgaggtggtattaacgtatgattgattgagttttaattattacaaacttgaaaaatagattaataagatattttagagcaacttttatatagaaagttttcgcatgaaacgcaccgtttagcgtttgaaaagcgtgccacgaaaatctaaatcttcatccaaactcttgtcggagaaaagaacgcgaccatatagaaaagtttagcaacatctaaatattaaattagtttcattaaatccaacttattagtcaacacagaggaaacttctcactctgtcccataaaacttcattcctagattccaaggtgcagttaagaagagagatgaaagatcaaaatgctcctggttaataatataagatgggtaagtagataaagggtattgaaaggattaaaaatagtatttatggatcgatgatagaaagaagataataattggtttattttgggataaaattaaaactctataagttgatttattttggaatggtgggaaaaactttcatacacgaaaaaaaagcacaaaactagtcggaaccaagataaatcgttcctatgtaaaactaacaagctctacagatataaccacattttattgacctatgctatgtcatctaggtctctgtacataaaaatagtcaagacccagatcttgttaaagtgtatcatcccgatctaaaattgtcatgttcctgttgtgttcttttgtggtaggttgggaggaaagatccattgttccccgcgcacatgcttcctgaacttctaaatggtatgttttttgcaaaaaaaaaatctataggaaagttgctataaaaatcatatttatatatctttcaaatttaaaatatttaatatttcattaattatggacaaatgactcacttcattttgcgtatcttctcaatcttctattttccatgtgttttgggataaggtgggaatgggatatgttcgacgtatccatgtgttttgagatggaaggttcctatatatacgtttagtacgaggggcgagagtataaatgaaccccttatttgtatcgggtgctaacccatctgtgatgaacaaaagtctcattaaggattagtgctcactaatgacaaaacctcatccatgacgggtggtaacataccacctatcacacatcacagttgactcatatgtgacgggttataattacgaaccatcatggattagaatttacattttttgaattttcaatgaaaaaccataaaataattttaaattttaaatgcaacggaaaaacccctaaaatattttaaatattactatatcattcctcacacatcactagccagaagtttatgattttaccacggccatgcagaaacttgagagacttgttatgtgtgaatcacaaataatgttattagtgatgggtggaagttaggactactcatctgttatgggccatctcattacacccatcacagatgacctttatctttcatggggcatgattgtgacccgttataggtcatatgtgacatgttacaactgtgacccgtcacaaatgaccttgtatctatggtgggttatccctataaccatacctaaaatgtgatacttttcgacctgttagagatgagtcatctccaacgagtagcattagcttgtcacggatgtctggatctatagttgtgtcgtggtactacttcttaagggatggcccacatgtcagctagtgagaaatgtgatttggattggttggtcagtttttaagagacaaggtcaatttggatctttgtgcaatcccatctacctccaaactaaatacctaaaaaatagaatcaacccaacccgacccatcctatcccttgaactaaacatacgcttaggatcatatgtggcgcaaacatggttgtcaccttccctcttctctctcatctctccttgtttctttcccatagtgggaccatacaaaaaaatttcttttatttcatagagaattccacaatgagccacttatttcacttaatttagactagataagtttgcaaaaaggatccattttataccacttacgtacatatcttcctctctttatctccagcatgtagccaaacttgctggtgagctcctgagaaggcaaaaatgtgcatgataagctcttagctgtgataccacttaatatgctcacatctctgattagtttgatcttttggtgagttgatgataactacaatttggaacaaacattgacaacccgactacaactgtacaagacataattgtgttgtgccattgttggtatttgttacgatcacaaataaatccgcaagcgcacagataccgttgtagcatttcattcgtgagtatttagggtatcgttatttgtttttccgcaggggaggcggcggtttaaagaatgggctaatatattcatgatcatagtatgattaataaaccacggtctaagcaggggtaaatgataatatagatgtagtgtgacatatagaagatcatctcgataaaagataaactagattgtggagaaggacaaaagagagctatggtttattatatacttctatatttacgatacatagttcacagacaaacatacgtatgcatatacatatacaagcttaggacttcgttctatgcatataggcactaccgagagaccgctccctactggtctgccagtgtggttatgacattttaccaattcttgcgtcgtacccgaacatggagtattacaaaggacggacatggttgtcaccatgtgctgcctaagctctataacccgtggggtatacccgcatccaacaacatttaatcaacccaagaaccatgtttgcgttgctaaataatgcatatagctcccccgaaaatcccaccctacagatggaaaagtaagaactagctcacccattaaaatcactaaaacgatgccatggcatagatcgactagcctaaacatatatagcatatgaaataagtataaaaacatcaaggaaacatataattgacaaagtagtatatgaaccacgaacaccgataaataaagaagtcttacaaagagaaaagagcactagagccatactcgaatctccaagaggactaggaaacaaaatagtaagctactcttagcctaaactctattaatctagagagtaatacaaatgagagagagattgcttcttgtgtgtattttgaaagggagagcttcttctccttttatagctgcccaatgatggttactaatgacagttatcacctacaactgccatagggaaccaatgaggggttgccatgtggaaggtggagatgagagggaccaagcctggttcggccgaaccagggtaacctctccaccgcctttctttgtgagcatgatgtctaggcccttgagttggtgcatggtggattagcctcaattatgttagttttgcttttgatttgtgggcccttaaatccttgtgcactctcctaattggtcggaactgtgtttcttcgcatgtcagctcattttcaccttcatttggttgataatccctgcattcacattattctccaatgacaagtggaactacattatttgaaatgaatatgcgtgtaagaaatatgagttctctttattttttttgagataattgacggtcgaatttggtacttaacaaccgtcaacagccatagcgattgttgacggtcgttatagaccagtttcgcccgtcaatattactaaaataaaggatgagagctccttaaatagcctcccaatgacggttaattgccaagtacaaggatgagagctccttgttctagaataaagaattgcacacactcaagaactagttatgcttgcagtgcacatttgttctagaataaactatttccacttgtacttggcaattaacctcttgcagagattacaacataaaatggaggagaatcaacagtaaaacaactaaagaaccaatcggaagctgtcgagaatcagacttatggatggatgggccgagaattcaaaattaacacgatccaataagcccaaaattcacaagtctgaaaagagaagaagaagaggccactagccaaaatgtgggctggttgggctggcccatggttcggccgaaccctccctccccccccagcgcccttcgatccagggctttggctggacggcgtggatcactccccaatgacggttggagggcatttctgaccatttcaaccaccacaaccgtcattgggaggctatttaaggagctctcatccttcactcttgcacacactcaagaagaagagctctctccctctctcaagtttagtagtatcctagtgttagtggagtaggaattagaatagtattcttagtcctcggatcttcaggagaattcaggtatggctctagtacctttcctctcttcttttgtaagactaattgaattaatagaatattcctctttatacatcttcggtattttattccatttatattatctgagtaccaacttcattttatacttgtatcaatatagttgtgtagctagcctaccagtgaggtgcaatggtgtgggtttagtgtctgattactcggtggctctatgtcatctcgggggatatagagtagtattcaataatgtagacctagtgtctagattaataagtatcactatctgggcatatatggtacaggtcagtcgaggtgggctgctgatggtgacagctcagtatgggtattcctccacgatagtatatattcctagacactttcctagggagggtactcctccatatttagccccggttggacggccatgataggttgtcgtaaggaactcggcaatccgaggtggtctctcaaaacaccaggagggcactgttagggggtattggttgcataattgtatactaacaagtgtaaactaaagatgtttgtatattagaagtataggaatgatttcttttcttattcttcctccacttagcatatattatatttttgtgagagtatcatatttctttcttctgtgttgcacataccctttgaattacttaacccctggatagaccttgatgtatataagtaatatataaactattagcatagtactcttttatcatatcttcccttgggattaaataaatacgatacattggaatactcccgggtgaaatgctataatggtatatccgtgcgcttgtggatcaaatctgtgaccataaatataccatgaatatttctacgtcattgctggaaaatatatttctagtaatatcgttaagaaatatcaacagcgatcgatacacctcttcgtgggttgttggtcttgtcaagaaagatcaaccatattcctgaaacaaatgtaaaaaactagtaagaacaagataaaagcaatgcaatattgcaaataggaattggaatgcatgagataagtttcggggttcagtaacgagaaaaacgtcatctaaccgatcacggctttacctagaaaagtaacaatggctttacctatgatgtgatgagaaattgttgtatccatcatagccattactctccgcttagtgtatgatcttgcccatagaagtgtacatatgaaaagaagcgcaacaaacttttatcatgtaatatcattagttctctagcaaatagaattaacctccaacgaaacgtatatacctggtaatgaggatgcacaacaaaatgatgtagatgctacattgaaatcattctcttgcatgccatctcactctagtcgctccgcttctttgcatgtcatcttgctctagtcgctctgcttctttaggaccaattgtttctttgaatcacaacaagacaaacttgagatagcataattagtcataataaacttcatgcgttaaatatactcctttatcattgtgggttccaaaaatatggaaactgtcgaagggttgtacccgacaacaatgtttgtagagcatgtggatcattggtactaggttgtacactagattgtactaaggagacgtgggacaaatatttttataaaagtttgagccccttgttacaaacggaactcgaatccaaccctgaaatgtttttttctaaagaattttgcacaatgactaggaaacaaaaaagatggactggtatggtggaaataacgattcggtctcaaagggagactgacgtgagaacatatgacagagtcctaaaaagaaaacatagtttgtctagtttagaccgaaatgtcacttcgagatatgattttcggtagaaaaagcgttgttgggtttgcagaacaggattctcttttattaggaaaatatcgcgacacacattccttgctctcaactcaagggaaattgaaaccatttttttaatattatgaattaaattaaacctttgcttctgtagaagctataaccacttattacaaagttcatggcttaaaactaagaataaaagtatataacaaagaataaattgatgacacattaaaaagccacctccaacatgagggagagatataatttattcaaatagcaattatattagtaaatttctatccaaaattgatgaaaatttgcatgatcgttgtctctaactaatagcatgcaacacaaaagaattccttatcctcttcacacttttgtagttggacccaaaaccgaaaccaatatgttagtttgaagactaactgcatataaaatttagatggagaattatcaaaaactacattatttctattaagtcataaaacccaacattaaatcagatgctcatatgttttctgttttttagtcaaaacacatggaccaactcataaattaaatatactagaaaaaaaatgcccgtgcgttgcaacagttgaaggctattttaatcttattactattgtacggtttagctaagatgaaattcactgtagaaattcatttggatatttttttttacaaaatcacgagatgcaattaggagtcctttctgtatttccaaaaatgaatgaatttaaaaaccgactcaaatacggatatgtatttctaaaggcaaacgaaattaaaaaccgactcatacacagatgacgtaccaaagtaagtacaggcaaaaacatcttcaatttttataacagtagagatatgttacaaaataactgttggagagaaatatatgctggaagcctaattgtaggcgaactaaaattgaaaagcaattatttggtaagattaggcaataagacgcggtatctaaggataaatattttttttataaataaacttaacaaataacttaaaacaaatggttaagtaatatagtagattttttttaacaaaatgtaatttgtgaagcatgtagtaagtaatttgtttcaataatccggtgaataatataaaaataattaataatccggtgaataataagaaaaaatgtcatatggaggaacgaagagagaggcacatgttgtagttaaacaatgcgtgtagcgtgctatagcacttctcatccctaattaccaactttgataactctgctctcgtagtctcgttgatgtatcccactagcaataggatagatttcacatgagcctactaccttaatttgaacatgaagttccggaaaagccaattgaacttgcatggtcggaatcgccctctcgcaaaggatgagggagggtgatttcgacccgccatttgccgtacatgctagatgtaggggggtgaaaggcccgagtggacgcaagcgtagtcggtactcgcgttagtcaataaagggttatgatataaggcggtgttgacaggcctccaatccgatatgatgcagcgcggcgggggtgaggagcagtggaagggcggtgggtggctaggggtgcatctcgattaggacaagggctatctagctctacggccatcagaggtgcaagggaagagcaaggtcggcagccatccaatgcggaatgcaaggtgaggcgccaccacgccattcgtgtggggagttggatggtggcgcctcgccttgcacgccgcattggacggccgccgacgcgccaccgcgccacctgtgtggggagttggatggtgcgatggcgcggcttccgcgcaacgaattggcagtggcattaccgcatctaactcgggtacataagaaacctctcaactattgtgcttggccttgttcttccataacttaaacttgcagaagctgggctgaggtgagcattttccattcttcaggttctctgctgtgcacagtttctcaccaaacaacatgcttatttaaatggacttgttacaccccaaaattccaccctgaactgaagcaaaagaggatgatgatctttccagcttttgtgttggtgagaaacataagttactccatgtgccattctgcatccatcagaaatgtcctttgtacatgttagctctaaattcatagcaagtgaagttgagttgttagttgttgctgtacatgactcacaatttttccccttttgctgataaatagttggggcctgtttggtacagctccaactcctatatataactccaggagttgagtctggagtggagttgtggagctgcttaaacccagctccacaactctagtacattttgtgagagagctccacccaactccactcccagttttggtggagctgaaactgtttggctgagctccagctccaggaggggtggagctggagctggagctgtgccaaacaggcccttggtttctcagtgtgagggcaaatagcaaatgtttgatctagagcttggatcgattccattattgaaaagaaacttgacagctaagcatatgcaattaagattttagcaggattgtcaaggaaactttattcttttttttcctttgttttgttaaattttgatgaaacaaaatgggttagagatacttggaatgcgaggctacaggaatttcggttcaaaagtcactggagttccacggagtgctagcacaaggtgccttcactgaaccacatggagcatgagcagagtagcatcagacatcagtggtcagagagtgctcggtacaacgttcatttgtctggtttggtaccaaccgattacacaaattctaattttatgctaggcttttgttgttttaatttgaaactacaacttaactagaaattgagctgagaatcttgtttcggtgtatttcaattatacattcctaatcaatggctctacaaaacctgaatggcaagatacaagtcaattatgtcccctccagaaaattcagggacttttgtttcatattagtttcaagttcttgataaaaacagaccgagagtaaactaaagcaaaaatgcaagcgataaataataatatccgcaatgtttttttaatatgcatgagtatgcatataatttcattaaaaaggtataaaaatggggaaaagactaaaacaccattctccccaaaaacacttaaaagacgctacttacaaaacaaaaaaggctcacacaacccaaaattacccaactgggataatcgaccttctaaggaactcgccaagcttagtggctccggccggccaaacaccaaagattacactcatttgccatagtttgaattacagtcataacactaggactagcctcattaaacacacatgcattcctatgattccaaatctcccaagccaccatgataatgagagatttgagaccttttttctatccttatccaaacctctaatagccttgacccaccaactcgagaagcggatggtatcttggcttggtgagatgaagatcagccctatcctttgaagaattagagaccaaacctgctaggagtagacacaattaacaagaatgtgttgaatagattcctcagcttaatcacacaacggacagacggcggggtgagacacctcccgtttgtcaagacaatccgccatccaacatcgattgtcaattgccaaacacacgaagaacttgcacttcaaaggtgcccagctcttccaaattattctccaaggagcaaatcggaatgtcccgacaaaaaaggactcgtaagctgacttacaggtctatgattctgtcttgaagagcttccaccgaaactgatcgggggtgccatcatgtagaatcactccatccaccatctcccacacctgtagatactcgatgatcacttgcacagttagagctcccttgacatctgtcgcccaatgttgattgtccaagggcgcatgtgccactgtgcgacttgtttcacattgtatgtgtcacatcctgatttttgtttcaggatttataaattatttaataaattattattagaatttatattaaatgatctttaatttacaagtgaagttaaatgtgggaaataaaattttctaaatataaagcatggatggatttaatttttattaaattctccatgattaagtcaactctctgaaattttctcggatttttcagagctcaattcctaaatgatacaaagaacagttcagtaattagttaatccattaataatctaattataattgttaagagcttttcttatgtaaaaaaaatccttaatttataaatggttgtttaattggaattattagaaatgattttaaaagcctagaagagaagatctaattttaattaataaatttcaatataaaatggggccagataaaatttcattaaatactttacttgattctatagttcctagatttttctgggatttatttgagccaaggaagtatttttaataaatggaattgcatttcatgaataatttaaattgaaaaaggtttttaaaagtctcttttggctttgggccgaaagtcggcccaaaaccttctctctctccctcggcccaagtcggcccagtccgcagtcgcagccggcccgtagccgagccgccgctctcttctctctctctcagtcgctgacaggtgggtcccacttgtcaggcccgtcgtcaacctcgcgccgtcgcccggccgaaaccctagccgagccgtgcgccgccgctttcctttttgctcgctcctttcctgatccggtgaaatcaatagaggggaaatgatcttctcgatctcctcttccttttctcttatggaatcatcgtctttttcgctttggaagttcgtggattcgaggtcgaatcggatcggtctctttcctccaaaccccgatgtttcctttccgtcgccggtcgccgtgggccttcgccgccacgccctagcccctataaaaggatccccaagtccgccgctacccgtcgccaccctcgccttcgtctctcgccgttggaagcgccctagcgccgtgtaacttcgcgccgccatcgtcgccgctgctccagccgtgcgccgccgtcgctccagtcgtcgccgtcgctcggggaggtcgccgtcgtggtcgccgtcgcgtcgccgtcctcgtccaccgcttcaccgccgccgaagaccgccggagcaccgtcgccaccgtcgacccgatcttctccgccgcttcgacctcatcgctgacgtcgtccgttgctcctccgccgttgctttggtcaccggtgagttcgccgcgtcgccctctacccgttggtgtcctccgtttgcatcgtcgcgccgtcgttcgccggcgagcatgcgttgccgagccgccgccggtggtgacgtcatcgctgacgtcatcattgccgcccgttgtggtccggccgtggaccggttgatctcggccgtccgttttggataggatcgatctcagccgtccgttcccgtgaaccgttgccgtgcgcccggtccaccgcaaaccctagccgctgacgcaataatccccttttccttttcaaaaataattcattattgcgtcataattcaattaaaatccatataagtgttttaatccgatttaatctttaaaaattcataactaattcattgtaactcagtttaatgtggttcaagttgcaaaagttgtgtaaaataaagatctacatattaaaattatccataaattgaattaaatttatttaattctttttaaatgggctttaattagatttaatctagtaaaattcataataaattcatttgaagtcagaatgaggccgttcaagtctcataattcatctaaaattatgatctacatgtttgtttactttttatgtattgtttatttggtttttattagtctttttcttcattttgcgtgttagcttgtcgtttccgtcgttgcgaaggttcgtgagtgcgccggaagtattcaagaagattatttgaagaccgattgttgcgaggcaagtcacacagatcctaaacacaatcctttgagcatgttgatcctatatttaaattctctatttatttcaactttgcatttattttcgaatgtcactgggtggtgtgaatctattcctttgttatggcctgtttgcattgattactttattccttgataccttgggttattataacttgactagttgagctatatatattggttcagctagatattagatatgattgcttagccatgcttagaaacattagcacattattgggataacttatgactcattattatttaatgatggcttaatgatagttcacgatggttaatcgtgattggttaattaattacttgccaactaaaacttgataatggtgggttgtgagcacatggttttgagagtcgtgctcatgacaattaaggaccggttcgcgagctactattgtgaaacattaaccgtgccaaccacaagccagcgtgggcaacggctttaccttttgtataacatgattcattgcggagcaccagactgagaagtggcggagataagcccacgggggtcactggggagtccatgccttgttttataaagggggtgattatgatccaggaatggtgcgctgcggtggattgtgttatgcaaggggtattgttacagctcctttccgagataccgtggtggtattgaggcacatggtgacatgttgtggggctgtgtcttgtgggtacagtggtacacctctggccagagtaaaactattcgaatagccgtgcccgcggttatgggcgggttgagcaatgtttttcgtgattagtctcacatctctcacaataattatagatgttatacctggtaataattttgcttagctcctggtttggagttagatctgtacagccgggtatggttgttcaggatggttgggcctgtgcagcatgggtgtgctgttcagtgttgattaaaatttctgattaattactccactgttttacttctcttaaatgttttgctaaatgctgcttttgcaaatgagcctatattatgccatcctttggtatccttgtgcacttgcatatttgctgtgtggcttgctgagtatgtcatatgctcattcttgcaataatcaatcaacctcagttgaagaaaaaggattcagaaggagaagacgtttggcttataccccagttgagctgcctgtgggagtggagccggagcttcgctagattttattttccgctgcagttttcttcttagtgaggactaagtgcctctcaagtaagtatttatcgttttagttaatttgatgaatctgtatattaaattgtcagtttgtgtacctcggctgattcctggacgaggattttatgcacagataagttcgaaaattactagtgaatttccgggcgtgacagtatgattcacattgtacgattcactgctttatttacaggttacatgtagtcagtttctctctttggtgaatataatttaagcttgcatattcctagaatgatagatgtggcaataataataatctaaattgtcaaatcttagggccccttgattcatagaattggcaaaggattttcataggatttaaattcctaatgattttttcctacatgtctcattgattcataggaaaaggaaggaagctttccataggattgcattcatatgcttcacatttcataggaaaatcatcaagaggtgtgacctccttgtaaactttcctttgttttttccaaagcactatcaaagggcaccaattatcaattattgtattttggattcctgtaggattcgagaatcatactacttcaatacctacattttttttgttctcgtaattttcctatcctacgaatcaaagggagccttagtcaattatttcaaacattggagttgtacacaactctaagagcatctccaataacctctcctagcaaaattttggcgattctagtcaaaaatagtgctccaacaatcttttccaaccggcttgctaagacattcggcaggccaaactccctggtcattggccaaatttggttggccaatggtgcaccccatgcagcaaatctccttcccgctcccactctctcatgtattggtctctctccaacccacatctctcgtatgtgtctacgcctcccctaccgcacgcagtgccttcgcctccccatccacgtagccgcgataagcagtagctctgtagtgagccccgtcccggccgtgctctcacctagcgccgttgttgtctcgaggtcacctcacgtgatacggggaaaagcccgaccttctcgacgtaggatccggataaaccatgaacctcacgaacaggatgaacaacacgctgcccgtgcaacgcacctttcaccatgaattcgcaaaaccacacgctttgataggttgatccacttgaccacgcaaaagtggatctattgccccctcaattccctgcaaggaaaagcaagaacaatctatggcaaaactcccaatccctctctctagtttggcggcggcggcacaaaatctaggagaagaacaagagcaaatttgctgcaattttcattagaataaacgtggtccccctcatgggtcgtgcacaaaggtatatatagccattacatgggttagaaactaactaagaatcaaatacaacacaatatggaaacttctctgcagcaccgtcaatttgtttcggctcttgcggtggaaccagaacaaatttgtgtcctgagccctatccaccacctgggccatgaagttttctttccaacgagtgctcacacgtccaaaacggactacggacgagagagaaacaagcgttttagtccatgtttgtccaggctggcccaaaccgagtccgaactgaatcttttctttcttatcttgaaactcatggttttggaaggcttcaatccgtggagtaataatagatggactccttcccaacccaagatgggccataggatagtataactccatccaaccatgccgtgcaaagccgacgctcatcactattgttgttacttgcgcgacacccggtctgcccgcacaggatgtcttcaacttgcaattgccgttggtagaaagctcagaatgacatgccgtttgattcgatggaaagtagacttgataacctttcttaatatataagccattcatgttgaaagccttctcatcaatgcagaattcaccatgaacttcacgaatagaatagcatccgatcttccacatgtgcgccgctacacccgtcacctccggctggacccccatgttgtttatgccagccaatggtccaaatctctcatgtctgaaagtaatcaagtgcaaaatattatgtagcatcaaattctcatatatttcacgcgtagacttagagagaaacgagttcaccttatgttctgatctgcaagtaaagaacaatgtacttttgataggtagatctgcatcatcctccctttcttcaagaaaagccgtccttggcttttggtaatctgaaattgtgctaaacaaagagaataatgtgtacgcatgatatatgcaaatgccatgaaattgaaggttcccttgtttgccaacgatacaataagcatagcagccatacatgtatattgtatcatttgcacaaattagtttccaattatttacatcgtacctgctcatatcattccccctcccttgaagaaaagtcgcccccgacttttgcaagataacacaagaagcaaatgacatgaatgtattgaaatttggtgaaaacatacatacattcttccattcttcagctacgctgctccgattttgaaatcgtgttgttgcaaaagaacacgaaaaagcatgtactgggttttgattccaacaacatgtactaccatgctctttcatgtctagaaatacaaaacttttcataacagatacacaatcacttatgtacaataacaaatcagaaagcatgtcacaattcatgcgtagaccatgcacgtaaacgctgttgtctatttcataatcaccaatcagattaatagtataggaacatgataatttacaaactagtgatatgaaacacaaaagtcgacaaactttcacaaccaagcaagtcatatgaacaggttttctcaagatgctttcatacaaagaatcaacaaggggtattcgagcaagcacttctttatgatttatcaattccacatcatgtaaattaagcaaataaaattcagaacgtgggacattgaatttatcacaacaaaacaagcatggattagttgcatcacttgtacattcacctttactcaccatgttttgctgcaatagcatgtcaatatgttcatatttatcgttaaagttctcgatggaagatgtacgtgttgtaggaggcacttgctcttgaaaaggtgctggttgtgtaacatcaagcttgttctctttttcgtccacctacacattgtgagaaacaacactaggagtagagattaatgcgttaattttggaaagaacatcacatgggctatcatctacttctctcttttcttctggtgtatctctcacactaatattttggatatactcaacctcacatttagtggaatcacatagcttactcttttcagcactctcactcaatttggctatgtggctctctttgtcacatgggttttctcgcatctcatcatgcaatgaccatgggccaacaatggcgcatttgccatcaacaatgatctgttgtgctgcatgcactgccgcaacatcactacatgtcacattagccgaagggaaagtcccatgcttgactatatactctttcttcttggatagcacatattccaatgtcctttgtttccttttctcccgatcaagaagaaacatggttgaaggcatcgggcgaagtatcatatgtcttcccttatgtagcaaagaataagaatttgtgctaaaatcagattcaagctgatgactcttcatccattgccatcccaataatatatgacatgatgacataggcactggaaccacatcacactcaacattatctgaaaattcccctaataaaaagggcacttttactcttcttgtaatgctgagattgcaacttgtccactctagtagatatggatctggatgtgaacatgtgaataggttcaatttctccatgagctcaatgctgaccaagttgaccgcgctcaaatcatcaatcgtgaaggcacaagaagcggactgcaccttgcatcttgagtgaaacaacttggtacttctaccatcttcctcatccaaaaagataccactagtgtgcaacatcaacttcatatttcctgccattattagttatacaagaacacaagatatataggctggtggaatatatatgttgaaaacactcaacctcactcttcttaccaatcgaaagttcttacccttccttttagagtaaggggttgatcacaccctgctagtggtagacaacttaaaaggtgatggttaagcgaattcatagtttaggagcaattgcacaggtagtaaatatgtggagcttggagggctaagtgtttgtcctagcaattctgaattcaagatattttctcgttaagtaataatccaagctagaacaaaatgcctagttgctgatcacaagattgtttacacagattttggctcgtgtcctaaatataatttgttaaattataaactaatgtattatctcaaatatagtgcgtacaaaatatatataataagaattttatcgggagacagatggtgaagtaatttaattaaatagcggccacgaaataaatggccatgaaataaaatgtaattcacttatattggacaaaaataatttttggcttaaaataggaatacatatgcgcgttccacataagtagcgtgaacaaatattttccatgcgcttttcgtcggaccggcgaacgctaatacttagctttctcgttgtatccgcatacgaaatttggcctgaaacatatggccatgaagtgggattttctcactgacccgaaattgtcacgccccgaatattttcagaaaaggcgtgcccacgatataaaatagcatacaaaaattaaaatgtaaaccaaaatagatgtttatctggctagtgaaaaatcgtgccccaaatagtcgcgacttaaaataaaaatgcatgccacgtccacgccgctataatggcgtggatacatatacacgcgcatgccaaactaaagagggtcgcgttcgccattagtccagcatttttatctcgatagctagacgtgggctggaggaagccaccgtgataatatgcgaagccaccgtgataatatgcgcgtcaggacgcgacgcgtgtcgcaaaaaataaatttacggcagtaacagcccgctcgataaaaatagtgactaaaatatatacgcgtgtctctttaaaaagaactcatacccaaagcgtgtattaaagtaaataaataaataaattgtgatgcccaattaaacagagatatcaaggaatccaaaaatgattgttttccatggattaaaaaaatagcccaggcatgatgcagaagagaatccaccaccagtttgaaaccaaaagaaagagacacatgtcagtgaaagcagaggaaaacgtggtcaagccccacgatcaccactaaccatgcatgcattcggcaaataacagcatgttcgtcccaataaactgaaaagggcccacatgtcatccaaataaaggaagcttcctgcagtactcaaacagttaatacattgccccacgatgaccactaaccatgcatgcactcagcaaataactgaaagggcccacatgtcatccaaataaaggaagcttcctgtagtaatcagttagttaacccattgtctcacgatcagttgatctgcatgctccattcaaatgttttcaaatgctaagggcgcgcgcggctgcttgaaaatggcagggatcctcctctataaatagagggagtggggcaagcagggagtagaagagttcgctggggagaggttccaggggagattagcgtagaggctaggtgctgtgcgtatgctttgcagaagcgctgcttgttgctaggcaatatacgctgccgtgccgctctgctcctacgccatctcgtcagcctctgcttcctcgctctgctgtgccggaagaatcagaggtgtttcaaggtgggattcatgctcttccttcattcttaggctcggccattgtgtacaagtcgaaaaatctctcagttcatcttcctctactcatgtcaatggattcttttgttgtgtccttcggttcggccaatgagtacgaactaaggaattatgttcttgccatgctcctaggcttggccatcatgagtacagtcaaaggaatttttcctcttcgttgtgtccttcgtctcagccagcgcgtatgagacaagg

SEQ ID NO: 6544 - DNA, 5386 bp, Oryza sativa
ttggtccccggcgggcaccatcggggcgcgggtgctccgctcccgtaggccgcgccgggaggccgccatcgggcgcgccctcgcggctgccaagtgggcccggccgtcagccgcccgcgcccgcgggtgcggctgacgcgcgggacccacggcgccgaccgccgccagccgcgtgcgcccggtccaccgtggaccgtggggctgacgcgtgggccccacccccgtggacccggtccgcgcgtccgctccctcggctgacgcaataaataggatttttaattgaaaatcaaatgaagaaattcgcaaatatccatttaaagagcatataaacttcaaatggccatatcttggccatttgaactcggaattggaccgttcaagtctctaatttttccttaagaagtcaagaacccatttttgtgctttgtttctgcttgttatttggagtttattagagtaaaagcctttttcttttccgttggtcgtgtagacgctgcagtttcggaagatccgctcttcgtggaagttgaagccgtcgtttggaaaagcgagcaaggcaagtcacatcatccttgagcatattgaatcccagtttacaaaattatttttaatttaaattaatgcattatcgctttatttaaattcccgcgttatcactgttttatttagccatgcctatttacctttgttatgaccatattattcttgttattgttgttatttattaccttgttcaccctagaataaacaaaaccccaactagtggacactctatttatggttccactagtatgaatttaggtagatgcttcgctgattaataggacaacattaggtggttttataactttagactttgggaattctcatatcttttggacaatatggaattgttggtttatggtaaaattggacatacacctctcttcctctttcaaaacccctaaaacctgttttcggtggggtttgggtgcatgccagttgtgggaagtagcaccccggccactataaggattaagctcgggcctctgttgcaaagcactaccgtacttccacatgtctagtgggtaaggcttagtttgtggctcagtctggtcataaacaaaagtacacggattggagatggatgaagtcgggggtcgatggacattctccagggcaaatgaaggctacacgagctgcggcccggtagtcgagatgtcatggcagagggttggtgccctgctgctagggggctcagtcctgcctgcctgtcccgggtgtcccggccgtaggaggattgggtcggtactcttgtttatggctaggatgggttgggaactatgtcacgtcttccgtccgtataccgtggtggtatgtggcacgtggttgcacgcgaggaagatgtgtcttgtgggtaaagatgtacacctctgatcagagtataatctattcgaatagccgcgccctcggatatgggcaagccgagcaatgtacccaagtcagtgttttaattcttaaaatttgctcaacaactaaaatttggaatggttggcctgggttggcttgggacgagctggaacccaggtcgggttgccagttcggtccgaatcatcgtaggccttgggttaaggcaggttcgtgagggttcacggccttgtttaataatattgtatagctctaggatcgtctttacaaaatagctttgggcaactaagtgacttttaaatgccgtttactgcaaaacttaacccctatattattattcccttgtacctcccttgcattaattatgcatccgccggtgtggcttgctgagtactgtggttgtactcattcttgctcaatcttttcccccttcagtaagagaagctttggagaagatgtcttaggtggagtcctggcttataccccagttgagcgcctgtgaagatggagccgtaggcccgctagtccgctgctgtttatttttgattgtcaggccttatgtgcctttgtaataatgtaaatattatcgatgtaataaagatgtgtcttttatatcatgtttgtatggtgtaccccggcttttcctgggacggggattaatacactagcgttcgggaaaaggcaattttcccggtcgcgacagtgacttggcgaccacgatggcgaccttcccgagcgacgacgacgactggaacggcggcggcgcacggctgaagcggcggcggcgacggcggcgctaggctacacggcgctagagctcttccggcgacgagaggcgaaggcgagagtggcggcgggtagaggagacaccggggagccttttaaaggggctaggaggcgacggcaaaggcccacggcggccggcgacgagaaggaaaggtcgggctcggagagagaaaagccgatccgattcgacttcgaatccaacactttccaaaccgatttagccgatgattccaaaggggaaaaggtagaggagatcgagaagatcatttcccctctatcaattcggccggagaaggaaaggatcgaccgaattttggaaggaaacggcggcggcgctcggttagggtttcgggcggcggcggccgaaggaagacgacgactgacaagcgggacccacctgtcagcgacagcgagggcgcgcgcacggctgcggactgggccggattgggccgaggagagagagaaggttttgggccgactttcggcccaaagccaaaagagacttttaaaaacctttttcaatttaaattattcatgaaatgcaattccatttattaaaaatacttccttagctcaaataaatcccagaaaaatctaggaattatagaattaagcaaagtatttaatgaaattttatctggccccattttacattggaatttattaattaaaattagatcttctcttctaggattttttaaaataaattctaaaaattccaattaaacaacaatttatatattttgaatttttagggtgtgacagctgctcctccagctggctgacgtgctcctgactctctctcagctgctccttaagtgtatccatcatcccgtggcgatcgttgtactggtcagataactgctggaactggtcgccgtggacctggagctgtgccttcagtgagtctatctcactaccccaagcctggtgctcctcctctagctgaagctgctacgctgtgaggtcagtcacctcggtctctaactctcccacacgcctctgctggtcgtcaatctctaacagagcctcctcgtaaaagtcgtctactgcctcagcccatcgtaacaatcgggtcactatcgggttgtagcagcaaggtgtgtcctgaactgtgcagacggagttgctctcctctcgatacgggtggtgagcaaactcagtactcgccaactcagctcagtggatagagctaagccggaggaaggcctcccgtgctgcatcctgcatcgcggtctccggtaagtcgcgacgatggcgtgtcgggaagctgtagtctaactctgaagtaactcgcgtgtgaacctcgacccgagcctcccaaacagatccacactgtctcactcggtagatcggaaatctggggtatcgtagacgcctcatcaaccggtgtagctcaatgacgtatccctctgagcggggtacgcccatctcccaggtagcgggtgaatcctgatctgccatctaattttaagaaaaacccaaggtcagttaagagtaaaactcgttttgtgaagaaaatagtttagagtaagatgaaaatcgtacagagttttgtaaacataacgtttttatttttgaaagtattactaaatgggaatttctcccttggccaacttagaaaaaaaaggggtggggcgccttttggtcttttcctacagtcgtatggctctgataccatgtcacatcctgatttttgtttcaggatttataaattatttaataaataaactaataatagaatttatgttaaatgttctttaatttacaagtgaagttaaaagtgggaaataaaatttcctaaatataaagcatggatggatttaatttttattaaattctccatgattaagtcaactctctgaaatattctcggatttttcggagctcaattcctaaatgatacaaagaacagttcagtaattatttgatcaataatgatctaattataattgttaagagcttttcttgtttaaaaatccttaaattataaattgttgtttaaaaggaattattagaaatgattttaaaagcctagatgagaagatctaattttaatttgctaaatctcaatataaaattgggctagataaaattttgttaaatactatgcttaattctataattcctagatttttctgggatttatttgagctaagaaagtatttttaataaatggaattgcatttcatgaataatttaaattgaaaaaggtttttaaaagtcttcttttggctttgggccgaaagccggcccaaaacctctctctttctctttccctcggcccagtccggcccagtccgccgagccgccgctcttctctctctctgccgctgacaggtgggtcctacctatcaggttcgtcttccccgcgccgccgccgccgcccgaaaccctagcgcgagccgccgccgtctgctttccaattccgtcgctcctttccatctccggccgaatcaatagaggggaaatgatcctcgggatctcctctaccttttcccctttggaaacatcggctaaatcggcttggaaagtgttggattcgaagtcgaatcggatcggcttttctctctccgagctcgacctttccttctcgtcgccggaagtcgcctcctagcccctttaaaaggctccccggtgtctcctctacccgccgccaccctcgccttcgcctctcgtcgttcgtagcaccctagcgccgtcaacctcgagccgccgtcgccgccgtcgctccagccgtgcgccgccgccgttccagccgtcgccgtcgctcgggaagaccgccgtcgtggtcgccaagtcgtcgccgtcctcgtccgccgcttcgtcgccgccgaagaccgctggagcaccgtcgccgccgtcaacccgatctccgccgccgcttcttcctcgtcgccggcgctgtccgttgcccttccgccgtggttttggtcaccggtgagttcgccgcgtcgccctctacccgttggtgccctccgttcgcgtcgtcgagccgtcgttcgccggcgagcttgcgctcccgagccgccgccggtgctgacgtcatcgctgacgtcatcgtcgtcgtccgtccgtgagccgcggtggatccgttcgatctcggccgtccgttttggatagggttgatctcggccgtccgttcccgtgaaccgttgccgtgcacccggtccaccgcaaaccctagccgctg

SEQ ID NO: 6545 - DNA, 4816 bp, Oryza sativa
tcaacctgaacttacatgtttaatttagggctacatacggctgaaatcagtttggatagtatatatgcacaatccagacacttcacatatttatagtctagtttttttaatgctcgacatatattagaatgttcacgcccagctagccttccatatccacgtcagctctcgcaggtttggtggtcacttcttctgcacgatctatcatacacacacaagaaaaaattacaaataagcctacaagaaaaatactggggaaataaacggtaaaaataattaattggtgaggattggagccagaagggaagaaaaagatagactagatgttttatgaattcggatagcgaaaattaactgtacataagggtttgcggcgtatgcaagtacatagcggtttgtgtactctatgatagcacggtgaaaaccggaacaaaattaaaatgtgtttacaattgtagctgaactggaggccaacacaggaacccccatatagcaagagatgcttccacagccagtcttccaagaatccctcggccctggccccggacgccctggaccgccgtacgtcgcctgcttcgactcttctatgtcgtcctggttctatatatgcgttaattaatcacatagaagtccctgcaggttctatgcgttaatcacagttcatcaggtcattcaattccttatgagaaaactgatagcctaatgcaatggtgcattcgtacttaaattggtgttagtattagcagaggcaattaatcaccatgttaccatgcagggccgatgctgacatttcggaagccctacgcgaacttgacactatatgggccttaagtagttaaggctaattttttttacttccaatatatattctataaagcacatataccatatatcatatagtaaaattgtaacgtaaattatataacaataaccatgaaaattatagcctaattaacctattttttggagtggaaaaagttattctttcagtgtgagtcgaaattgtgccaaggatttcaattcaaatccgtccttgatccctctcgtcgccataaaaaatcgcctcctcggaattcctcttccaattcaaccttccaaaatctaatttcgaaattcaacctcgtcctttgaactcatcgccaaatacttcttcccatttccgaaagtatcaaattcccctttgaatcccttccttgactcctccttgaacctttgggtgcaaatgcctaattcaaactcgaaatccaaatccaaactccaaaaccctccgaattagttcactcggtaaaagtctattttgcctccctcttggtcgatttggttgtttctcccttgctcggccaactttttccctcagcacgttccttctcacgtgagccgcgtgtgctgccgagagagagaacgcgtctatatctctctctctctctctcctctcgcccgcgctatgtgccgtcgccgcgattcgattttcgccgccgcctttgaaatcccgccaccaccttcgtttccacgcgctgcgcgtcgtggccgaccgtaagcacgcgcctgcgtcacctcgcctgccgcggcgatctccgtgtagctgctcaccaccaaactggccctgccaacttttgccgtcctccatggcccagccgctaaccgccaaagcttggaggcagaggagcttgcctcgtctatcgcatctcctcaaaactggaggagcaaaacccccctttccaccgccctgtcctccctttatccctcccagaatcgacctcctctctctgccccatgtctctctgcgcgcggaggcagagcgccgttgacgccacgcactagctcgtcatcctcgcctcttgaccgcccaaggtcagttctccccctccaaaccgacatcgccacctctataaagcccaagccctcctcattcctcttgtttttcgctcgcctcacacccatagcgccattgccgcccctgccgcatagctgctcgccgccgtcggccattccccagttaattaatgaaagcaataacctatatgtctattattatttctttcttcagtttaaattaatctttgttttgcatatttcccatcaacctgaacttacatgtttagggctacatacggctgaaatcagtttggatagtatatatgcacaatccatacacttcacatatctatagtctagtttttttaatgctcgacgagctctaagcatatatggttcttatcattgtcacgcccggaatttctatccaaaattccaaacgcttacatgtgcgtgaacccttgtccagaaatcagccgaggcacacaataacaaattgataatagagtacaattattactctaattaataagcgaataaaatgtcattacagaggtagatagttcctctcaatcaataaagatctaagcagcggaaaataagataaacggcgcagacgactccactccacaggcagcttgaccagggctacacctaatcctccacaccatcagcttcactgtagaactcttcctctgatgaatgattgcaaggtgagtatatgacatactcagcaagccacgcagcaaatatgcaagtgcacaggataacaaaggatggcatagtagggtttcatttgcataaacaacatttaataaacatttcagcatttaataaaacagttaagtattaattaaacagtattaatccaacgctatacaacataccctgttgcataggcccaaccattctgaacaaccatcccggctgcacagttctatctccaaaccaggaatataccattccaaaccaggagctaatcaaattattaccaattatagcatctgttattatgatgagaggtgtgaaactaatcacgaaagacattgttcgacccgcccataaccgcgggcacggctattcgaatagttttactctgattagaggtgtaccactgtacccacaagacacagccccacatcatgtcaccatgtgcctcaataccaccacggtacctcggaaaggagctatgacaataccccttgcataacacaatccaccacagcgcaccattcctggatcataatcacccccttataaacaaggcatggactccccagcgacccccgtgggcttatctccgtcacttctcagtctggtgtcccgcaataaaccatgctatacaaaaggtaaagccgttgcccacgctggcttgtggttggcacgattaatgtttcacaaccgaaactcgtgaaccggtacttaattgtcatgagcacaactctcaaaaccatgtgcccacaacccaccattatcaagttttagttggcaagtaattaattaaccaatcacgattgaccatcgtgaactatcattaagccatcattaaataatagtgaatcataagttatcccaatagtgtgctaatgtttctaggcatgactaagcaattatatctaatatctagctgaaccaatatataaagcccaactagtcaagttataataacccaaggtatcaaggaataaagtaatcaagaacaaaagggctataacaaacaataggttaattccacccaatgacattcgaaaataaatgcaattgttgaataaaaacaatagctttaaacgggatcaacatgctcaaagggttgtttgggatctgtgtgacttgccttgctggccttggaactcttcaaattcttctcctgcgaaaacggactctccggaaacgtcggaatctaagcagaaaagagcaaaaacaccaaaacaacacataaacaagaatgaacagtacatgtggatatttttaacatgtagatctcaattttagaaaaatttagagacttgaaccaactaaatccgagctaagatgaattagttatgaatttttaaagattaaatcggattaaaacacttatatggattttaattgaattatgacgcaataatgaattatttttgaaaaggaaaaggggtttattgcgtcagcggctagggtttgcggtagaccgggcgcacgcagcggtccacgggaacggacggccaagatcgatcttatccaaaacggacggccgagatcgaccggtccacggccggaccacgagggacgacgacgatgacgtcagcgacgacgtcaccaccggcggcggctcgggcggcgcaagcccgccggcgaacgacggcgcttcggcacgaacggagggcaccaggacgtagagggcgacgcggcgaactcaccggtgaccaaaacggcggcggaagatcaacggacgacgacggcgacgaggaagaagcggcggcgctcttcggcttgacgacggcgacggtgctccggcggacagcaatgacggcgaaggggcggacgaggacgcggcgacttggcgaccacgatggcgaccttcccgagcgacgacgacgactggaacggcggcggcgcacggctgaagcggcggcggcaacagcggcgctaggctacacggcgctagagctcttccggcgacgagaggcgaaggcgagagtggcggcgggtagaggagacaccggggagccttttaaaggggctaggaggcgacggcaaaggcccacggcggccggcgacgagaaggaaaggtcgggctcggagagagaaaagccgatccgattcgacttcgaatccaacactttccaaaccaatttaaccgatgattccaaaggggaaaaggtagaggagatcgagaagatcatttcccctctatcaattcggccggagaaggaaaggatcgaccgaattttggaaggaaacggcggcggcgctcggttagggtttcgggcggcggcggccgaaggaagacgacgactga

SEQ ID NO: 6546 - DNA, 18363 bp, Oryza sativa
tacttccttagctcaaataaatcccagaaaaatctaggaattatagaattaagcaaagtatttaatgaaattttatctggccccattttacattggaatttattaattaaaattagatcttctcttctaggcttttttaaaataaattctaaaaattccaattaaacaacaatttatatattttgaatttttagggtgtgacaaacctaccccccttaaacagaatctcgtcctcgagattcggaagaactagcgaacagatgcggatgagctgacttcaattcatcttctcgttcccaagttgattcttcttccgagtgattactccattggactttgcaaaaacggataactcaatttctggtttttctctcatctatttccaaaatacgggttggtctctcaacataggtcagatcctcttggacttctatctgttcaagattagcttcttcggtaggtacccttaaacactttttcagttgcgacacatggaacacattatggactcctgccaaagattgaggtaactccaactgataagcaacctctcctcttctactgacaatcttataaggtcccacaaaacgcggtgccaattttcctttggtgtgaaaacgatgaacacctcgaataggcgtgacacgaaggtacacataatctccttcttcaaaactcaaatctcgacggcgattgtcggcataactcttatgacgagactgagccactcgcaatctttcttgaatgattttcaccttttcttctgcttccctcaggatatccgtcccgaaaacctgatgttctcccgtttgatcccacaaaagcggagtgcggcacttccgaccatacagtgcttcgtacggagccatctgaagactagcttgataactgttgttgtacgaaaattctgcataaggtaaattcttatcccaacttccaccgaagtctaaagcacaagctctcaacatgtcttccaaaatctgattcaccctttcggtttgtccgtctgtctgcggatgataagcagtactaaagttcagtttagaacccatctcttcctgaagcttcttccaaaaatttgaagtaaactgactgcctcgatcagacactattttcttagggacgccatgcaaacacacaatccttgccatatacaattccgccaaccgacttccagaatatgttgtctttactgggatgaaatgagccactttggtaagtctgtcgactatcacccaaatagagtcatggcccgatgacgttctgggtaaaccagtgatgaaatccataccgatttcctcccatttccattcaggaatcttcaaaggctacagcaaatcggcgggtttctgatgttctgccttgactcgctgacaaacatcacatactgctacgtattctgcgatttcacgtttcatatttgcccaccaaaatctttccttgagatcctggtacattttggtactaccagggtgaatggagtataaggtatcatgagcttctttcagaattgcatcttttaaatctttgttgtcggggacgcagattctctcacccaaccatacagttccttgctcatcctccaagaaaccgatagcctttcctcttctcatattcttcttgatttcttgaatatcaggatcattaatttgggcttctctaacttgatcaattagagtgggcttcgcttctaagactgcaacaaaacctctactgacaattcccaaatttaatctttcaaattccttgcataactccaacggcaactgtcgtccttccgtagcattgcaatagcctttcctgctaagagcgtctgctacaacattagccttccctgggtgataatgaattcccatgtcataatctttaattaattccaaccatctccgttgtctcatgttcagatccggctgagtaaagatatattttaaactcttatgatcggtatacacctctatacgagtaccgaaaagataatgacgccaaattttcaacgcatgaaccactgcagctaactcaagatcatgagtagggtagttcttctcatgcggacgtatctgacgagatgcataggcaaccaccttcccatcttgcatcagaacacaacctaacccaagtttggatgcatcgcaatacacttggaaacccttctttggatcaggcaaaatcaaaataggagcggatattaagcgattcttcaactcttggaaactctgctcacattcttctgaccacttgtacttcacatctttctgaagcagccgtgtcatgggcttagcaatcttgaaaaaattatctataaacctccgataatatcctgtgaagcctaggaaactgcgaatctctgaaactgtctttggttgtttccaattggttacggattccacattactaggatcaacggcaactcctcctgctgagatgatgtgaccaaggaactttacttcagacaaccaaaattcacacttgctaaacttggcataaaattgatgctctcgtagcttctctagtgcaaggcgaagatgttcttcatgctcttctttggttcgggagtagataagaatgtcatcaataaagaccaccacgaacttgtctaggtattccataaacaccttattcatcaagttcatgaagaaagcggaggcattggtaagtccaaaagacataacagtacattcgaacaatccatacctagtggtaaaagctgtcttaggtatatcttcctctttgattctcaactggtgataccctgatcgaagatctatcttggagaaaacggtggcacctttgtcacgcccagaaatttagcccaaatttccagactattttgtgtattaaatccctgtccaggaccagccagggtacacaaaacgacaagtaatatacagttccaaacgtaaataaagcgtaaaatacttacaaaagaggcacttagtcctcgcaccgaaacgaaaacagcagcagcggaaaaaggcgatcctagcggggcttcagctccactccacaggcaaaactcaactggggtctgagccttggtcctctaacttcgtcttcagctcagaagcactacacttctgaaaagggggaataatagcaagactgagtacaaccaccgtactcagcaagccacaccaacgatgcagacgtgcaaggggatacaaggatggtttgtggctatttgcataaaggcggttgtaaaacattttattgagcaaaacagtaaaacagttgagtaaataaagtaacattaaatctccactgatcaacgctacaccacgttgaacaggcccaaccaacccacctaaactacagtgtattgggtcgatttattaaggtgggactaatcacggtgaatctggtcgaccgcccataaccgcgggcacggctattcgaatagttttactctgatcagaggtgtacaactgtacccacaagacacagccccacgacacgtttccgtgcgccgacatgccaccacgacataccggaaagaggccgtgacaggacccttcgcataaccccctctaaccgatcgcaccacaccttagggttcgcccccgtccccagcaggcaacgggcagcccccctttcgtgccgcggtgaatccggaagccgatcaaccggacaccccggccgacccaactccatcacgcccaccctcgcctgggtacgtcggctagagaaaagctacactacaagcccagccgttgcccacgctggcttgtggtaagtacgataagttcttccagggcatcccgcgaaccggtccttaattgccatgggtgcgaccagcaaaaccatgcacccacagcccaccattcagttgcattttagttggataattacgaccatgaagcatggccagatgtctcgagcacgcagctcaatctgatactagaaaggtctaatattgcaattatcccatcaactgagctagtggtaattaagcatggctaagcatatagttctagctaggtcacataagtaacacaagctagtcgattgattacccaaggttgacaaagaacagatatcaagtaaacatggcacaagcgagcagataggtaataccctgaccccatgtaattagcaaaacatgcatatttatttgtaaacggtaaaacatttataaattgggatcaacatgctcaaggggaatgtgtgacttgccttgcttcttcactttgatcttccgaactcttttcctcgcgaccgcggacttccgaaacgacggaaactacacgctggcacgcaaaacgaggaaaaactctaataaagaccaagcaaacagtacataaaaagtaaacaaacatgtagagctcaattttagatgaattttgcaagttgaatggctcaattcggagttcgaatgaattagatatgaattttagaaggttttgagccattttaatgaatttctagaattagtaccgatttattgcgcaatttaaatcaattatgacgtcatccgacggggaagaggtggcgccggcaagcgggccccacctgtcggtgactcacgggtggcgggcgcaccgtggaccgagtccacgcacgcgctggtccgcgggcgcaccatgtggcagacacgtggcggccacgacggacggctagcagaggtggcgccgacgtggcgccacagaggcaccgacgcgggcggcacgggaaggccacgtggacggcccagatcgccccgaagggggatcgggcggccacgggcgagcgggagccggctcaccggtcggccggccgggagcgacggcgcacggcccgatggtcgccggcgacgaccaccggcgcgacggcacgcgcgggaggcgacgaaaagaggggaaagggagaggagatggagggggtcctcaccgaggggcgccggcgacggagggagcggcggcgcatgcgagggaggcgcggcaaagggaaccgatcggcccgggcgagcagggcagcggcagccggccggtcgagcacacggcacggcggcgacgcacgcacggaaacggcagcgcacggcgctaggagggagaggaggaggaaaccggggtgctcaccacggggcgacgccggagagaggcagccgacggagggaggcgagatggcggcagcgcgagagaggtggtgcgcgaggcggcgattttccggaggcggagaggggagatggagtaggggccggggtagagcttggcacgacgttgccgacggcgcaagcggtgaggtgcggcgacgactaacgcggcggcagcggccggctgaaggcggcgtgtggcggtagtggctcggcctcgcgatgggaaggtggttccggcggtggaggagggagatggagtggatgccggggtgcggcggggtgccgtgatgctataggtggcggcggcgcagcgcggcagcgacgggagcggcggtggcgggcggctggagatcgctggcgagcggcggcgaaggggatcggcgtggagagctcggtagagggcgcggcggcttggggaaaattggggaaatggatgaggggaggccggggattgtttttatagcctcgagagtcgacggggaggccggttggcgacggatttgaagggggaaagggcgccggcgacgtgggtgagtgggggcagtttggcgccggttttggaggggagaagtgggggaaatggtggaggaaggggatgacgtggggtggaccgcgcccacaagcgcgcgggaaccggaagacgcgcggggaggggcggcgacgtgggcggctcgggcggccatggcagttgccggcccgggctggaggttggggatgaccccgacaggtggggcccacctgtcggtggctcgggggaaaggagagaggaggagacggttggggggggacgatgacaggtggggcctcgggtcccacctgtcggagagagagggagggagaggccggctggggaggcaaagtagacttcggggaggagagaaccgagcggcgagctgggccgagggagagagagagcccgagagggggagggggaggaatttgggccgagcccgaaagcaaggaaggggaaaattattttcttttctttttattctaattggttaaatgaactttgtgctattaaatttacttcttgagctccgaaaattcacgggaaaatccggagagtattttagggcacaaagaatattgcaaaatattcccggccaatgatttttaagggaaaattttaattctcccattatttcacttgattaaattgattaactttttattcaatttctaggaaatgcatcattaaatgatttttattcccgaacgaaaatcggggcgttacaacctttaagctgatcaaacaaatcatcaattctgggcagcggatacttattcttgatagtcacatcatttagtgcacgatagtccacacacatcctctgggtatgatctttcttttccacaaaaataaccggagctccccatggagatgaactcggtctgatgtatcctttctgaagcaaatcgtctacttgcctcttgacttctgccaactcattggctgccattctataaggtctcttatggatcggagttgttcctggtaccaaatctattctgaactctatatcccttttaggcggcataccaggtaaatcgtctgggaacacatcaggatactcccgaactataggaatctcttccaaagttatttggttcagtcttgaccttaaagactcagaagacaatgcatgaacagttacaactcgaccaccattactggtgagagttacttttctgttagcacagtctatcacacctttatgtctggctaaccagtccatccctaggatgacatcaaggtctttggattctaacaggataagattggccagaaacggtactcctttaatttctattctgacagaggggctacgttgcaaagagagtgcttgattacttggggtactaaccatcataggacgtctaagatcttctacttccatcccatgatttcccgcaaaactcatagataagaatgaatgtgtagcaccagaatcgaaaagcactgttgcaggaactgagttaacaagaaacgtacccaaaatcacatctggagcatcttgagcttctgcagcagcaacatgattgacacgggcctttgatgcgggtacggtagagttgctctggacagggacaaccttcacgcgtcggggcttcggacacttgtcagcataatgtcctggttctccacagttgaaacacaccacgagcttgctgccttgctccttcttggcaggttgtggagcttgattgcggatgttgttgccagcattgttgttgaagaactgacgctgcggatgaacaacagacgaagaacctccctgtggcatggactggggtcctaaagtaagacgcggcctctgattattcccctgttgtgtcttgaattgagcaatccggcgtttcttctgctccatgcggttgtacttgtcctcctgacgaatagccttatccactaacttctggaaatcaggataatcccgagtcatgagtgggtaagaaagctcatcattaagtccttccaagaacttctcctggcgctcttcatcattgcgcacatcttccggagcataacgagccagacgattgaactcgtgcagatactccgtaacagagcgagatccctgggtgagcgacctgaattccttcttcttgagagacactactcccgatggtatatgcgtcttccggaaagcagcggtgaattcaagccaagtgataggttcagcagtagtcctattaaggcggaagtgatctcaccactcagaggcagggccatgcagctggtgtgatgcaaatgagacattctcctgatcagtgcactgaagcaaatccaacttcttctctatggcgtgcaaccaatcaccagcttcaacaggattagtggtgctagagaaagtgggcggcctcacacgaagaaattctgctaacttgttctgcggcggtggagcattgttgttcccttggttgagctggttctgctggttctggagttgctgcatcatcatgttcataagctgtgtctgttgagccagaacctgggcaagtgtgggattctctccattgttgttgttattgttattgttggggccattcccgttgctgcgagtgagcaccatctggcagggacaagagcacaagaagagaaaccggggaaaactacttaggacagagaattaatataacttttattgatcttaagtgagtttcattattacaaactgaagactctcaccccactaaactcaccaagtacctaacactcgaaagcaaacaaacgcatgcacttacatcccaccactgatgtaaatcacatgcgagacacacacagccaaacttaaaataagcaaactaacacaacgatctaagacaacggtttgacaaggcattctagttctttcgggcatcggagttgattgaaggctcgttcagctcgtcttcatcatcttgagttgctccccactcaatcttggaatgggtgtgcttggattcttcttcatcatcacttatgttgatgaccggaggatctgctagggctggggtaacttctttctccaccacacagacctttggcgccaattggtagcgagggacaaatagagctctcttccttgcggtaagacgaattctggccttctgcggtggtgcttctccctttaacgcggctagttccttctccaaacgatccaccttgtcctctagcttgcaaatcttaccacgattccggtcttcacgatcttgagctgctaacacagtctccgcacgggtttcatccatagcccacagcatctcaaccaaatgccttgtggtagcatcattctcaattccctcagtctcaaggtaactgccacggtcacttccctgtggttggcgaggatggtaacgatactcagtgtcggccaactgatcactatagcgatcacgaagctctcctatggtgatccttgccacctcctgacatacatggatgtagtttcttcctccagcttcgaacatcactgaggggatatcttcactattactgttcaaggtgactttgactcggcacttctcttcatgacgatcatgaggaatctgggcataaaaaggagcagtcccaaatcctatgacaaaggacatcgtacgcaactcctggacaaatccctcaacaccaaacaagtactcaggcttgtagcgcggcatctaaagacaagtgaaaggagggagttaagacatttatccaattaatagcacaactttttggattaatttgcataaagtttagaaaatcaaagtaaaagggtaagccaaacttgcaggataagttgaaacagttggaaacaaggtcacaaattttgtacttttgaataacaggtttcaaaagaaaataaaagaaagttataaaattaacatgctaaatttattttattgtagcaagattaaataaaacaatattgtaaaacttttgctggtaaatgagccattagtacagtaataaatgtacagtactaataacgctagaataaattttgaatgagaaccattaaaagagattatgacgtgcatgtgccattagtttggtttaattaaaagagaaggagaggagaacagttctacttttccaatatttttagagggcttctatgggtaaccatttggcataacctagggtcaagggggctctgataccaacttgtcacgcccggaatttctatccaaaattccaaacgcttacatgtgtgtgaaccctcgtccaggaatcagccgaggcacacaataacaaattgataatagagtacaattattactctaattaataagcgaataaaatgtcattacagaggtagatagttcctctcaatcaataaagatctaagcagtggaaaataagataaacggcgcagacggctccactccacaggcagcttgaccagggctatactgtcgcgtcccaaaacgactctaaaattcatcctcgaaattgtgcaaagaataattaaaattcatgtgaaagcctccaacaattaaaatgtgcaaagataaaagtcaaatgaggcttggaggatttttgtatatttcctaaaagcctaaaatgtgtaaataaattttagtggaattttcagagcacaaataataattgaaaagaaataaacaaagttaaaagggttttataaaaagaaaaatccctaaaagtcttttccccctccccttttcccttcttgggccggctcggcccagtccctccctctctctctctcttcccccgcggcccattggcctcccccgcgcgcgcgcgccgctgacaggcgggcccgcccgccgccctcgctgacgggtgggtcccacctgtcatccctgtcctcgcgccgcgcccgccgccgcccgtgccctagcgccgccgccgccgcggattccgccgcatcccgccgtccccgcgcgcattaaagagggggaaatcactccccgtgattccctctcccgtttccccctcttttccctctctctctccctcggattcgtccgatttgaatcccgcaatcgtcgccggcgtcttcaatggagccgagatctccgcggccgattcctccctctccggccgcgctctccccctcccggcgctatatatttgctccccgtgccttcctcctccgtttccgccgttcgccgcttgctctcgccgtcggattcgtgctcgcgacgtccacctctctctccgccgtcgccgccgacctccggtacgccgccgacgtcgctccgggctccctcccgactcggcgtcacctccatccgcttcgccgcgtcgtcgtccaccccgtccgccccttcgcttcgcccgccgaccgccggagctccgtcgccctcgtcatcccgaaccgcgccgccgtcttcctccgcttcggtcgccgttgccgtcgccgccgtcgacccggggtgagccgaaggccgtcgcttcgcttccctcttctctcctctctctcgggcgccgctccgccgcgccggtggtcgccggcggtgaccatcggggcgcgggtgcgccgcctcccgtcggccgtgccggcgaggccgccttcgggcgcgccccgcggctgccaggtggggcccggccgtcagccgcccgcgcccgcgggtgcggctgacgcgtgggacccacggcgccgaccgccgccagccgcgtgctcccggtccaccgtggaccgagaggctgacgcgtgggccccgctcccgtggacccggtccgcgcgccctctctctcggctgacgcaataaatgagatttttaattaaaatttaaatgaagaaattcgcaaatatgcatttaaagagcatataaacttcaaatggccatatcttggccatttgaactcggaattggaccgttcaagtctctaatttttccttatgaagtcaagaacccatttttgtgctttatttctgctgttatatggagttatttagtgtttaagccttttcttttccgttggtcgtgtagacgctgcagcttcggaagatccgctcttcgtggaagttgaagccgtctgttgggaaagcgagcaaggcaagacacatcatcttgatcatattgaatcccagtttataaaattatgttgatttaaattattgcattatcgctttatttaaattcccgcgttatcactgttttatttagccatgcctatttacctttgttatgaccatattattattgttattgctattattattaccttgttcaccctagacaaacaaaacctcaactagtggacactctactcatagtaccacttgtataattgtaggtagatgcttcgcaatttaattaggcaacattaggtggttttataactttagacttgggaaactctcatatcacctggacactctggaattgttggtttgttgtggaattggcttcacaccgctccctctattcaaaagtccccaaaatggttttaggctgggctcgaggtgcatggttttgatagtagcacctcggccgtttaaggaccggtcttcgggcctctgttgcaaagcactaccgtacttccacatgtctagtgggtaaggcttagtttgtggctcagtctagtcataaacaaaagtacacggattggagatggatgaagtcgggggtcgatggacattctccagggcaaatgaaggctacacgagctgcggcccggtagtcgagatgtcatggcagagggttggtgccctgctgctaggggctcagtcctgcctgcctgtcccgggggttccggccgtaggcgggattgggtcggtactcttgtctatggctaggatgggttggaaactatgtcacgtcttccgtccgtataccgtggtggtatgtggcacgtggttacacgtgaggaagatgtgtcttgtgggtaaagatgtacacctctaatcagagtataatctattcgaatagccgcgccctcggttatgggcaagccgagcaatgtacccaagttagtgttttaattcttaaaacctgcttaacaactaaaatgtggaatggttggcctgggttggcttgggacgagctgggacccagggtcgggttgccagttcggtctgaatcatcgtaggccttgggttaaggcaggttcgtgtgggttcacggccttgattaataacattgtatagttctaggatcgcgtttacaaaagagctttgagcaactaaatgtctttaaatgctgattactgcaaccctaaccctttatattataactcccttgtactcccttgcatttattctgcatttgtgggtgtgtcttgttgagtacggtggttgtactcagtcttgctcaatttttttccaagtccagaagaggagttccttgaagatgaaggcttcggtgtctagctcgtgcctgccgtcaagcgcctgtggtcgtcgccctagtcttccgctgtttctcgtttgtctttgtgtgtgctgggccttcgtcgcccatgtaataattttatttacgcttccgctcgttaaactctgaattgtatcaacttttggtgtaccttgcctcctgggacaaggattaatgcacgcacgtcaggaacgcccgttgggttatttccggtcgtgacaagttggtatcagagccacccttgaccctaggacgagccgtagatcccaagccttagtaatattttcaaaaataaaaatcctttgctatttgtgaaaacagtctagtctctctctgtcttgctgcttcatttaccatcaaaatctgaccataaaaaaaatgttgatttcctttttgtttttgtttgtagatggccggcagcgtcacccgtcgtggtttggacatgactggcttcgttttggagctgcggggcatgtgcgtggtcttggggtatccacatggagtggattaccaggccaggccgctcccggagcaggagggtgaggatgcagagccccacgctggttgggaggtcactgcagtgatcctctctggctctcccgggcggacttcgctggcagtcaccgcgggtggagattccttccccgccgcttgccagaacgccgctctcctcgccatcggcacccttcaccagcgctacccggacgagttgcagcactcgccctaccgctaccaccctcgtcgcggaggagcccgcgacttcgccaccttccgagatgctagctcggaggatgacgctaccatcgtgcacctggcacgcatggtggaggcatacgacgcagctcgtatcgacttccatcagatggtgcgccgtgggatggtcgagaataacatgaagatcctggagctgcggcaggagaacctgcagctcaagaaggacctcgacgcagtggaggcgcagctgcaccagctcaagatcgcccagggagaggactgccgccccaagcgtcgccgcgtctgccgcagccagaagatcaccgcccgcaagagcacctccaggcctgagcttgttcgtcagtccctggcgtggacttgcttcgtcgagacccctcgtgtcgagcctgtgcccgtggttccccaggagggggaagcctccggcgttggtagcacggaggatgcgccgttgctcaccttccgccctggcccgtcgcagcagtagacgagtagttagtaggcttgcgtgtgtgtttttcctcgtttgtcttcttgagttgtgtggggcatggttatgccggtgtgtggcataactgtgtcggagcctgtcttattttatttgcctaagcaacttgaaccttaatgaaccaattcaatagcagtaataaattcaagaattatagtagtcgtgggtggttagttttaattgttagctctctctgtttgctggttctgtgtggggttttcagatggtgacgaccagaagaaatgttaacaccggtgatggcaaccaacccgaaggcagcaaccacaaccaccaaggcaatccacctccacctcctcctccgcctccaccaccaccaccagacaccaacgccattctcacccagatcctcgcccagcaagccaacatgatgactgctttcctccaccacctccaaaatccgtcacaacagaacgctccaccaccacctccacaacactctaaactcgccgagttcctccgcatccgcccacccaccttctctagctccaacaaccccgtggatgcgttggattggttgcatgccgtggggaaaaagttagacacggtgcagtgcagtgatgaagagaaagtcatcttcgccgcccaccaactgcaggggcccgcatctttatggtgggaccacttccaagctacgcagccagaggggcaacctatcacttgggctcgcttcaccgccgctttccggagaacccatgtgcccgccggagtcgtggctcttaagaagagggagttccgagagttgaagcaaggcaaccgctccgtgatggagtatttgcatgagttcaacaatctggcccggtacgctccggaggatgtgcgggaagatgaggagaagcaagagaagttcttggcgggaatggaccctgaactgtccgttcgtctagtttctggggactacccggacttccaacgtctggtggacaagagcatccgcttggaggccaagcacaaggaactggagtcgcacaagcgccgcttggcgagtttccgcaatcaacagggtgctaaccaaagggtccgctacaccaatccctatccagggggatcctcctcacagcagcaacaacagcagcagcaacctcgctccgcgcctcgacctcaattcgtggtgcgcgtcccacagccgcagcagcagcagaatcaacaagggactcgtgcgccccgtcctcctacgccggctgtgcagcccgttcaaggccgcagggacgctcaaggtccgcagcgtctgtgcttcaactgctttgagcccgggcactttgcggataaatgcccaaagccaaggcgtcagcaaggccaagcgcctccccgccccaacaacggtggcaaggacgtcattcggggtcgtgtgaaccacgtgacggccgaggacgtgctgacaactccaaacgtcattgttggtacgttcctcattcattccatccctgctactattctgttcgactctggagcttcccactcatttatatctgtgccattcgtggggaaaaatcagttgggggtagaaaggcttagaaaaccctctgctcatcaccacccctggaggggttatgacagcaaagtattatagccctgccgttcctatagaaattcaggggattccttttccctcggatctgattctgctaaataccaacaacttggatgtgtgtcgcgaccgggaaaattgccttttcccgaacgctagtgtattaatccccgtcccaggaaaagccggggtacaccatacaaacatgatataaaagacacatatttattatatcgataatatttacattattacaaaggcacttaaggcctgacaatcaaaaataaacagcagcggactagcgggcctacggctccatcttcacaggcgctcaactggggtataagccaggactccacctaagacatcttctccaaagcttctcttactgaagaggggaaagattgagcaagaatgagtacaaccacagtactcagcaagtcacaccggcagatgcatgattaatgcaagggggtacaaggggtaatgatataggggttaagttttgcagtaaacagcatttaaaagttacttagttgcccaaagccattttataaagacgatcctagagctacacagtattattaaacaaggccgtgaaccctcacgaacctgccttaacccaaggcctacgatgattcagaccgaactggcaacccgaccctgggttccagctcgtcccaagccaacccaggccaaccattccacattttagttgttgagcaaattttaagaatttgaaacactgacttgggtacattgctcggcttgcccataaccgagggcgcggctattcgaatagattatactctgatcagaggtgtacatctttacccacaagacacatcttcctcacgtgtaaccacgtgccacataccaccacggtatacggacggaagacgtgacatagtttccaacccatcctagccatagacaagagtaccgacccaatcccgcctacggccggaacccccgggacaggcaggcaagactgagcccctagcagcagggcaccaaccctctgcctatgacatctcgactaccgggccgcagctcgtgtagccttcatttgccctggagaatgtccatcgacccccgacttcatccatctccaatccgtgtacttttgtttatgactagactgagccacaaactaagccttacccactagacatgtggaagtacggtagtgctttgcaacagaggcccaagcttaatccttatagtacccgaggtacgactaacaaaacccaaccacgcacctcgagcccagcctaaaccattatgggggttttgaaaagagggggaggtgtgtgtccaattccaacataagccaaccattccatagtgtccaaatgatatgagaattcccaaagtctaaagttataaaaccacctaatgttgcctaattaatcagcgaagcatctacctaaatttatactagtggaaccatgaatataatgtccactagttggggttttgtttattctagggtgaacaaggtaataataacaataacaataataataaggtcataacaaaggtaaataggtatggctagataaaacagtgataacgcgggaatttaaataaagcgataatgcaataatttaaattaaaaataattttgtaaactgggattcaatatgctcaaggatgatgtgacttgccttgctcagagagaacggccttccgaaccttcggcgacgaccgcgaaccacgcttcgggaacctccggaacgacagaagctacgcgaagcacacaagcaaagctacaagcctataaagaagcaataacaacacataaaaagaaagcacagggttctttaggttataacaaacattaggagacttgaacgggtcgattcagagttcgtatgaccaagatatgatcatccgaggtttaatgctgttatatggagatttgcggattattgtaatcaagctttgcaattataaaacatgtgtaagcgctagcctggaaaggacaggaaggctgcgccgttgacatgcggaccccacatgtcaacctaaaggaccacggtagaccgggtacacagagacggtccacgggtcgacggaagcggaccccgtgtgtcaaccgaagcgagtggccgacaaacggactccactagacaccacacgggttgcacacgtggaaaccacgcggctaccaagcgggcacactaacacggacactacacggtcaccacccgcacacgtgaacgactaccgacaccggtacacgggtaccggggtcgacgaccgcacaacgggtacggggcgacgccgaaaggacgagggcggggaagcgagaggacggatccttaccaccacgcgacgaggcgtgggaacgacaacgacgaacgggcgcggcggagacagacgggcacaacggagacgaacggcgaggggacggcttcggcggcgatccttggacgaaggcgagacgcggccggcacggggcttgacgacgcggagccgagggcggagactaggacggggctgcagcggctcgcttgacgaacgcggacgacggacgagaacggctcgacggagggacgaacgccacgacgaccgggaacgacgagaggacgacgacgacgacgacgaccgggaccggcgaggaggcgacgaggacagccggcagcggctgcacggggacgaggacgacgaggaccacgccgctacgatgccgac

SEQ ID NO: 6547 - DNA, 5828 bp, Oryza sativa
tactatgaactcatacaatccatagcgtgttgaaaacgcggtcttgggtatatccccggtcctaattttcaactgatggtatcctgatcgaaggtcaatcttagagaacaccttcgctcctttgagatgattaaaaagatcatcatccgtggtagtggatacttgttcttgatagttacttcgttcagtgagcggtagtccacacacattctcatgctaccatccttcttcttaacaaataacactggggctccccaaggtgacgaactaggacgtacaaatcccttttcttgcaactctctgatttgctttttgagctcctccaactcattgactggcatccgatatggtctcttggatatgggggcagttccgggtatcaggtcaataatgaactctatgtcatgatctggtggcatcccaggtaaatcttctggaaacacatcgggaaatcgttgcactacaggcattcctttcatgggtagcatggtaaatatgcctccggcacgttcggttagtctagtatcttgatccatggttgctctcatatccgatccccaaggtgtggtcagggtaacttctctacgtctacagacgattactcccctattctttgataaccaatccatacctaatataacatcaagggtctgtggtaccaagaccataaggttggagggaaataccacatccctaaggcgaaatggtacgtcaatgcaagctgtgtccatggctatttcacccccaggtgaatgtactaacattggttgccttagtttaactctggtcaaattgtgtcgttggcttgctttcaaagataaaaatgaatgcgatgctcctgaatcgaagagaactttaattggagtggagttgatagaaaacgtacccatcagtacgcccttgtcttcctgtgcctcttcagctcgaacgtggttaacttgcccgcggccaaatcctggtcctgttagtctgcggagtcctgaatagacctcgtccagcagcaagggtagtagtcccgtgaatagccgttgcattagctccggtgcgaatgggtgtcttgtttggatgaggacatttgttggcgaaatgcctgtactctccacagttgaaacagcttcctggcctcactgatccagtagcgacctgattcggtgcaggagctcggttcttaatggtaaccggcctgtggatgttgcttggtgcggtaggacgattggttgttaccaccgttggtttccatcctgatgcggtagctccgttaggacgctggggtgcgacctgaggcgagcggttcatggcaagcctcctcttacgattatgctccacaaccttccggtcgttctccagcctaacgaccttattgattagactctagaaactatcatggtcctgtccaatcatgggcccacgcaactcatcgttcaggccttcgataaacttatcgatcttttcctcctcgtcggctaggtctccagttgcgtaacacgccagttgagtgagacggtttaggtactcttgtatagtggtgttcccttgtcgtatcctcctgaattcattcttctttattcgcatcacggcggcaggcacgaagttgtcacggaaggccgtagtgaactcctcccagtttggttctccagcatcttcttctcgggcttctttgtaagtgtcccaccagtctccggctggtccttccagttggtttgctgcgaagatcactttatcggcttcacgtactcgaacaagggtcagcttcttctcaataatccttaaccaatcctcggcatccatacgttcttcagctgtggcgaacgtgggtggcttggtcctcataaactctccaaagcttgatcctccgcggttgccttggttgtttacaatggcttgtagaagttgggtttgagtggccataactccggccagggtggttaggtcaggtgtctgagtttcttcattgctggttgacgcccgacgttggcttgccatctgtgtagaccgattaagtaagtatcctaattttctaactagctcttatggttttatcccattaagggagttgttttgatgtgaactttgttttgcaagcatggtggaataaactcatttttaagacaacagcaataatattatagataacatcacagatttccacacatagtacataaatcatgatgcaattgactgcatacatacgcagtcaaataaggttcatccaaaagacacatcgaactaaccatcaaactactcgtcaatctaggtaagggggggtgtgtctcgcatactatcaaaaaccatctgaagcgagatcgaagctgcaacaatcctccagtctagtcatccaaccatccgcaggatcctggggcaggtagagggtggtcgcgggcacaggcaaacctgagtccccatggctcggaagtagtggcctctggatctggcttgggcttcttgcccgggggtcgggtgctcttgtgggcagtgctgagggtgcgagggccaccgaggaaggtgatgtggggaacaggggtctcatcctctgaagaatcagtgatgtctggcttgatctctggctcagtgtcggtcccctctgtctcggagtcgacctggatcgaagtctctaaactggaacccagctgcggagaaggtgtagagatcagtggagtgtgcagaatctccggggcaggtggctgtgtcactgtctggtccaccaagtaaggtgctgactcagtagccagcataccaacctctcccaaaagagcgtggaacgctggtgggtacggcggggtgagaaaaaagtagcttacatgtggctgctgaccgtggctgctcgaagctactgtcacgcccggaatttctatccaaaattccaaacgcttacatgtgtgtgaaccctcgtccaggaatcagccgaggcacacaataacaaattgataatagagtacaattattactctaattaataagcgaataaaatgtcattacagaggtagatagttcctctcaatcaataaagatctaagcagtggaaaataagataaacggcgcagacggctccactccacaggcagcttgaccagggctatacctaatccaccacaccatcagcatcattgtagaactcttcctctgatgaatgattgcaaggtgactatatgacatactcagcaagccacgcagcaaatatgcaagtgcacaaggataccaaaggatggcatagtagggtttcatttgaaaaagcagcatttagcaaacatttaagaatttaataaaacagttaagtaataattaaacaatattaatccaacgctatacaacatactctgttgcataggcccaaccattctgaacaaccatcccggctgcacagttgtatctccaaaccaggaatataccattccaaaccaggagctaaacaaattatttccagttatagcatcttctattatgatgagaggtgtgagactaatcacgaaagacattgttagacccgcccataaccgtgggcacggctattcgaatagttttgctctgatcagaggtgtaccactgtacccacaagacacagccccacatcatgtcaccatgtgcctcaataccaccacggtacctcggaaaggagctgtgacaatacccctcgcacaacacaatccactacagcgcacctttcctggatcataatcacccccttataaacaaggcatggactccccagcgacccccgtgggcttatctccgccacttctcagtctggtgccccgcaatgaaccatgctatacaaaaggtaaagctgttgcccacgctggcttgtggttggcacggttaatgtttcacaaccgaaactcgtgaaccggtccttaattgtcatgagcacgaccatcaaaaccatgtgctcacaacccaccattatcaagttttagttggcaaataattaattaaccaatcacgattgaccatcgtgaactatcattaagccatcattaaataatagtgagtcataagttatcccaatagtgtgctaatgtttctaagcatggctaagcaattatatctaatatctagctgaaccaatatatataaagctcaattagtccaattataatcacccaaggtatcaaggaataaagtaatcaagtacaaaagggccataacaaagaataggttaattccacccaatgacattcgaaaatagatgcaatagttgaatagaaacaatagctttaaataggatcaacatgctcaaagggttgtttgggatctgtgtgacttgccttgctggccttggaactcttcaaattcttctcctgcgaaaacggactctccggaaacgtcggagtctaaacagaaaagagcaaaaacaccaaaacagcacataaacaaacatgaacagtacatgcggatatttttaacatgtagatctcaattttagaaaaatttagagacttgaaccaactaaatccgagctaagatgaattagttatgaatttttgaagattaaatcggattaaaacacttatatggattttaattgaattatgacgcaataatgaattatttttgaaaaggaaaaggagatttattgcgtcagcggctagggtttgcggtggaccgggcgcacggcggcggttcacaagaacggacggccgagatcaatccatccaaaacggacggccgagatcgattggtgcacgaccggctcacagcgaacggccccgatgacgtcggcgatgacgtcacctaccggcggcggctcgggctcacacgctcgacggcgaacggtggtgcttcagcacgaacggagggcaccagcacgtagaggacgacgcggcgaactcaccggtgaccaaaacggcggcggaagaacaacggacgacgacggcgatgaggaagaagcggcggcgctcttcggcttgacgacggcgacggtgctccggcggacaacaacgacggcgaaggggcggacgaggacggtggtgactgtcacgtcctgataaattcatcccgaaataaaaatcattctctaaaagaaataatagaattaattaaaattcgaaaagaaattggcaaaccctaaaatacgtacaagaaaaattcaaatgtggcccggagaatttttgttaaattctccttggtctaaaaggagccctcaaattttagtggaattttcagagcacaaataataattgaaaagaaataaacaaagttgaaaaggttttataaaaagaaaaatcctaaaagaagttcttttcccccccttccctcttgggccggctcggcccacttctccctccctctctctctctcctcccccgcggcccatcggcctccccgcgcgcgcgcgccgctgacaggcgggcccgcccgccactctcgctgacgggtgggacccacctgtcatccccaaccccgcgccgcgcccgccgccgcccgtgccctagcgccgccgccgccgcggattccgccgcatcccgccttccccgcgcgccttaatgaggggggaattactccccgcgtttccctctcccgattccccctcttttccctctctctctccctcggattcgtccggattcatcccgcgaagttcgccggcgtcttcaatggcgcccgagatctccgcgcgcggtttcctctctccccggccgcgttctccccctctcggtgctatataattgctccccgagctccgctcttccgtttccgccgctcgccgctcgctctcgccgtcggatccatgctcgcgccgtgctcctctctctccgccgtcgccgccgagctccgttccgccgcccccgccgcttcggacttcctccctactcggcgaccccttcatccgc
